United States Patent Application Publication US 2018/0126003 A1 - sequence listing, part 170

SEQ ID NO: 299112 - DNA, 5625 bp, Artificial Sequence
  derived and/or modified sequence
atgcttgggtctagcgtaaagtccgtgcagcctgaggtagagctgagtagcggtggcggagacgagggcgcagacgagcctcgcggtgccggcagaaaggccgcagctgccgacggccgtggcatgctccccaagagagcgaaagcccccggcgggggcggcgggatggcaaaggcttctgctgccgagctaaaagtttttaagagcgggtccgtcgattctcgcgtcccaggcggtccacccgcgagcaacttgcggaaacagaagagtctgaccaacctgagtttcctcaccgactccgaaaagaaacttcagctgtacgaaccggagtggtcagacgacatggcaaaggctccgaaaggcctgggtaaagttggctccaaagggcgcgaagcccctctgatgagtaaaactttatctaagtcggaacattctctttttcaggccaaaggcagtccagccggcggagccaaaactcctctggcccccttggcgccgaaccttggaaaaccttccagaataccgaggggcccctacgcagaggtcaagcccctctcaaaggccccagaggctgccgtgagcgaagacggtaagagtgatgatgagctgctatcatctaaagcaaaggcccagaagagtagcggccccgtgccatccgccaaggggcaagaagaacgcgcctttttgaaggtggatcccgaactcgtggttactgtgctaggtgacctggaacagttactgttctctcaaatgttggatcctgaatctcagagaaagcgcacggttcagaacgtgctcgacctacggcagaatttagaggaaaccatgagttccctcagaggctctcaggtcacccacagttctctcgagatgacctgctacgactcagatgacgccaatccaagaagcgtttcatccttgagcaatcgctcctctcctctgtcctggcgctacgggcagtccagtcctaggcttcaggcaggcgatgctccatccgtcgggggttcctgcaggagcgaagggactccagcctggtatatgcatggggagcgcgcccactacagccatacaatgcccatgcggtccccgtctaaactctcacacatctcaagattagaactcgtggagagcctggacagtgacgaagtggatttgaagtctggctacatgagcgacagcgacttaatggggaaaacaatgacagaagacgatgatattaccacaggctgggatgaatcttcgtcaatttcctcgggattatctgacgcaagcgataacctttcaagcgaggagttcaacgcctcgtcctcgctcaactctctgccgagtacccccaccgctagcaggcgtaactcaaccattgtcctaagaactgatagtgaaaagaggtcactggccgagagcggtctgtcttggttttccgaaagcgaggagaaggccccaaagaagttggaatacgactctggatctctgaagatggaacccgggacatctaaatggcggagagaaaggccagagagctgcgacgacagttctaaaggcggggaattaaagaagcctatctctttgggccaccccggtagcttaaaaaaaggcaagactccacccgtagccgtcacctctcctatcacccacacggcccagagtgcgctgaaagtcgccggcaaacccgaaggaaaggcaactgataagggcaagctcgctgtgaaaaacacaggactgcagcggtcttcctcagacgctggacgggaccgtctatcagacgcaaagaagcctccatctggcattgcacggccctctacgagtgggagttttggctataaaaagccacctccagccacaggcacagccactgtcatgcaaaccggcggttctgcaacgttatcgaagattcaaaaaagttctggtattcctgtgaagcccgttaacggaaggaagacgtcacttgatgtcagtaactccgctgagccaggattcttggcacccggcgcacggtcgaacatccagtaccgctcgctgcccagaccagcaaaaagctccagcatgagtgtgacaggagggcgcgggggccctcgccccgtatcctcaagcattgatccatctctcctgagtaccaaacagggaggactgacccccagtcgcttaaaggaacccactaaggtcgcatcaggtcgaacaaccccagcccccgtgaaccagacggatcgcgagaaggaaaaggcgaaggccaaagccgtggccctggactctgacaatattagcctcaaatctatcgggagcccagagtcaacgcccaagaaccaagcttcacatcccacggcgacaaaactggcagaactgcctcctacccctctgcgggcgacggctaaatcgtttgtaaaaccgcctagcctggctaacctcgataaagtgaattccaacagcctcgatctgccctcgagttccgacactacccacgcctccaaagtgcccgatctccatgcgacgtcttctgctagtggtgggccactgccgtcctgtttcaccccttctccagctcctattttaaatattaacagcgcatcattttctcagggacttgaactaatgtcaggcttctctgtccctaaggagacacggatgtatcccaagctgtctggcttacatagaagcatggagtcactgcagatgccaatgtccctgcccagtgcattccccagttcaacgcccgtaccaacccctcccgctcctcctgccgctcccacagaagaggagactgaggagctgacatggagtggttccccgcgggcgggccaacttgattccaatcagagagacaggaatacattgccaaagaagggcctgaggtaccaactccagtcacaagaagaaaccaaggagcgtcggcatagtcatacaataggaggactgcctgagagcgacgatcagtccgagctcccatcccccccggcgctcccaatgtccctgtctgctaagggtcagctgaccaacattgtttcccccaccgccgccacgacgccccgcattactcggtcgaattctatccccacccatgaagccgctttcgagttgtacagtggctctcagatggggagcacactgtcccttgcagagcggccaaaggggatgattcggagcggcagctttcgcgatccaaccgatgatgtgcatggatcggtactgtcgcttgcctcctctgcttcctcaacctacagctccgccgaggagagaatgcagtctgagcagattagaaaactccggcgtgaactggagtcatcccaagagaaggttgcaactttaacttcccagctgtccgcaaatgccaatttggttgctgccttcgaacagtcactagtaaacatgacatccaggctgagacatctagctgagacggcagaggagaaagacaccgaattgctggatctgcgggaaacaattgattttcttaaaaaaaagaacagcgaggcccaagccgtgattcagggggccctaaatgcctccgaaacaactccaaaggagttaagaattaagagacaaaattcatccgatagcatcagctccctgaactcgattacttcccacagtagcatcgggtcgtcaaaagatgctgatgccaagaaaaaaaagaagaagtcttggctgcgctcatctttcaataaagcatttagtattaagaagggcccgaagtctgccagttcttacagcgatatcgaagaaattgccactcctgattcaagcgctcctagctcacctaagctccagcatggaagcaccgagactgcgtcaccctccattaaatccagcacgagctctagtgtcggcacagatgtcactgaagggcctgcccacccagcaccgcacacgcgactgttccacgccaatgaagaggaggaacctgagaagaaagaggtcagcgagctgagatccgagctgtgggaaaaagagatgaagctgaccgacattaggctcgaggctttgaatagcgcacaccagcttgaccaactgagggagaccatgcacaatatgcagctggaagtcgacctgcttaaagcagagaatgacagactgaaagtcgccccgggcccatcttcagggtctactccagggcaggtgccaggctcatctgctcttagctctcctcggagatcacttggcctggcactaacacacagtttcggaccaagccttgccgacacggacctttctcccatggatggcatcagcacgtgcggtcctaaggaggaagttaccctgcgcgtggtggttcgtatgccacctcagcacatcattaaaggagacttgaagcagcaggagttcttcctgggctgtagtaaggtctccggcaaggtcgattggaaaatgctggatgaggctgtgtttcaggtctttaaggactacataagtaagatggatcctgcttccaccctcggcctctccactgagagcatccatggctattcaataagtcatgttaaacgggttctggatgcggaacctcctgagatgcccccgtgccggcggggtgtgaataatatctcagtgagtctcaagggcttgaaagagaagtgtgtggattccctggtgtttgagaccctgattcctaagccgatgatgcagcactatatcagcctacttctcaagcatcgacggctagtgctgtccgggccttctggcaccggaaagacgtacctgaccaaccggttggcagagtacctggtggagcgctctggacgcgaagtgactgaaggaatcgtgagtacctttaatatgcatcagcagtcatgtaaggacctgcagctatatctgtccaatctcgccaatcagatcgatagggaaactggaatcggtgatgtacccctcgtgatcttactggacgatttgtccgaggccggcagtattagtgaattagtgaacggtgcactgacatgcaagtaccacaagtgcccatatattattggcactactaatcagccggtgaaaatgacgccgaatcatggccttcatctgagtttcaggatgttgacctttagcaacaacgtggaacccgccaacggttttctggtgcgctatctcagaaggaaactggtggagtccgactccgatattaacgccaataaagaggagttgctaagggtgcttgactgggtgcctaagctttggtaccacttgcatacattcctcgagaaacatagtacgtctgacttcctaataggaccttgctttttcctaagctgccctattggaatagaagactttcggacttggttcatcgacctctggaataattctattatcccctatctacaagagggcgccaaggatggaattaaagtgcatggccagaaggccgcatgggaggatcccgtcgagtgggttcgcgatacactaccatggccctctgcccagcaggaccaaagcaagctctatcacctgcctccaccaacagtgggccctcattcgattgctagccctcctgaggaccggaccgttaaggatagcacgcccagtagcttggatagcgacccactgatggctatgctcctcaaactgcaggaggcagccaattacatagaatcgccggaccgcgaaaccattcttgaccccaatctccaagctacactgtag

SEQ ID NO: 299113 - DNA, 5625 bp, Artificial Sequence
  derived and/or modified sequence
atgctgggcagctctgtgaagtctgtgcagcctgaggtggagctgagcagcggcggcggagatgaaggagcagatgagcccaggggggccggcaggaaggctgctgctgctgatggccggggcatgctgcccaagagggccaaggcccctgggggcggcggcggcatggccaaggccagcgctgctgagctgaaggtgttcaagagcggctctgtggacagccgggtgcctgggggccccccagccagcaacctgaggaagcagaagagcctgaccaacctgtccttcctgacagacagcgagaagaagctgcagctgtatgagcctgagtggagcgatgacatggccaaggcccccaagggcctgggcaaggtgggcagcaagggccgggaggcccccctgatgagcaagaccctgagcaagtctgagcacagcctcttccaggccaagggcagccctgctgggggcgccaagacccccctggcccccctggcccccaacctgggcaagcccagccgcatcccccggggcccctatgcagaggtgaagcccctgagcaaggcccctgaggccgctgtgtctgaagatggcaagagtgatgatgagctgctgagcagcaaggccaaggcccagaagagcagcggccctgtgcccagcgccaagggccaggaggagcgggccttcctgaaggtggaccctgagctggtggtgacagtgctgggggacctggagcagctgctcttcagccagatgctggaccctgagagccagaggaagaggacagtgcagaatgtgctggacctgcggcagaacctggaggagaccatgagcagcctgcggggcagccaggtgacccacagcagcctggagatgacctgctatgacagtgatgatgccaaccccaggtctgtgagcagcctgagcaacagaagcagccccctgtcctggaggtatggccagagcagcccccggctgcaggccggagatgcccccagcgtgggcggcagctgccgctctgagggcaccccagcctggtacatgcacggggagcgggcccactacagccacaccatgcccatgaggagccccagcaagctgagccacatcagccggctggagctggtggagagcctggacagtgatgaggtggacctgaagagcggctacatgtctgacagcgacctgatgggcaagaccatgacagaagatgatgacatcaccaccggctgggatgagagcagcagcatcagcagcggcctgagtgatgccagtgacaacctgagcagcgaggagttcaatgccagcagcagcctgaacagcctgcccagcacccccacagccagcagaagaaacagcaccatcgtgctgaggacagacagcgagaagaggagcctggccgagagcggcctgtcctggttcagcgagagcgaggagaaggcccccaagaagctggagtatgacagcggcagcctgaagatggagcccggcaccagcaagtggaggcgggagaggcctgagagctgtgatgacagcagcaaaggaggagagctgaagaagcccatcagcctgggccaccctggcagcctgaagaagggcaagaccccacctgtggccgtgaccagccccatcacccacacagcccagagcgccctgaaggtggccggcaagccagagggcaaggccacagacaagggcaagctggccgtgaagaacacaggcctgcagaggagcagcagtgatgctggccgggaccggctgagtgatgccaagaagccacccagcggcatcgcccggcccagcaccagcggcagctttggctacaagaagcccccaccagccaccggcacagccaccgtgatgcagacaggaggcagcgccaccctgagcaagatccagaagagcagcggcatccctgtgaagcctgtgaatggaaggaagaccagcctggatgtgagcaacagcgctgagcccggcttcctggcccctggggcccggagcaacatccagtaccgcagcctgcccaggcctgccaagagcagctccatgtctgtgactggaggccggggcggccccaggcctgtgagcagcagcattgaccccagcctgctgagcaccaagcagggcggcctgacccccagccggctgaaggagcccaccaaggtggccagcggccgcaccaccccagcccctgtgaaccagacagaccgggagaaggagaaggccaaggccaaggctgtggccctggacagcgacaacatcagcctgaagagcatcggcagccctgagagcacccccaagaaccaggccagccaccccacagccaccaagctggccgagctgccccccacccccctgcgggccacagccaagagctttgtgaagccacccagcctggccaacctggacaaggtgaacagcaacagcctggacctgcccagcagcagtgacaccacccacgccagcaaggtgcctgacctgcacgccaccagcagcgccagcggcggccccctgcccagctgcttcacccccagccctgcccccatcctgaacatcaacagcgccagcttcagccagggcctggagctgatgagcggcttctctgtgcccaaggagaccaggatgtaccccaagctgagcggcctgcaccgctccatggagagcctgcagatgcccatgagcctgcccagcgccttccccagcagcacccctgtgcccaccccaccagcccccccagctgcccccacagaggaggagacagaggagctgacctggagcggcagcccccgggccggccagctggacagcaaccagagggacaggaacaccctgcccaagaagggcctgcgctaccagctgcagagccaggaggagaccaaggagaggaggcacagccacaccatcggcggcctgcctgagagtgatgaccagagcgagctgcccagccccccagccctgcccatgagcctgagcgccaagggccagctgaccaacatcgtgagccccacagctgccaccaccccccgcatcaccaggagcaacagcatccccacccatgaggccgcctttgagctgtacagcggcagccagatgggcagcaccctgagcctggccgagcggcccaagggcatgatccgcagcggcagcttccgggaccccacagatgatgtgcacggctctgtgctgagcctggccagcagcgccagcagcacctacagcagcgctgaggagaggatgcagagcgagcagatcaggaagctgcggcgggagctggagagcagccaggagaaggtggccaccctgaccagccagctgagcgccaatgccaacctggtggccgcctttgagcagagcctggtgaacatgaccagccggctgcggcacctggccgagacagctgaggagaaggacacagagctgctggacctgcgggagaccatcgacttcctgaagaagaagaacagcgaggcccaggccgtcatccagggcgccctgaatgccagcgagaccacccccaaggagctgcgcatcaagaggcagaacagcagtgacagcatcagcagcctgaacagcatcaccagccacagcagcatcggcagcagcaaggatgctgatgccaagaagaagaagaagaagtcctggctgcggagcagcttcaacaaggccttcagcatcaagaagggccccaagagcgccagcagctacagcgacatcgaggagatcgccaccccagacagcagcgcccccagcagccccaagctgcagcacggcagcacagaaacagccagccccagcatcaagagcagcaccagcagctctgtgggcacagatgtgacagagggccctgcccacccagccccccacaccaggctcttccacgccaatgaggaggaggagcctgagaagaaggaggtgtctgagctgcggtctgagctgtgggagaaggagatgaagctgacagacatccggctggaggccctgaacagcgcccaccagctggaccagctgcgggagaccatgcacaacatgcagctggaggtggacctgctgaaggccgagaatgaccggctgaaggtggcccctggccccagcagcggcagcaccccaggccaggtgcccggcagcagcgccctgagcagccccaggaggagcctgggcctggccctgacccacagctttggccccagcctggccgacacagacctgagccccatggatggcatcagcacctgtggccccaaggaggaggtgaccctgcgggtggtggtgaggatgccaccccagcacatcatcaagggggacctgaagcagcaggagttcttcctgggctgcagcaaggtgtctgggaaggtggactggaagatgctggatgaggccgtgttccaggtgttcaaggactacatcagcaagatggaccctgccagcaccctgggcctgagcacagagagcatccacggctacagcatcagccacgtgaagagggtgctggatgctgagcccccagagatgccaccctgccggcggggcgtgaacaacatctctgtgtccctgaagggcctgaaggagaagtgtgtggacagcctggtgtttgagaccctcatccccaagcccatgatgcagcactacatcagcctgctgctgaagcaccggcggctggtgctgagcggccccagcggcaccgggaagacctacctgaccaaccggctggccgagtacctggtggagaggagcggccgggaggtgacagagggcatcgtgtccaccttcaacatgcaccagcagagctgcaaggacctgcagctgtacctgagcaacctggccaaccagattgaccgggagactggaattggagatgtgcccctggtgatcctgctggatgacctgtctgaggccggcagcatcagcgagctggtgaatggagccctgacctgcaagtaccacaagtgcccctacatcatcggcaccaccaaccagcctgtgaagatgacccccaaccacggcctgcacctgtccttcaggatgctgaccttcagcaacaacgtggagcccgccaacggcttcctggtgcgctacctgcggaggaagctggtggagagtgacagcgacatcaatgccaacaaggaggagctgctgcgggtgctggactgggtgcccaagctgtggtaccacctgcacaccttcctggagaagcacagcaccagtgacttcctgattggcccctgcttcttcctgagctgccccatcggcatcgaggacttccgcacctggttcatcgacctgtggaacaacagcatcatcccctacctgcaggagggcgccaaggatggcatcaaggtgcacggccagaaggccgcctgggaggaccctgtggagtgggtgcgggacaccctgccctggcccagcgcccagcaggaccagagcaagctgtaccacctgcccccacccaccgtgggcccccacagcatcgccagccccccagaggacagaacagtgaaggacagcacccccagcagcctggacagcgaccccctgatggccatgctgctgaagctgcaggaggccgccaactacatcgagagcccagaccgggagaccatcctggaccccaacctgcaggccaccctgtag

SEQ ID NO: 299114 - DNA, 5625 bp, Artificial Sequence
  derived and/or modified sequence
atgctgggcagcagcgtgaagagcgtgcagcccgaggtggagctgagcagcgggggaggtgatgaaggcgcagatgaaccccgcggcgccggacgaaaggctgcagccgcagacggacgcggcatgctgccaaagcgtgctaaagcgccgggcggcggcggtgggatggcaaaagcatctgctgccgagctgaaagtgtttaagagcggttccgttgattcgagagtgcccggaggaccacccgcctccaatctccgcaagcagaagtccttgactaatttatcttttctgacagattccgagaagaaactccagctgtatgagccagaatggtcagacgacatggccaaagcacccaagggacttgggaaggttggttctaaggggcgggaggcccccctcatgtccaagactctttccaaaagtgagcactctcttttccaggccaagggttccccggccggaggcgccaagacaccgcttgcccctctggctccaaacttgggcaagccatctcgtattcctcgggggccttacgccgaagtcaaaccattgtcgaaagcccctgaggccgctgtgtccgaagacggcaagtctgacgatgagttactgtccagcaaggcaaaggctcagaaatcctctgggccagttcctagcgccaaagggcaggaagaaagagcgttcttgaaagtggacccggagctggtggtaacagttctgggagacctcgaacaacttttatttagtcagatgttggaccccgaaagccagcgtaaaagaaccgtgcagaatgtactggatctgagacagaatctcgaagaaaccatgagttctctccgtgggtcacaggtgactcatagctccctcgagatgacttgctacgattcagatgacgccaatccccgctcagtatcatcccttagtaacagaagctccccactctcgtggaggtatggccagtcttctccaagactacaggcaggagatgctccgtccgtggggggttcatgtcgctcggaaggcacgccagcctggtacatgcatggtgagcgtgcccattacagccatactatgccgatgaggtcccctagcaagctgtcccacatctctcgactggagctggtggagagtctggatagcgatgaagtcgacttgaaatccggctatatgagtgactccgacctgatgggaaaaacaatgactgaagacgacgatatcacaacaggttgggacgagtcaagctccatttcgagtggtctgtctgatgcctccgataacctttcctccgaggaattcaatgccagcagcagccttaacagcctcccctccaccccgacagcctctcggcggaatagcacaattgtcctacgcaccgattctgaaaaaaggagtttagccgagagcggtctgtcatggttcagcgagagcgaggaaaaagctcccaagaagctggaatatgacagcggttccctgaaaatggaacccggcacaagcaaatggagaagggaaagaccggagagctgcgacgattcttccaaagggggtgagctcaagaaacccatctcacttggacatccaggatcgcttaagaaaggcaagacaccaccggtcgctgtgacctcccctattactcacaccgctcagtctgcattaaaggttgcaggaaagccagagggaaaggccaccgacaagggtaaactggcagtaaaaaacaccggactgcagcggagcagcagcgacgccgggagagaccgcctttccgacgcaaaaaaaccaccgagcggcattgcaagacccagtacttccggctcctttggttacaagaagcctccaccggccaccggtacagccaccgtgatgcaaaccggaggcagcgctacactttcgaaaatccagaagtcatctggcatccctgtgaagcccgttaatggacgtaaaacttccctagatgtgagcaactcagcggaaccggggtttctcgcccccggagctagatctaacatacaatacagatctctcccaaggccagctaagagcagctcgatgtcagtgacaggtgggagaggcggcccaagaccagtttctagcagtatcgacccatctctattatccaccaagcagggggggcttacaccctcccgcttgaaagagcccacaaaagtggcctcaggaagaacaacgccggcccccgttaaccagactgatcgcgagaaggaaaaggcgaaagcaaaggctgtggcactggactctgacaatatctccctgaagtccatcgggagccccgagtccaccccgaaaaaccaagcctctcaccccaccgccacaaagctggccgagctgcctccgaccccgctgcgcgcaacagctaagagcttcgtgaagcccccctcgctcgcaaacctagacaaggtcaactcaaacagtctcgatctcccttcctcctccgataccacacacgcctcgaaagtccccgatcttcatgccactagctccgcaagcggtggtccactgccaagctgcttcacacctagcccagctcctatcctgaatatcaactccgcctcctttagccaagggctggaactcatgtcaggattcagcgtgcccaaagagactcgcatgtacccgaagctctcaggcctccaccggtcaatggagagcctgcagatgccaatgagtttaccgtccgcatttccctctagcacaccagtgccaacccctcccgcaccaccagccgcccctacggaggaggagaccgaggaactaacctggtcgggcagtccaagggccggacagctggatagcaatcagcgggacaggaacaccttgcctaagaagggcctgcggtatcaattacaaagccaagaggaaaccaaagaaagacgccattcccacactatcgggggactccctgaaagcgatgaccaatccgagctccctagtccccctgcgcttccgatgtcactgagtgctaaggggcagctcacgaacatcgtctcaccaaccgccgctacaacccctagaataaccagatctaacagcatccccactcacgaagccgcctttgagctctactcaggctcacagatgggctccacactctctcttgctgaacggccaaaggggatgatcagatccggctcctttagagatcccaccgacgatgtgcacggctccgttctgtctttggcgagtagtgcttccagcacttacagctccgccgaggagaggatgcaatcggagcaaatccggaagctgaggcgagagctggagtcatcacaggaaaaggttgccacattaacctctcagctgagcgctaacgcaaacctggtggcagccttcgagcaatccctggttaatatgacaagtagactcagacatctggcagagaccgccgaggaaaaggacaccgagctgctggatctgcgtgaaacaattgattttctgaagaagaaaaacagcgaagctcaggcggtcatccagggcgctctgaacgcctccgaaacaacacccaaggagcttaggataaaacgccagaacagctcggactccattagttctctgaactcaattactagccattcctcgattggatcatcaaaagacgctgatgcgaaaaagaagaagaagaaatcatggctgcggtccagttttaacaaagcattctctattaagaaaggacccaaatcagcctcctcctattccgacatagaggagatcgccacacccgatagctccgccccgtcttcccctaaactgcagcatggttcaaccgagacagcctccccatccatcaagtcaagtactagctcgtcagtgggtactgatgtgactgaaggtcctgcacatcctgcaccacataccaggctgtttcatgcaaatgaggaagaggagcctgaaaagaaggaggtgtcagagcttcgatccgagctgtgggaaaaggaaatgaagctcaccgatataaggctggaagcccttaattcagcccaccagctggatcagcttcgcgagactatgcataacatgcaactggaagtcgatttacttaaggctgagaacgatcggctgaaggtcgccccagggccgagctctggttccactcccggccaggtgccaggatcatcggcactctcctcgcccagaagatctctggggctggccctcacccactcttttgggccgtctctggcagataccgatttgtcccccatggacggtatctccacctgtggacctaaagaagaggtaacactgcgcgtggtagtcaggatgcctccacagcacattatcaagggtgatctgaaacagcaggaattctttcttggctgcagcaaggtctcaggtaaggttgactggaaaatgctcgatgaggctgtcttccaggtattcaaggactacatttcgaagatggatcctgcttcaaccctcgggctgtcaactgaaagtatccacggctattccattagtcacgttaagcgcgttctggacgccgagccacccgagatgcccccatgtagaaggggcgtcaataatatttctgtgtcgctgaaggggcttaaggaaaagtgcgtagacagccttgtcttcgaaacccttatccccaagcccatgatgcagcactatattagtctgcttctcaagcatagaagacttgtcctctctggaccttctggcacaggtaagacttacctgacaaatcggctcgccgaatatttggtggaacggtcaggccgcgaggtgactgagggtatcgtttccacttttaacatgcatcaacagtcatgtaaggacctacagctgtacctgtccaatctggccaatcagatcgatcgtgaaacggggatcggtgatgtccctctggtgatcttacttgatgatctgagtgaggcaggtagcatcagcgaactggtgaatggtgctttaacctgtaagtatcacaagtgcccttacattatcgggacaacaaaccaaccggttaagatgacacccaaccacggactgcacttatcattccggatgctcaccttctccaataatgtggaacccgctaatggcttcctcgtgagatacctccggcggaagctagtggagtccgattctgatatcaatgccaataaagaggaattgttacgggtgctggattgggtgcctaagttatggtaccatctgcacacgtttctcgagaagcacagtacctctgactttttgattgggccatgctttttcttgagttgcccaatcggcatcgaggacttccggacatggttcattgacctgtggaacaactcaataatcccttatctccaggaaggagccaaagatggaatcaaagttcacggccagaaggccgcctgggaagaccctgtggagtgggtaagagatactttaccgtggccaagtgcacagcaagatcagtcaaaattgtaccacttgcctccaccaactgtgggtccccatagcattgccagcccacccgaggacaggacagtgaaagacagtactccatcatcactggattctgacccactgatggctatgctgttaaagttgcaggaggctgctaactacattgagtcccccgacagagagacgatcttggacccaaacctgcaggcaactttatag

SEQ ID NO: 299115 - DNA, 13014 bp, Artificial Sequence
  derived and/or modified sequence
ggagccgcggggcttccatccttcctttgactgatttttaaattttaatttgtattttccccgccgccccgccccttttcctccgaccccgccctatcgctccccggcttccctgctctttcctttttcccggcttccttcctcgcgtttctttcccctgcgccctcggcttgcctctctccctcctccctcgctctctcccccttctctccccttcttcctcggtttcttccgtcctctctctccccctcctcctcccccgcctcctcctcctgcgctcccgccccctgccccctccccccgtgcctgcagacgcgcggatcgtccatgcgctcctcgcgggcagaatgctgggcagcagcgtcaagagcgtgcagcccgaggtggagctgagcagcggcggcggcgacgagggcgcggacgaaccgcggggcgccggcaggaaggcggcagcggcggacggcagaggcatgctgcccaagcgcgccaaggcgcccggcggcggcggcggcatggccaaggccagcgcggctgagctgaaggtcttcaagtccggcagcgtggacagccgtgtccccggcgggccgcccgcctccaacctgcgcaagcagaagtcactcaccaacctctcttttctcacggactccgagaaaaagctgcagctttatgagcccgaatggagcgacgatatggccaaggcgcccaaaggcttaggcaaggtggggtccaagggccgtgaagctccgctgatgtccaagacgctgtccaagtcggagcactcgctcttccaggccaagggcagcccggcgggcggcgccaagacccccctggctccgctcgcgcccaacctgggaaagccgagccggatccctcgaggaccctatgcggaggtcaagccgctcagcaaggcgcctgaagcggccgtgagcgaagatggcaaatcggacgacgagctgctctccagcaaggccaaggcgcaaaagagctctgggcctgtcccctctgccaagggccaggaggagcgcgccttcctcaaggtggaccccgagctggtggtgaccgtgctgggagacctggagcagctgctcttcagccagatgctggacccagagtcccagagaaagaggacagtgcagaatgtcctggatctccggcagaacctggaagagaccatgtccagcctgcgagggtcccaggtgactcacagctccctggagatgacctgctacgacagcgatgatgccaacccacgcagcgtgtccagcctctccaaccgctcgtcccctctgtcatggcgctatggccagtccagtccgcggctgcaggctggtgacgcgccctctgtgggtgggagctgccgctcggaggggacgcccgcctggtacatgcacggcgaacgggcccactactcccacaccatgcccatgcgcagccccagcaagctcagccatatctcccgcctggagctggtcgaatccctggactcggatgaggtggacctcaagtccggctacatgagcgacagtgacctcatgggcaagaccatgacggaggatgatgacatcactaccggctgggatgaaagcagctccatcagtagtggactcagcgatgcctcagacaatctcagttcagaagaattcaatgccagctcctcactcaactccctcccaagtactcccactgcttctcgcaggaactcaacaatagtgctacgcacagactcagagaagcgctcactggcagaaagtgggctgagctggtttagtgaatcagaggagaaagcccctaaaaaactggagtacgacagtggtagcctgaagatggaacctgggacttctaagtggcggagggagcggcctgagagctgtgatgattcatccaagggtggagaactgaaaaagcccatcagcctgggccaccctggttccctgaagaagggcaagaccccacctgtggctgtaacttcccccatcactcacacagcccagagtgccctcaaagtcgcaggcaaacctgagggcaaagctacagacaagggtaagcttgcagtgaagaatactgggctccaacgctcctcctctgatgctggtcgggaccgcctgagtgatgctaagaagcccccctcgggcattgctcgcccctccacttcgggatcctttggctacaagaagcctcctcctgccacaggcacagccactgtcatgcaaactggtggttcagccactctcagcaagatccagaagtcctcaggcatccctgtcaagccagtaaatgggcgcaagactagcttagatgtttccaacagtgcagagccaggattcctggctcctggagcccgttctaacatccagtaccgcagcctgccccggccagccaagtcaagttctatgagcgtgaccggcgggcggggtggacctcgccctgtgagcagcagcattgaccccagtctcctcagcaccaagcagggaggccttacgccttccagactgaaggagcctaccaaggtagccagtgggcggaccactccagcccctgtcaatcagacagatcgggaaaaggagaaggccaaagccaaggcagtggccttggactcagacaacatctccttgaagagtattggctccccagaaagtactcccaagaaccaagcaagccaccccacagccaccaagctggcagagctgccaccaacccctctcagggccacagcgaagagctttgtcaaaccaccctcactagccaatcttgacaaggtcaactccaacagtctggatctaccatcatccagtgataccacccatgcttcaaaggtcccagatctgcatgctacaagctcagcatctgggggccctctcccttcctgcttcacccccagtccggcacccatcctcaatattaactcagccagcttctcccagggcctggagctaatgagtggtttcagtgtgccaaaagagacccgcatgtaccccaaactctcaggcctgcacaggagcatggagtccctccagatgccaatgagcctccccagtgccttccccagcagtactcccgtccccaccccacctgctccccctgctgctcccacagaagaagagacggaagagctgacttggagtggaagccccagagctgggcaactggacagtaatcagcgggatcggaacactcttcccaagaaagggctcaggtaccagcttcagtcccaggaggagaccaaggagaggcgacattcccataccattggtgggctgcctgaatccgatgaccagtcagagctgccttctccccctgcacttcccatgtctctgagtgcaaagggccaacttaccaacatagtgagtcccactgcggccaccacgccaagaatcacccgctccaacagcatccccacccacgaggcggccttcgagctgtacagcggctcccaaatggggagcaccctgtccctggccgagagacccaagggaatgattcggtcaggatccttccgagaccccacggacgatgttcacggctcagtgctgtccctggcctccagtgcctcctccacctactcctcagctgaggagaggatgcaatctgagcaaatccggaagcttcgtagggaactggaatcatcccaggaaaaagtggccaccttgacgtctcagctttctgccaatgctaatctggtggctgcttttgagcagagcctggtgaatatgacatcccgcctgcgacacctggcagagacggccgaggagaaggacactgagctgctggatttgcgagaaaccatagactttctgaagaaaaagaactctgaggcccaggcagtcattcagggagcccttaatgcctcagaaaccacacccaaagaacttcggatcaagagacaaaactcctcagatagcatctcaagcctcaacagcatcactagccattccagcatcggcagcagcaaggatgctgatgcgaaaaagaagaaaaaaaagagttggcttcgaagttccttcaacaaagcgttcagtataaaaaaggggcccaagtcagcttcctcatactcggatatagaggagattgctacacccgactcttcagccccctcatcccccaaactacagcatggttctacagagactgcttcaccctccatcaagtcctccacctcgtcctccgtgggcactgatgtcaccgagggccctgctcacccagccccccacactaggctgttccatgcaaatgaggaggaggagccagagaagaaggaggtatcggagctgcgctctgagctatgggagaaggaaatgaagcttacagacatccgcttggaggccctcaactctgcccaccaactggatcagcttcgggagaccatgcacaacatgcagttggaggtggacctgctgaaagcagagaatgaccgactgaaggtagccccaggcccctcatcaggctccactccagggcaggtccctggatcatctgcattatcttccccacgccgctccctaggcctggcactcacccattccttcggccccagtcttgcagacacagacctgtcacccatggatggcatcagtacttgtggtccaaaggaggaagtgaccctccgggtggtggtgaggatgcccccgcagcacatcatcaaaggggacttgaagcagcaggaattcttcctgggctgtagcaaggtcagtggaaaagttgactggaagatgctggatgaagctgttttccaagtgttcaaggactatatttctaaaatggacccagcctctaccctgggactaagcactgagtccatccatggctacagcatcagccacgtgaaacgagtgttggatgcagagccccccgagatgcctccttgccgtcgaggtgtcaataacatatcagtctccctcaaaggtctgaaggagaaatgcgtcgacagcctggtgttcgagacgctgatccccaagccgatgatgcagcactacataagcctcctgctgaagcaccggcgcctcgtcctctcgggccccagcggcacgggcaagacctacctgaccaatcgcttggccgagtacctggtggagcgctctggccgtgaggtcacagagggcatcgtcagcaccttcaacatgcaccagcagtcttgcaaggatctgcaactgtatctttccaacctagccaaccagatagaccgggaaacaggaattggggatgtgcccctggtgattctattggatgacctgagtgaagcaggctccatcagtgagttggtcaatggggccctcacctgcaagtatcataaatgtccctatattataggtaccaccaatcagcctgtaaaaatgacacccaaccatggcttgcacttgagcttcaggatgttgaccttctccaacaacgtggagccagccaatggcttcctggttcgttacctgaggaggaagctggtagagtcagacagcgacatcaatgccaacaaggaagagctgcttcgggtgctcgactgggtacccaagctgtggtatcatctccacaccttccttgagaagcacagcacctcagacttcctcatcggcccttgcttctttctgtcgtgtcccattggcattgaggacttccggacctggttcattgacctgtggaacaactctatcattccctatctacaggaaggagccaaggatgggataaaggtccatggacagaaagctgcttgggaggacccagtggaatgggtccgggacacacttccctggccatcagcccaacaagaccaatcaaagctgtaccacctgcccccacccaccgtgggccctcacagcattgcctcacctcccgaggataggacagtcaaagacagcaccccaagttctctggactcagatcctctgatggccatgctgctgaaacttcaagaagctgccaactacattgagtctccagatcgagaaaccatcctggaccccaaccttcaggcaacactttaagggttcggcaatcactgtcacccccggacagcagaacgctggcatcagctatcttagctcctcctctcccctctcctctttcagagcactggctctccagccccaggaggagaacaggagggaggaggagatgaaagaggagggacaggttcttggtgctgtacctttgagaacttcctaggaaggaatggtggggtggcgtttgggaacttgtgccccctaaacacatttactggcctcctctaatgactttggggaaaagatgattctgggtctttcccttgacttcttgtttcaattacaaactcctgggctttctggggaggggttcagaaaacatcaaaacactgcagcagttcctaaatgattctcacaagcaaccctgagagagacagtcttgtgagggagatctgggggaggcaggaagctcctcagattttctcacagacccttcccaattccatcaccactgccaacaactcctcccccagagatctggctggagcccagaaaaagaagcatgtggtttaaaaaatgtttaaatcaatctgtaaaaggtaaaaatgaaaaacaaaaacaagcaaacaaacaaaaaacaatggaaaagatgaagctggagagagaggaaccagttgccaaggtagagagctgcccgctcctgccctctggatgacataggggacatcaacaagacggctgccaacctgagaagtcaccaaaccacaaaaataaccttacagccttcagggaaagactaccagctctgtctttctaccctctaatttaacaatgcataagagtcaataaaccctacttttttatttttggtttttattttgttttcatttttttctcccatttgcctatttatttttttgtttcccttttttttttctttttccgtttttccatttcctcacatgtccacgagatgcttgggttgcttttccaggggctagtttggcttttccaagtgggttttctttggagaatctgatgccatgcaattggcatgacacctgccatgccactatctttggcatccatggggcttatatgagacatgaagcattggctcagaagtagagggagaagaggaacccagttcccttgacttcccttttgagagcacacgttctgctgggtagctcaattgccagcctctgtcatgagaaggtatagccccatcttgatagaagagttactccgagctttatcatggaccagaggaaaaccagaaaactgaaaacattcctctgtcttgtggccagtttggcctttcactgcactattctgatggtgcctgactgaatccaaatatcctagctggctcttactatttttcacaaatgagtattcacatataagagatgaacatccatgtgagatcatcccaatcagaatataagactcaaggagtttgacttggtggccaatacctgccttccaaagagatcctacctttgcagatttgctcctttcccattgccttgaaggtctggcaatccctgttctttcatttgacaagtacttactgagtactcactatatacaaatcattaggttaaaacagacacacacacacacacacacacacacacacacacacacacacacacaagacctgggcccttaagtttacagtccagcaggaaatgttaacctccattcagctacgcccccttgttatctagaccttcgggatcatctaagaaatgtagctgaaacccaaggagccagctagaaagaagcttttgattagatgtacaatacattgggggcagaagatctgggatcaattaagatggagcctgaaggactatggaatcttgcttgtcaggaatgggcaagtctacttcctgccatttctgaaagccccgcgggaccagcttctaggctgagctgcctagtaggctgaagcttcaggactctgcaggtcaaggatatgtgatgagcaccggcctaagtgtttgctcttcagattcctaagtagcacaagactttatcagaatctataggcataccaacctggatcactcttccacccaaccgaggagtagatgcatctgaatcttcatatcggtatattaagtccaaaagatggtccgggctgcccctcacaaaagcttctgcatccacgtggtaagctcccatggatgacagggttctgtatgatggagactattattgctattgctgctaattccatgagctgtgaagatccctaaccaactcagctgtaacatatgcaattctgtggtgggaagaggctgtgtgtccaaggatggtgctgaaatcactgccttaaggtctctgctgtgcagaatgaggaggcccccgagctggctgttctaacttagaaggaagagaagactggatgggcctgcttgggatctaggcctcttctaaaccctatcctaagctccagttccatggcaaggctcagacttttaatgccatcttaatctgatggttgagcgcttcactctattttctggtgctgcccagccagtgccttctgccatggatgttactggctacttgagaaaaaggagaggggagaaccccttctttcattccaactgcctccgaccccaaagggattcttggctctctggtaaccatggataccaccatgaattttatttggatcctcagcaggttgattctggaggcctcatgctatgactttttatttctcttcctgggatccaccaccctctactctcagctgactgctgcatttaggccaggtctccaattgctttcctccagaaagtgtgttcccgtctagtgaggtagtattgaagcctcggctttccctctggagcctgggaccctgtttacagttgcacatctgggcccctcactgtggggattgatcattctcatgaaggaatcacagttatatggcaactgcagaaggctgagcctcctcatggtgctataaccccttgggacactcatccagacttctctgaagcagaaaacctgagctccccactcactgccctagaatttatggcaaggagcaaatctacagcattctctcccacctacgtcctgcttcttggttgagactactgggatccttcagaaaagaaacactgggtcccatagctaaattctcaaccgccaggcaccttcagaagaatccagcctaatactggaatttgtgctattatcttcctctccagccccccaactccatccctcaccacagttgtctaggaaatgacatgaattcaatatctaatgtcaaccaatggggagagccacaactccaggagaggttcctgagctgagtcccttaatttctggatgaagaagaccaacaagttttgtccaatgtatttgtttctcagaccttgcctaggcactaaaaataaaatactaggtcattggaggctaatgtgggacctgatgtctgcgtgtgtgtgtgtgtgtgtgtgtgtgtgtgtctccctctctcacacacacaagagcagtttgctgttgctgtttcctaccttctgaggcttcaaagtattttttaaaatctatgctttgtggcagctctacggtgcttatctctgtctttgtgtcaatccttaagtacccatgtctttttcatgtctaaccattgggaaggtagaggctggcagggaagacaaatctgctacaagtccatgggaagaccctacaatgaaatgttcattggttggtatactgttttagtcttgaattgccaactttccaactgatctatccatattccttaagtactaaagacaaaatagagggcttctttttctctcttaatgtcttgccttctggttttcctggtttgcaagactaagtgtacctaatctcaccatctcttcacttctagctctctgaaacaagggtcacactactcagagggataaccccttacagtggtctgaggagtaactatttcctaaagtattctaaaagagtaggaagagagaaatggtagcctgctgcttctcacagacacctcacatcctcacttgggatggcatccacatagaaaccctgcatttaggtaaaatttgcctgactgaaggggactcagtcctccaaatcaaggtcaagaagatatctgcatgagaccttaagaactctttattgccattatttggagagggcgggggaattgtcctaatcacacatttaacacagggaataagtgctgaagtgacccagatcaccaagcgcagttcctcatcatactttatttttgctttccttattccttggcactgactaagctaaagttaagaagccgacttcataagccaacccctgtgatgggatggaaaaatgggcttttgcagagggtttattaatagagatggatatactactcacaagttctggctcatggctccactgagaaggccatagtaataaaatgatcttatgaacactgttccccaaaggccaaagcctgaagatattgccccttataatccaatcagccttatattttaataagtcctgaatcaacctgactacggatatatggggccaccagggtgcatgggtgcatgtctgctcagcctagccctggaagtgagcactgccggccacagatcctgggaaaggtggtagtaacccagaagatgtagccttgaagggaggatacctatcaaaatgccaaagctgcagggacacgaagacggttgaaaattcaacctgtgtatactagatccttccagtttgatggtttggtcattcttcttcatgattataccatggagaattttctgtgacaagggtggtcatggaagtaagtgagtgatcccctggtttctcattccttaaagcagtggttcgcaaagtatggcacaagaccagcagcatcagcagcctttgggaacttgttagaaacgaaaattctcaatcccatcccagatctgctgaatcagaaactctaatgagaggacccggcaatccacgttttaataagccctcctggtgattctgatgcacactaaattcaactgttttaaagggaaagccctttatagtattggagttcccacactgagaggctttggggcccaaaataagaaggttctaggttgtcattcagactttaacattaatttcaaagtcacctttctcatgcttccttgtgtttctgtttttccatttatgattttaacaaagaaaggtatgtgtgcttttgggtggaagttaggagaatgtttgtgtctttcctagttgaatacaaccttcagagaaaaaccttatgccttggaaattactacctggcacacaaaggggcttcaacaaggaaaagcagttggaggtctcttccagattgctcttctgccgaattatttgtatctattccgagctgattatgtaataggatggaaaaagtaaaaaaaaaaaaaaaaatctaatttgtatttccatgacaacgtgttctcccagcaacatccctctcctttatttgagttataaagggcactgctgggcctgagaaccaggccagaacctccttctgtatggcagctaacagtgtagggctccagtatcccaggaaggccccttatccacactccactcagctcataggagagtcttgcataatgaagacacagacctgggcacttcagtccttgtgctcctcctctcttttccccacagcaggacctggatacagaagtactcagccaaggtgacagaataaaatcctttttttgttgttttctgtttgtttgtttgttttggagaaggagtctcgctttgtcacccaggctggtgtgcagtggcacgatctcggctcactgcaacctccgcctcccaggttcaagcgattctcctgtctcagcctcctgagtagctgggattacagacgtgcgccatcacgcccagctaatttttgtatttttagtagatacggagttttgccttgttggccaggctgtgctggagctcctgacctcaggtgattcacctgccacagcctcccaaagtgctgggattacaggcgtgagccacagcaccctgccaaataagatcctttttaaaaaatatctgaaaaaagcttcatatctttacaaactcataaaatagctgattgggccatggaggagatgaggctgtttagaactggttttgtttcaagtttgtcaattttccctgtatgagaacttgggtaaagcacaaagaaacatacagtgctagtaacaggtctcctgcgccctggaactaagtgtttggaggaaggactaaaccccgggggaggtgagtataaaataattccactaagatcacctcctcagtccccagaaggctgatggtggatcctctggccatctcctgtggggtcttactgctcctctgccatttctctatgcctgaagacacgaagatgatatcaaggcagagctaccatatcgcagccagtctctaggctactgctgtgcagtggctcccactttctaatgcttttttgtttttgctttttctaacaaaacaatcttttttcaaaatgaattccaacccctgctagcttccttccccgcctccatactgttttaggcagcaccgtttatgtgacagagtccgtgtttctcaaatgcatggtgttcctcaggtggagagtgggcagaagtttttgcaacactttttttttaagttattgggtgcaaaatcccaaaccaggatatgtgtatgtctgtgtgtttatgttttttatttgaccctcccctctttcaacctacccccttttatatctaatgtagaaaaagcgaaattgaatctggaaagcaaactgttgtatatagttgcggtaacaatcatgaagagagagccgggctgtcccctcagtaattcattttaaataacaaattatttaaaaataaaattcatgccagagccagctgaagaggccttccttcatcaccactgaggccacccccaatctgggccctctgtccatctggcatgtctcctcccagcaagattcatctgttcaatgccatttgcgtttcaataaagttatctcctgtactgtccactg

SEQ ID NO: 299116 - DNA, 5625 bp, Artificial Sequence
  derived and/or modified sequence
atgctcggcagtagcgtgaagagtgtgcaacctgaggtcgaactgagttccgggggtggcgacgagggtgctgacgaaccgaggggcgctggacggaaggccgctgctgcggatgggaggggcatgttgcccaagagggccaaggcgccaggcggagggggaggcatggccaaagcaagtgctgcggaactgaaagtgttcaaatcaggctcagtggacagccgtgttcctgggggtcctccagcgagcaatttaaggaaacagaagagtctgaccaatttgtcatttctcaccgactctgagaagaaattgcagctgtacgagcctgaatggagtgatgatatggcaaaggccccaaaaggtctgggaaaggtgggaagtaaagggcgagaggcacccctcatgagcaagaccctgagtaaatccgagcacagcctatttcaggctaagggcagccccgcaggaggcgctaaaactccactggcaccactggcacccaaccttggaaagccttctcgaatcccacgtggcccatacgcagaggtgaaaccccttagtaaggcccctgaggcagccgtatccgaggatggtaaaagtgacgatgagctgttatcatctaaagccaaagcccagaagagttccggcccagtcccctcagccaagggtcaagaggagagggcatttctgaaggttgatcccgagctggtggtcaccgtcctaggcgatttggaacagctcctgttttcccagatgctggaccccgaatcccagaggaaacggacggtgcagaatgtccttgaccttcgccagaacttggaagaaacgatgtcttcactacgcggaagccaagtcacacacagctctctggagatgacgtgctatgactctgacgatgcaaaccctaggagcgtcagtagtcttagcaacaggtcgagtccgttgagctggcgttacggccagtcaagtcctcgccttcaggccggtgatgctccctctgttgggggatcatgcaggagcgaagggacgcccgcttggtatatgcatggcgagcgtgctcattactctcacaccatgcccatgagatccccaagcaagctctctcatatctcacgattggagctggtggagagcctcgactcggacgaagtggatctcaaatccggctacatgagtgacagcgatctgatgggtaagactatgacggaggatgacgacatcactaccggttgggacgaaagctcgagcatttcttcagggctctctgacgctagcgataatctgtctagcgaggagtttaacgcatcctcatccctcaattcattgccaagcacaccgaccgcctctaggcgtaactccactatcgtgctccgcactgacagtgaaaagcgctctctcgccgaaagtggcctgagctggttttcagaaagtgaggagaaggccccaaagaagctagaatatgactccggcagcctaaaaatggagccgggtaccagcaaatggaggcgcgagagaccagaatcatgtgacgacagcagtaaggggggtgagcttaagaagccaatctccctgggacacccaggctctctcaagaaaggaaagacaccccctgtcgccgtcacatccccaatcacacataccgcccagtcggctctcaaagttgctggcaaaccagaagggaaagcaaccgacaaaggcaagctggctgtgaaaaacacaggactccaacgcagcagttcagatgcagggagagataggctatccgatgcgaagaagcccccatccggcattgcgagacctagcactagcggaagttttggctacaagaagccaccccctgccactggtacggctacggttatgcagaccggcggaagcgccaccctgagtaaaattcagaagagtagcggcatccccgtaaaacccgtgaatgggcgaaagacctcactggatgtgtctaacagcgcagaacctggattcctggcaccgggtgcacgctctaatatccagtacaggagcctgccaaggccggcaaagtcaagttccatgtctgtaaccggaggccgagggggtccccgaccggtatcttcgtctattgacccctctctgttgagtacaaaacagggagggcttacaccgtcaagactgaaggagcccactaaggttgcgtctggaagaactacacctgccccagtcaaccagacagacagagagaaagagaaggcgaaggccaaagcggtagccttagattccgacaatatcagcctgaaatcaattggtagtcctgaaagcacacccaagaaccaggcttctcatccaacagcaactaaactggccgagctgcctcctacaccactaagggcaactgctaagtctttcgtgaaacctccaagtttagccaatcttgataaggtcaattctaactccctggatcttccaagttcctcggatacaacgcatgcctcaaaggtgccagatctgcatgctacatcatccgctagcggcggtccgttgcctagttgctttactccttctcctgcgcctatattgaatattaacagcgctagtttttcccaaggcctggaattaatgtcagggttcagcgtgccgaaggagacccgtatgtacccgaagctcagcggactgcatcgctccatggaaagtctgcagatgcctatgtcactcccctccgcctttcctagcagcaccccagtaccgacccctcccgcaccgcctgctgctcctacagaggaggaaaccgaggaactcacatggtccggcagcccccgtgccggacagttggactcaaatcagcgggatagaaataccctgcctaagaaaggcctgcggtaccagctgcagtcacaagaggagactaaggagaggcggcacagtcatactattgggggactgcctgagagtgacgaccagtctgaattgccttcaccacccgcacttcctatgagcctgtcagcaaaaggacagttaacgaacatcgtgtctccaaccgccgctaccactccgcgaattactagaagcaatagtattcccacacatgaggccgcttttgagttgtatagcgggtcacagatgggcagcaccttgtctttggcagagcgcccaaaaggaatgatccggtcaggttcattcagagacccgaccgacgacgtgcatggttctgtactgtctttggcctcttccgcttcttccacatactcatcagcagaagagcggatgcagtccgagcagatcaggaagctccgtcgcgagttggagagctcccaagaaaaagtagcaaccctcacctcccagctgtccgctaatgctaatctagtggcagcttttgaacaatcactggtaaatatgacttctagactccggcaccttgctgagactgcggaggagaaggatactgagcttctggatctcagagagacaattgactttcttaaaaagaagaacagtgaagcccaggccgtgattcagggagctctgaatgcttccgaaaccacacctaaggagttgagaattaagagacagaactcaagcgattctatatcctctctcaattccatcacctctcacagttcgatcggctccagcaaggatgcagacgcgaagaagaagaagaaaaaatcatggcttaggagtagctttaacaaggcatttagcatcaagaagggcccaaaaagtgcatcttcctatagcgacatcgaagaaatcgccacccctgattcctcagctccaagctcacccaaacttcaacacggctcaacagagactgcctctcccagcattaagtcttctacctccagcagcgttggaacggacgtgactgagggccctgcacatcctgcacctcatacccgcctgttccatgccaacgaagaagaggagccggagaaaaaggaggttagcgagctgagatccgagctgtgggagaaggagatgaagctgactgacatccggctagaggccttgaattccgcccaccagctggaccagttgagggagacgatgcataacatgcagcttgaagttgacctattgaaggcagaaaatgacaggttgaaggtggcgccaggaccttcttctggttcaacaccaggtcaggttccgggatcctcagctctgagtagccccaggcgttctttgggtctggcgttgactcactcctttgggccttctttagcggatacagatctatcacctatggacgggatttccacctgtggacccaaggaggaggtgacgctgagggtcgttgtccggatgcctccgcagcatatcattaagggtgacctgaagcagcaggaattctttctaggttgttctaaagtttctgggaaagtggactggaagatgctggacgaagccgtgttccaggttttcaaagactatattagtaagatggatcctgcatccacccttggcctttcaactgagtcaattcacgggtattctatttcccacgtgaaacgggtgttggacgcggaaccaccggagatgcctccgtgcagaagaggggtgaacaacattagcgtcagtctaaaaggtctcaaggaaaagtgcgtggattccctcgtttttgagactctgatcccaaaaccaatgatgcagcactatatcagtctgctgttaaagcaccggaggttagtgctcagtggaccttctgggaccggaaaaacatatctgaccaacaggctcgcagagtatctggtggaacgatctggcagggaggtgacagaggggattgtctctacgtttaatatgcatcagcaatcctgcaaggacctgcagttatacctctccaacctcgccaaccagatcgatagagagacgggaataggcgacgtgcccttggtgatcttactggacgacctcagcgaagcaggctcaatctctgaactggttaatggggcactcacatgcaaataccataagtgcccttacatcatcggtacaaccaatcagcctgtcaagatgacacctaaccatggactccacttatcgttcagaatgttgaccttctctaataacgtggagcccgctaatggttttctggtcagatacctccgaagaaaacttgtcgagtcagactccgatatcaacgctaacaaggaggagctcctcagggtgctggactgggtccccaaactctggtaccacctccatactttcttggagaagcacagcacttctgactttctgatcggaccgtgcttttttctaagctgtcctatcgggatcgaagatttcagaacttggtttattgatttatggaacaatagcataattccttatctgcaggagggagctaaagatggaatcaaagtgcacgggcagaaagccgcatgggaggacccggtcgagtgggtgagggacactctgccatggcctagcgcacagcaggaccagtcgaaactgtaccacctgcctccgcctacggttggcccacacagcatagccagccctccagaggaccgcaccgttaaggattcaactccctcctcgctggattccgaccctctcatggccatgctgctaaaactgcaggaagccgctaattacatcgagagcccagaccgggaaaccattttagaccctaaccttcaagccacgctttat

SEQ ID NO: 299117 - DNA, 5625 bp, Artificial Sequence
  derived and/or modified sequence
atgctgggcagcagcgtgaagagcgtgcagcccgaggtggagctgagcagcggcggcggcgacgagggcgccgacgagcccagaggcgccggcagaaaggccgccgccgccgacggcagaggcatgctgcccaagagagccaaggcccccggcggcggcggcggcatggccaaggccagcgccgccgagctgaaggtgttcaagagcggcagcgtggacagcagagtgcccggcggcccccccgccagcaacctgagaaagcagaagagcctgaccaacctgagcttcctgaccgacagcgagaagaagctgcagctgtacgagcccgagtggagcgacgacatggccaaggcccccaagggcctgggcaaggtgggcagcaagggcagagaggcccccctgatgagcaagaccctgagcaagagcgagcacagcctgttccaggccaagggcagccccgccggcggcgccaagacccccctggcccccctggcccccaacctgggcaagcccagcagaatccccagaggcccctacgccgaggtgaagcccctgagcaaggcccccgaggccgccgtgagcgaggacggcaagagcgacgacgagctgctgagcagcaaggccaaggcccagaagagcagcggccccgtgcccagcgccaagggccaggaggagagagccttcctgaaggtggaccccgagctggtggtgaccgtgctgggcgacctggagcagctgctgttcagccagatgctggaccccgagagccagagaaagagaaccgtgcagaacgtgctggacctgagacagaacctggaggagaccatgagcagcctgagaggcagccaggtgacccacagcagcctggagatgacctgctacgacagcgacgacgccaaccccagaagcgtgagcagcctgagcaacagaagcagccccctgagctggagatacggccagagcagccccagactgcaggccggcgacgcccccagcgtgggcggcagctgcagaagcgagggcacccccgcctggtacatgcacggcgagagagcccactacagccacaccatgcccatgagaagccccagcaagctgagccacatcagcagactggagctggtggagagcctggacagcgacgaggtggacctgaagagcggctacatgagcgacagcgacctgatgggcaagaccatgaccgaggacgacgacatcaccaccggctgggacgagagcagcagcatcagcagcggcctgagcgacgccagcgacaacctgagcagcgaggagttcaacgccagcagcagcctgaacagcctgcccagcacccccaccgccagcagaagaaacagcaccatcgtgctgagaaccgacagcgagaagagaagcctggccgagagcggcctgagctggttcagcgagagcgaggagaaggcccccaagaagctggagtacgacagcggcagcctgaagatggagcccggcaccagcaagtggagaagagagagacccgagagctgcgacgacagcagcaagggcggcgagctgaagaagcccatcagcctgggccaccccggcagcctgaagaagggcaagaccccccccgtggccgtgaccagccccatcacccacaccgcccagagcgccctgaaggtggccggcaagcccgagggcaaggccaccgacaagggcaagctggccgtgaagaacaccggcctgcagagaagcagcagcgacgccggcagagacagactgagcgacgccaagaagccccccagcggcatcgccagacccagcaccagcggcagcttcggctacaagaagcccccccccgccaccggcaccgccaccgtgatgcagaccggcggcagcgccaccctgagcaagatccagaagagcagcggcatccccgtgaagcccgtgaacggcagaaagaccagcctggacgtgagcaacagcgccgagcccggcttcctggcccccggcgccagaagcaacatccagtacagaagcctgcccagacccgccaagagcagcagcatgagcgtgaccggcggcagaggcggccccagacccgtgagcagcagcatcgaccccagcctgctgagcaccaagcagggcggcctgacccccagcagactgaaggagcccaccaaggtggccagcggcagaaccacccccgcccccgtgaaccagaccgacagagagaaggagaaggccaaggccaaggccgtggccctggacagcgacaacatcagcctgaagagcatcggcagccccgagagcacccccaagaaccaggccagccaccccaccgccaccaagctggccgagctgccccccacccccctgagagccaccgccaagagcttcgtgaagccccccagcctggccaacctggacaaggtgaacagcaacagcctggacctgcccagcagcagcgacaccacccacgccagcaaggtgcccgacctgcacgccaccagcagcgccagcggcggccccctgcccagctgcttcacccccagccccgcccccatcctgaacatcaacagcgccagcttcagccagggcctggagctgatgagcggcttcagcgtgcccaaggagaccagaatgtaccccaagctgagcggcctgcacagaagcatggagagcctgcagatgcccatgagcctgcccagcgccttccccagcagcacccccgtgcccaccccccccgccccccccgccgcccccaccgaggaggagaccgaggagctgacctggagcggcagccccagagccggccagctggacagcaaccagagagacagaaacaccctgcccaagaagggcctgagataccagctgcagagccaggaggagaccaaggagagaagacacagccacaccatcggcggcctgcccgagagcgacgaccagagcgagctgcccagcccccccgccctgcccatgagcctgagcgccaagggccagctgaccaacatcgtgagccccaccgccgccaccacccccagaatcaccagaagcaacagcatccccacccacgaggccgccttcgagctgtacagcggcagccagatgggcagcaccctgagcctggccgagagacccaagggcatgatcagaagcggcagcttcagagaccccaccgacgacgtgcacggcagcgtgctgagcctggccagcagcgccagcagcacctacagcagcgccgaggagagaatgcagagcgagcagatcagaaagctgagaagagagctggagagcagccaggagaaggtggccaccctgaccagccagctgagcgccaacgccaacctggtggccgccttcgagcagagcctggtgaacatgaccagcagactgagacacctggccgagaccgccgaggagaaggacaccgagctgctggacctgagagagaccatcgacttcctgaagaagaagaacagcgaggcccaggccgtgatccagggcgccctgaacgccagcgagaccacccccaaggagctgagaatcaagagacagaacagcagcgacagcatcagcagcctgaacagcatcaccagccacagcagcatcggcagcagcaaggacgccgacgccaagaagaagaagaagaagagctggctgagaagcagcttcaacaaggccttcagcatcaagaagggccccaagagcgccagcagctacagcgacatcgaggagatcgccacccccgacagcagcgcccccagcagccccaagctgcagcacggcagcaccgagaccgccagccccagcatcaagagcagcaccagcagcagcgtgggcaccgacgtgaccgagggccccgcccaccccgccccccacaccagactgttccacgccaacgaggaggaggagcccgagaagaaggaggtgagcgagctgagaagcgagctgtgggagaaggagatgaagctgaccgacatcagactggaggccctgaacagcgcccaccagctggaccagctgagagagaccatgcacaacatgcagctggaggtggacctgctgaaggccgagaacgacagactgaaggtggcccccggccccagcagcggcagcacccccggccaggtgcccggcagcagcgccctgagcagccccagaagaagcctgggcctggccctgacccacagcttcggccccagcctggccgacaccgacctgagccccatggacggcatcagcacctgcggccccaaggaggaggtgaccctgagagtggtggtgagaatgcccccccagcacatcatcaagggcgacctgaagcagcaggagttcttcctgggctgcagcaaggtgagcggcaaggtggactggaagatgctggacgaggccgtgttccaggtgttcaaggactacatcagcaagatggaccccgccagcaccctgggcctgagcaccgagagcatccacggctacagcatcagccacgtgaagagagtgctggacgccgagccccccgagatgcccccctgcagaagaggcgtgaacaacatcagcgtgagcctgaagggcctgaaggagaagtgcgtggacagcctggtgttcgagaccctgatccccaagcccatgatgcagcactacatcagcctgctgctgaagcacagaagactggtgctgagcggccccagcggcaccggcaagacctacctgaccaacagactggccgagtacctggtggagagaagcggcagagaggtgaccgagggcatcgtgagcaccttcaacatgcaccagcagagctgcaaggacctgcagctgtacctgagcaacctggccaaccagatcgacagagagaccggcatcggcgacgtgcccctggtgatcctgctggacgacctgagcgaggccggcagcatcagcgagctggtgaacggcgccctgacctgcaagtaccacaagtgcccctacatcatcggcaccaccaaccagcccgtgaagatgacccccaaccacggcctgcacctgagcttcagaatgctgaccttcagcaacaacgtggagcccgccaacggcttcctggtgagatacctgagaagaaagctggtggagagcgacagcgacatcaacgccaacaaggaggagctgctgagagtgctggactgggtgcccaagctgtggtaccacctgcacaccttcctggagaagcacagcaccagcgacttcctgatcggcccctgcttcttcctgagctgccccatcggcatcgaggacttcagaacctggttcatcgacctgtggaacaacagcatcatcccctacctgcaggagggcgccaaggacggcatcaaggtgcacggccagaaggccgcctgggaggaccccgtggagtgggtgagagacaccctgccctggcccagcgcccagcaggaccagagcaagctgtaccacctgcccccccccaccgtgggcccccacagcatcgccagcccccccgaggacagaaccgtgaaggacagcacccccagcagcctggacagcgaccccctgatggccatgctgctgaagctgcaggaggccgccaactacatcgagagccccgacagagagaccatcctggaccccaacctgcaggccaccctgtag

SEQ ID NO: 299118 - protein, 1869 aa, Artificial Sequence
  derived and/or modified sequence
MLGSSVKSVQPEVELSSGGGDEGADEPRGAGRKAAAADGRGMLPKRAKAPGGGGGMAKASAAELKVFKSGSVDSRVPGGPPASNLRKQKSLTNLSFLTDSEKKLQLYEPEWSDDMAKAPKGLGKVGSKGREAPLMSKTLSKSEHSLFQAKGSPAGGAKTPLAPLAPNLGKPSRIPRGPYAEVKPLSKAPEAAVSEDGKSDDELLSSKAKAQKSSGPVPSAKGQEERAFLKVDPELVVTVLGDLEQLLFSQMLDPESQRKRTVQNVLDLRQNLEETMSSLRGSQVTHSSLEMTCYDSDDANPRSVSSLSNRSSPLSWRYGQSSPRLQAGDAPSVGGSCRSEGTPAWYMHGERAHYSHTMPMRSPSKLSHISRLELVESLDSDEVDLKSGYMSDSDLMGKTMTEDDDITTGWDESSSISSGLSDASDNLSSEEFNASSSLNSLPSTPTASRRNSTIVLRTDSEKRSLAESGLSWFSESEEKAPKKLEYDSGSLKMEPGTSKWRRERPESCDDSSKGGELKKPISLGHPGSLKKGKTPPVAVTSPITHTAQSALKVAGKPEGKATDKGKLAVKNTGLQRSSSDAGRDRLSDAKKPPSGIARPSTSGSFGYKKPPPATGTATVMQTGGSATLSKIQKSSGIPVKPVNGRKTSLDVSNSAEPGFLAPGARSNIQYRSLPRPAKSSSMSVTGGRGGPRPVSSSIDPSLLSTKQGGLTPSRLKEPTKVASGRTTPAPVNQTDREKEKAKAKAVALDSDNISLKSIGSPESTPKNQASHPTATKLAELPPTPLRATAKSFVKPPSLANLDKVNSNSLDLPSSSDTTHASKVPDLHATSSASGGPLPSCFTPSPAPILNINSASFSQGLELMSGFSVPKETRMYPKLSGLHRSMESLQMPMSLPSAFPSSTPVPTPPAPPAAPTEEETEELTWSGSPRAGQLDSNQRDRNTLPKKGLRYQLQSQEETKERRHSHTIGGLPESDDQSELPSPPALPMSLSAKGQLTNIVSPTAATTPRITRSNSIPTHEAAFELYSGSQMGSTLSLAERPKGMIRSGSFRDPTDDVHGSVLSLASSASSTYSSQIRKLRRELESSQEKVATLTSQLSANANLVAAFEQSLVNMTSRLRHLAETAEEKDTELLDLRETIDFLKKKNSEAQAVIQGALNASETTPKELRIKRQNSSDSISSLNSITSHSSIGSSKDADAKKKKKKSWVYELRSSFNKAFSIKKGPKSASSYSDIEEIATPDSSAPSSPKLQHGSTETASPSIKSSTSSSVGTDVTEGPAHPAPHTRLFHANEEEEPEKKEVSELRSELWEKEMKLTDIRLEALNSAHQLDQLRETMHNMQLEVDLLKAENDRLKVAPGPSSGSTPGQVPGSSALSSPRRSLGLALTHSFGPSLADTDLSPMDGISTCGPKEEVTLRVVVRMPPQHIIKGDLKQQEFFLGCSKVSGKVDWKMLDEAVFQVFKDYISKMDPASTLGLSTESIHGYSISHVKRVLDAEPPEMPPCRRGVNNISVSLKGLKEKCVDSLVFETLIPKPMMQHYISLLLKHRRLVLSGPSGTGKTYLTNRLAEYLVERSGREVTEGIVSTFNMHQQSCKDLQLYLSNLANQIDRETGIGDVPLVILLDDLSEAGSISELVNGALTCKYHKCPYIIGTTNQPVKMTPNHGLHLSFRMLTFSNNVEPANGFLVRYLRRKLVESDSDINANKEELLRVLDWVPKLWYHLHTFLEKHSTSDFLIGPCFFLSCPIGIEDFRTWFIDLWNNSIIPYLQEGAKDGIKVHGQKAAWEDPVEWVRDTLPWPSAQQDQSKLYHLPPPTVGPHSIASPPEDRTVKDSTPSSLDSDPLMAMLLKLQEAANYIESPDRETILDPNLQATL

SEQ ID NO: 299119 - DNA, 5610 bp, Artificial Sequence
  derived and/or modified sequence
atgttgggctctagcgttaaatccgtccaacccgaggtggagctctcctctgggggtggggatgagggcgccgacgagccaaggggtgccggacgcaaagcagcagccgctgatggccgaggcatgcttccgaaaagggcgaaggcacctggtggcgggggtggaatggcaaaggcatcagccgccgaacttaaagtgtttaagagtggctccgttgactctcgggtacccggagggccgcctgccagtaatcttcgaaagcaaaagtccctcactaatctctcctttctgacagacagtgaaaagaaattgcagttgtatgagcccgagtggagcgatgatatggctaaggctcccaaaggccttggcaaggtagggtcaaagggtagagaagcacccctcatgtctaaaactctctccaaatctgagcatagtctttttcaggccaaggggagtccggccggcggagctaaaacacctctggcccctctcgccccaaacctgggaaaaccgagtcgcataccaaggggaccatacgcagaggtgaagccgttatccaaggcacctgaagccgcagtgtccgaagacggaaagagtgacgatgagttgctgtcttcaaaggccaaggcccagaaatcatccggccctgtgccttctgccaaggggcaggaggaacgcgctttcctgaaggtcgatcccgagctggtcgtcacagtactgggcgatttggaacaactgctgttctcacagatgttagatccggagagccagcgcaaacgcactgttcaaaatgtacttgatctgcgccagaatctggaggaaactatgagttccctcagaggaagccaggttacacattcctcactggagatgacatgttatgattccgacgatgcaaatccccgctccgtctctagcctttctaataggagttcaccattgtcatggcgatatggccagagttcccctaggcttcaggcaggtgatgcacctagtgtgggtgggtcttgtagaagcgaagggacccccgcatggtatatgcatggagagagggcacactattcccacacgatgcccatgcgttcccctagtaagctatcccacatttctagactggagttagtggaaagcctggactccgacgaggttgacctgaagagcggatatatgtcagactctgatctaatgggcaaaactatgaccgaggatgatgacatcaccacagggtgggacgaatcgtcaagcatttcttctggcctgagcgacgcttccgacaaccttagctccgaagagtttaacgcctcctcctccctcaattctctgccatcaacgcccacagcctcacggagaaactcgaccatcgttctccggaccgatagtgaaaaacgcagcctggctgaaagcggtcttagttggttctccgaatcagaagagaaagcacctaaaaagctcgagtacgacagcggttcgctgaaaatggagccagggacttcgaaatggcgccgtgagcgcccggagtcgtgcgatgatagctctaaagggggcgagttaaagaaaccaatcagtcttgggcatcccggcagcttaaaaaaaggcaaaacacctcccgtcgcggtgacctcccctataactcacactgcccagtctgccttgaaagtcgcaggcaaacccgagggaaaagcgaccgacaagggcaaactggctgtgaagaataccggtttgcagcgttcttcttcggatgctggaagggatcgtttgagcgacgccaaaaagcctccctctggcattgccagaccttcaacctctgggagcttcggctataagaaaccgccaccagctactggcacggcgacagttatgcagaccgggggatctgccaccctcagcaaaattcagaagagcagcgggattcctgtcaaaccagtgaacggtagaaagaccagcctggatgtgtcaaattctgcagagcccggctttttggctcctggtgcaaggtctaatattcaataccgtagcctgcccaggcccgcaaaaagctctagtatgtcagtgaccggcggccggggcggacctagacctgtgtcctcatctatagacccttctctgctgtccacaaaacagggagggctgaccccttcacggctgaaagagccaacaaaggtggccagcggacggaccacaccggctcccgtgaaccagacggatcgagagaaggagaaggctaaagctaaggctgtggcccttgacagtgataacatcagcctcaagagcatcggttcacctgagtccactcctaagaatcaggccagtcaccccaccgcaaccaaactcgcagagctgcctccaacccctcttagagctacagctaaatcgtttgtgaaaccccctagcctggcaaatttagacaaggttaattctaattcccttgaccttccctcatcttcggatactacccacgcttctaaggtcccagaccttcatgccacatcctcagcctcagggggccctcttccctcttgctttacaccttccccagccccaatcctgaatattaattctgcgagcttctctcaaggactcgagttgatgagcggtttcagcgtgcctaaagaaacaagaatgtatcccaagttaagtggcctccacagatccatggaatctctccagatgccgatgtcactgccatctgcgtttcccagcagcacccccgtgcctaccccgccagcgcctcccgcagcacccacggaggaggagacagaggaattgacatggtcaggttcaccaagggccggtcagctggactccaaccagagagatagaaacaccctgcccaaaaaaggcctgagatatcaactacaatcccaggaggagaccaaagagcgccgccatagccatactatcggaggactgccggaaagcgacgaccagagtgagctgccttccccgcctgctctaccaatgtcactctctgctaaaggtcaattaactaacatagtgtcccctacggccgccactaccccgagaatcacaagatcgaactcaattcctacacacgaagctgcatttgagctttatagcggatcccagatgggcagtacccttagcctcgcagagcgccccaaaggcatgattcgatccggatcatttcgagaccccactgacgacgtccatggcagtgtgctgtccctcgcctcttcggcttccagtacgtattcgtctcaaattcgcaaacttaggcgtgaactcgaatcatctcaggaaaaggtggcgacgctgacttcccagttatctgcaaatgccaacttagtggccgcctttgaacagtcactggtgaatatgaccagcagactccggcaccttgccgagactgccgaagagaaagacactgagctgctggacctccgtgaaacaatagatttcttgaagaagaagaattcagaggcccaagccgtgatacaaggggccctgaatgcgtccgagactacaccaaaagaactcagaataaagcgccagaattcttccgatagtatttctagcttaaattcaatcacttcccattccagtattggcagctctaaggatgcagatgctaaaaagaagaagaaaaaaagctgggtttatgagctccggtcctcatttaacaaggcgttcagtatcaagaagggaccgaaaagtgcttcctcctactctgacatcgaggaaatcgccacccccgactcttctgcgccttcatctcctaagttgcaacacggatctacagagactgcttccccttcaatcaaaagtagtaccagctccagcgtaggaactgacgtcacggaaggcccagcgcatcctgctccgcacacaaggctgttccacgccaacgaagaggaggagcccgaaaaaaaagaggtcagtgaactgcgcagtgagctgtgggagaaagagatgaaactaactgacatccggctagaggcacttaactccgcgcatcagctggaccaacttagggaaacaatgcacaatatgcagctagaggtagatctcttgaaggccgagaatgaccggctcaaggtggctcccggacctagctccggatcaacaccaggacaggtccctggctcgtctgcactatccagtcctagacggagcttaggccttgcccttactcacagttttgggccctccctcgccgacactgacctcagccctatggacggcatcagcacttgcgggcccaaggaagaggtgactctccgggtggttgtgagaatgcccccccaacacattatcaagggagatctgaagcaacaggaattcttcttggggtgctccaaagtctcaggcaaggtggactggaagatgttagatgaggccgtcttccaggtatttaaagattatatttctaagatggatccagcatcaaccctgggtctatcaacagaatccatccacggttatagtatctcccatgtgaagcgcgtgctggatgccgaaccccctgaaatgcccccatgccgcaggggggtgaataatatctctgtgtccctcaaaggcttaaaggagaagtgtgttgactctctcgtttttgagactctgatacccaagcctatgatgcagcactacatctccctattactcaaacaccggcgactcgtattaagtgggccaagcggcacgggtaagacatacctaacgaatcgtctggcagagtacctcgttgagcgaagcggacgcgaggtcactgagggcattgtgtcaacgtttaatatgcaccagcagagttgtaaagatctacagctgtacctgtccaaccttgctaatcagattgaccgggaaacaggcattggcgacgtgccactagtgatattactagacgatttgtcagaggcggggagtatctctgagttagtcaatggggctctgacttgtaagtatcacaaatgtccctatattatcgggactacgaaccagccagtcaagatgacacctaaccacggactccacctatccttcagaatgctgacattctctaacaacgttgaaccagcaaatgggtttctggtccgatacctgaggagaaaactggttgagagtgactccgatattaatgcaaacaaagaggagctcctcagagtgctcgattgggtaccgaagctgtggtaccacctccacacgtttctcgagaaacactcaacctcagatttcctgatcggcccttgtttttttttaagttgccctatcggtattgaggatttccgtacctggttcatcgacctctggaataatagcattattccctatctacaggagggcgccaaagacggcattaaggtccatggccaaaaagcggcatgggaggaccccgtggagtgggtacgggatactttgccctggcctagcgctcagcaggatcagtcgaagctttaccatctcccacctccaaccgtggggccccattcgatcgcatctcccccagaggatcgtacggtgaaagattccacaccttcctcactcgattctgaccccttgatggccatgttgctcaagctgcaggaggcggcaaactacatcgagtccccggatcgggaaaccatcctagaccctaacttacaggccaccctctag

SEQ ID NO: 299120 - DNA, 5610 bp, Artificial Sequence
  derived and/or modified sequence
atgctgggcagctctgtgaagtctgtgcagcctgaggtggagctgagcagcggcggcggagatgaaggagcagatgagcccaggggggccggcaggaaggctgctgctgctgatggccggggcatgctgcccaagagggccaaggcccctgggggcggcggcggcatggccaaggccagcgctgctgagctgaaggtgttcaagagcggctctgtggacagccgggtgcctgggggccccccagccagcaacctgaggaagcagaagagcctgaccaacctgtccttcctgacagacagcgagaagaagctgcagctgtatgagcctgagtggagcgatgacatggccaaggcccccaagggcctgggcaaggtgggcagcaagggccgggaggcccccctgatgagcaagaccctgagcaagtctgagcacagcctcttccaggccaagggcagccctgctgggggcgccaagacccccctggcccccctggcccccaacctgggcaagcccagccgcatcccccggggcccctatgcagaggtgaagcccctgagcaaggcccctgaggccgctgtgtctgaagatggcaagagtgatgatgagctgctgagcagcaaggccaaggcccagaagagcagcggccctgtgcccagcgccaagggccaggaggagcgggccttcctgaaggtggaccctgagctggtggtgacagtgctgggggacctggagcagctgctcttcagccagatgctggaccctgagagccagaggaagaggacagtgcagaatgtgctggacctgcggcagaacctggaggagaccatgagcagcctgcggggcagccaggtgacccacagcagcctggagatgacctgctatgacagtgatgatgccaaccccaggtctgtgagcagcctgagcaacagaagcagccccctgtcctggaggtatggccagagcagcccccggctgcaggccggagatgcccccagcgtgggcggcagctgccgctctgagggcaccccagcctggtacatgcacggggagcgggcccactacagccacaccatgcccatgaggagccccagcaagctgagccacatcagccggctggagctggtggagagcctggacagtgatgaggtggacctgaagagcggctacatgtctgacagcgacctgatgggcaagaccatgacagaagatgatgacatcaccaccggctgggatgagagcagcagcatcagcagcggcctgagtgatgccagtgacaacctgagcagcgaggagttcaatgccagcagcagcctgaacagcctgcccagcacccccacagccagcagaagaaacagcaccatcgtgctgaggacagacagcgagaagaggagcctggccgagagcggcctgtcctggttcagcgagagcgaggagaaggcccccaagaagctggagtatgacagcggcagcctgaagatggagcccggcaccagcaagtggaggcgggagaggcctgagagctgtgatgacagcagcaaaggaggagagctgaagaagcccatcagcctgggccaccctggcagcctgaagaagggcaagaccccacctgtggccgtgaccagccccatcacccacacagcccagagcgccctgaaggtggccggcaagccagagggcaaggccacagacaagggcaagctggccgtgaagaacacaggcctgcagaggagcagcagtgatgctggccgggaccggctgagtgatgccaagaagccacccagcggcatcgcccggcccagcaccagcggcagctttggctacaagaagcccccaccagccaccggcacagccaccgtgatgcagacaggaggcagcgccaccctgagcaagatccagaagagcagcggcatccctgtgaagcctgtgaatggaaggaagaccagcctggatgtgagcaacagcgctgagcccggcttcctggcccctggggcccggagcaacatccagtaccgcagcctgcccaggcctgccaagagcagctccatgtctgtgactggaggccggggcggccccaggcctgtgagcagcagcattgaccccagcctgctgagcaccaagcagggcggcctgacccccagccggctgaaggagcccaccaaggtggccagcggccgcaccaccccagcccctgtgaaccagacagaccgggagaaggagaaggccaaggccaaggctgtggccctggacagcgacaacatcagcctgaagagcatcggcagccctgagagcacccccaagaaccaggccagccaccccacagccaccaagctggccgagctgccccccacccccctgcgggccacagccaagagctttgtgaagccacccagcctggccaacctggacaaggtgaacagcaacagcctggacctgcccagcagcagtgacaccacccacgccagcaaggtgcctgacctgcacgccaccagcagcgccagcggcggccccctgcccagctgcttcacccccagccctgcccccatcctgaacatcaacagcgccagcttcagccagggcctggagctgatgagcggcttctctgtgcccaaggagaccaggatgtaccccaagctgagcggcctgcaccgctccatggagagcctgcagatgcccatgagcctgcccagcgccttccccagcagcacccctgtgcccaccccaccagcccccccagctgcccccacagaggaggagacagaggagctgacctggagcggcagcccccgggccggccagctggacagcaaccagagggacaggaacaccctgcccaagaagggcctgcgctaccagctgcagagccaggaggagaccaaggagaggaggcacagccacaccatcggcggcctgcctgagagtgatgaccagagcgagctgcccagccccccagccctgcccatgagcctgagcgccaagggccagctgaccaacatcgtgagccccacagctgccaccaccccccgcatcaccaggagcaacagcatccccacccatgaggccgcctttgagctgtacagcggcagccagatgggcagcaccctgagcctggccgagcggcccaagggcatgatccgcagcggcagcttccgggaccccacagatgatgtgcacggctctgtgctgagcctggccagcagcgccagcagcacctacagcagccagatcaggaagctgcggcgggagctggagagcagccaggagaaggtggccaccctgaccagccagctgagcgccaatgccaacctggtggccgcctttgagcagagcctggtgaacatgaccagccggctgcggcacctggccgagacagctgaggagaaggacacagagctgctggacctgcgggagaccatcgacttcctgaagaagaagaacagcgaggcccaggccgtcatccagggcgccctgaatgccagcgagaccacccccaaggagctgcgcatcaagaggcagaacagcagtgacagcatcagcagcctgaacagcatcaccagccacagcagcatcggcagcagcaaggatgctgatgccaagaagaagaagaagaagtcctgggtgtatgagctgcggagcagcttcaacaaggccttcagcatcaagaagggccccaagagcgccagcagctacagcgacatcgaggagatcgccaccccagacagcagcgcccccagcagccccaagctgcagcacggcagcacagaaacagccagccccagcatcaagagcagcaccagcagctctgtgggcacagatgtgacagagggccctgcccacccagccccccacaccaggctcttccacgccaatgaggaggaggagcctgagaagaaggaggtgtctgagctgcggtctgagctgtgggagaaggagatgaagctgacagacatccggctggaggccctgaacagcgcccaccagctggaccagctgcgggagaccatgcacaacatgcagctggaggtggacctgctgaaggcagaaaatgaccggctgaaggtggcccctggccccagcagcggcagcaccccaggccaggtgcccggcagcagcgccctgagcagcccccggcgcagcctgggcctggccctgacccacagctttggccccagcctggccgacacagacctgagccccatggatggcatcagcacctgtggccccaaggaggaggtgaccctgcgggtggtggtgaggatgccaccccagcacatcatcaagggggacctgaagcagcaggagttcttcctgggctgcagcaaggtgtctgggaaggtggactggaagatgctggatgaagctgtgttccaggtgttcaaggactacatcagcaagatggaccctgccagcaccctgggcctgagcacagagagcatccacggctacagcatcagccacgtgaagagggtgctggatgctgagcccccagagatgccaccctgcagaagaggagtgaacaacatctctgtgtccctgaagggcctgaaggagaagtgtgtggacagcctggtgtttgagaccctcatccccaagcccatgatgcagcactacatcagcctgctgctgaagcaccggcggctggtgctgagcggccccagcggcaccgggaagacctacctgaccaaccggctggccgagtacctggtggagaggagcggccgggaggtgacagagggcatcgtgtccaccttcaacatgcaccagcagagctgcaaggacctgcagctgtacctgagcaacctggccaaccagattgaccgggagaccggcattggagatgtgcccctggtgatcctgctggatgacctgtctgaggccggcagcatcagcgagctggtgaatggagccctgacctgcaagtaccacaagtgcccctacatcatcggcaccaccaaccagcctgtgaagatgacccccaaccacggcctgcacctgtccttcaggatgctgaccttcagcaacaacgtggagcccgccaacggcttcctggtgcgctacctgcggaggaagctggtggagagtgacagcgacatcaatgccaacaaggaggagctgctgcgggtgctggactgggtgcccaagctgtggtaccacctgcacaccttcctggagaagcacagcaccagtgacttcctgattggcccctgcttcttcctgagctgccccatcggcatcgaggacttccgcacctggttcatcgacctgtggaacaacagcatcatcccctacctgcaggagggcgccaaggatggcatcaaggtgcacggccagaaggccgcctgggaggaccctgtggagtgggtgcgggacaccctgccctggcccagcgcccagcaggaccagagcaagctgtaccacctgcccccacccaccgtgggcccccacagcatcgccagccccccagaggacagaacagtgaaggacagcacccccagcagcctggacagcgaccccctgatggccatgctgctgaagctgcaggaggccgccaactacatcgagagcccagaccgggagaccatcctggaccccaacctgcaggccaccctgtag

SEQ ID NO: 299121 - DNA, 5610 bp, Artificial Sequence
  derived and/or modified sequence
atgctgggcagcagcgtgaagagcgtgcagcccgaggtggagctgtcatctgggggcggagacgaaggagccgacgagcccagaggcgcagggcgcaaggctgcggcagccgatgggcgcggtatgctgcccaagcgagcgaaagctccggggggaggtggcggaatggcaaaggcttcggccgcggaacttaaagtgtttaagagcggatccgtggactctagggtgcccggcggtccccctgccagcaatctgagaaagcagaaatccctcaccaacctgagttttctgactgactccgagaagaagctccagctgtacgaacctgagtggtccgacgatatggccaaggccccaaagggactggggaaggtgggcagtaaggggagggaggctccactgatgtccaaaaccctttccaagagcgagcattcactctttcaggctaagggctcacccgcagggggagcaaaaacacctctcgcacccctcgcaccaaacttgggaaagcctagtcggatacctcggggtccttatgccgaagttaaacctctgagcaaagcccctgaggctgcggtgtctgaagatggcaagtccgatgacgaactgctaagctcaaaggctaaggctcaaaaaagttcaggcccagttccatcagctaaaggtcaggaagagagagcatttctgaaggtcgatcccgagctggtggttactgttctgggcgatctggaacaactcttgttttctcagatgctcgacccagaaagccagcgaaaacgcaccgttcaaaacgtgttggacctgcggcagaacttggaggagaccatgtcttccctaaggggctcccaagttacacattcatctctcgagatgacatgctatgatagtgacgacgctaacccgagatccgtgagcagcctgagcaatcggtcttcacctctttcctggcgatacgggcagagtagtcctcggttacaggccggcgatgctcccagcgttggaggatcttgcaggtccgagggaacgcctgcctggtacatgcacggcgagagggcccactacagtcacaccatgcctatgcgttctccaagcaaattgagccacataagtaggctggaactggtagagtctttagactcggatgaggtcgacctgaagagcggctatatgtcagacagcgacttaatggggaaaacgatgaccgaggatgatgatatcacgacggggtgggacgaatcctcttccatttcgagcgggcttagcgatgccagcgataacctatcctcagaggagtttaatgcttctagttcgctcaactcacttccctccaccccaacagccagcaggagaaacagcactatcgttctgagaaccgactccgagaaacggtctttagctgagtctgggctttcatggttctccgagtcggaagagaaggcgcctaaaaaactcgagtatgattctggctctcttaagatggaaccgggcactagcaagtggaggagggagcgccccgaaagctgtgatgacagctccaaaggcggggaacttaaaaagcccatctcattggggcatccgggcagcctaaagaagggcaagacgccccccgtggccgtgacttccccaattacccacaccgcgcagagcgccctgaaggtcgccggtaaaccggagggcaaggcaactgacaaaggcaaactagccgtaaagaatactggtttgcagaggagttcttcagatgcaggaagagaccggctgagtgatgccaagaaacccccgtccggtattgcccggccgagcacatccgggagctttgggtacaaaaaacccccccccgctaccgggactgcgactgttatgcagaccggaggctctgccacattatctaaaatacagaagtcctctggaataccagtgaaacctgtgaacggccggaaaacatctctcgacgtgtccaactctgcagaaccaggattcctcgcccctggggcgcggtctaacatccaatacagatctttaccaagacctgctaaaagttcatccatgtccgtgaccgggggacgaggggggccaaggcccgttagctccagcatcgacccaagcctgctgtccaccaagcagggtggcctgaccccatcacgcctaaaggaacctacaaaagtggcttcaggaagaacgacacccgctccggtgaaccagacggacagggagaaagagaaggccaaggctaaggcggttgccctggattctgacaatattagtctgaaaagcattggctctccggaaagcacccctaagaatcaggcctcacaccctactgcaaccaagcttgcggagctaccaccaacgccactgcgggctaccgctaagagcttcgtaaagcccccatcgctggctaacctggacaaagtgaactcaaatagcctggatctgccttcaagttcagatactacgcacgcttcgaaagtacccgaccttcatgcgacgagctccgccagtggcggcccattgccatcttgtttcacccccagtccggcacccattctgaatattaatagcgcatctttctcccaaggcctggagctgatgtcagggttcagtgtgcctaaagaaaccaggatgtatcccaagttgtctggcctgcacaggagcatggaaagcttgcaaatgcctatgtcacttccatccgcatttccttcttcaacccccgtgcccacgccgccagctccaccagcagcacccacggaagaagaaacggaggaactgacatggtccgggagcccgagagctggacagttagattccaatcaacgtgatagaaatactcttcccaaaaaaggattaaggtatcagctccagagtcaggaggagaccaaagaacgtaggcattcgcacactatcggcggccttcctgaaagcgacgaccaaagcgaactcccatccccacccgcactacctatgtctttaagtgctaaaggccagcttactaatattgtaagtccaactgccgcaacaacaccacgcatcactcgcagcaatagcatacctactcacgaggccgctttcgagctatactcaggctctcagatgggatctaccctgtcactggcagaaagacccaaaggtatgatacgtagcgggagctttagagacccaacagatgacgttcacggatccgttctcagtctggccagttctgccagctcaacatactctagtcaaattcggaagctgcggagggagctggagtcctctcaagaaaaggtcgccaccttgaccagccagctgagcgccaatgccaacttggtggccgcgttcgagcaaagcctcgtgaatatgaccagtcgcctaagacacctggctgaaacagcagaagaaaaggatacagagttattggacctcagagaaactatagattttctgaagaaaaaaaattcagaagcacaggccgttatccaaggggctctgaatgctagcgagacaacgccaaaggagctcagaattaagagacagaactctagtgattccattagctcccttaatagtatcacgtcccactcctccatcggatccagtaaggatgccgacgccaagaaaaaaaagaaaaagtcctgggtgtatgagctcaggtcctcatttaataaagcgttttcaattaaaaagggcccgaagtccgcgagctcatatagcgatattgaagagattgccacacccgattcaagcgctccaagctcaccaaagttgcaacatggctccacggagactgccagcccttctataaagtccagtacaagctcttcggttggaaccgacgtgaccgaaggcccagctcaccctgccccccacacaaggctgttccacgccaacgaagaagaggaacccgagaagaaagaggtttcagaattgcggtctgaactttgggagaaggagatgaagcttactgatattcgcctcgaagctctgaacagcgcccaccaactggatcagctgagggagacgatgcataacatgcagctcgaggttgacctgttgaaggccgaaaacgacagactgaaagtggcaccaggcccttcctctgggtctacgcccggacaagttcctggttcctccgccctcagcagtcctaggaggtctctcgggctggccctgactcatagtttcggcccgagcttggccgatacagatcttagcccgatggacggcatttccacctgcggcccaaaggaggaggtgaccctgcgggtagtggtaaggatgcccccacagcacattattaagggagacctgaagcaacaggagttcttcctgggctgttcaaaagtttccgggaaggtggactggaagatgctagatgaagcggtcttccaggtcttcaaggactacatcagtaagatggatcctgcaagcaccctgggcctgagcacagagtcgatccacggttacagtatctctcatgttaagcgcgtgctcgacgccgagccacccgagatgccaccctgtcggagaggcgttaacaatatcagtgtatccttgaagggacttaaagagaaatgtgtggacagcctcgtcttcgaaactttgatacccaaacctatgatgcagcactatatttctctgctcctgaagcataggaggctagtactgtccggccctagcggaaccggaaaaacgtatttaaccaataggctcgctgaatatcttgttgaaagaagcggacgcgaagttacagagggcattgtctctacctttaacatgcatcagcagagctgtaaggatctgcagctatatctctccaatttggcaaaccaaatcgaccgtgaaactggaatcggggatgtgcccttggttatcttgctcgatgatctgtccgaagccggatcaatcagcgaactcgtgaacggggctttgacttgcaagtatcataaatgcccttacattattgggacaactaaccagcccgttaaaatgaccccaaatcacgggctgcacctcagcttccggatgctgactttctccaacaatgtagagcctgctaatggcttcctggtgagatacctccgccggaaactcgtcgagagcgactccgacattaatgcaaataaggaagaactgctacgggtcctggattgggtcccaaagctgtggtatcacttgcacacctttctggagaagcattctacgagcgatttcttaatcggcccctgcttttttctgagctgccccattggtatcgaagattttcgcacatggttcatcgatctgtggaataactcgataattccatacctccaggagggagctaaagatggtataaaggtccacggccagaaggccgcctgggaagacccagtagagtgggtgagggataccctgccatggccgtcagctcaacaggatcagtcaaagttgtatcacctgccccctcctaccgtggggcctcactctatcgcctcccctcctgaggatcggactgtcaaagactctacaccatctagtctggatagcgatccactgatggccatgctacttaaactgcaggaagctgctaattatatagaatcccccgatcgcgaaaccattcttgacccaaatctacaagctacactgtag

SEQ ID NO: 299122 - DNA, 12999 bp, Artificial Sequence
  derived and/or modified sequence
ggagccgcggggcttccatccttcctttgactgatttttaaattttaatttgtattttccccgccgccccgccccttttcctccgaccccgccctatcgctccccggcttccctgctctttcctttttcccggcttccttcctcgcgtttctttcccctgcgccctcggcttgcctctctccctcctccctcgctctctcccccttctctccccttcttcctcggtttcttccgtcctctctctccccctcctcctcccccgcctcctcctcctgcgctcccgccccctgccccctccccccgtgcctgcagacgcgcggatcgtccatgcgctcctcgcgggcagaatgctgggcagcagcgtcaagagcgtgcagcccgaggtggagctgagcagcggcggcggcgacgagggcgcggacgaaccgcggggcgccggcaggaaggcggcagcggcggacggcagaggcatgctgcccaagcgcgccaaggcgcccggcggcggcggcggcatggccaaggccagcgcggctgagctgaaggtcttcaagtccggcagcgtggacagccgtgtccccggcgggccgcccgcctccaacctgcgcaagcagaagtcactcaccaacctctcttttctcacggactccgagaaaaagctgcagctttatgagcccgaatggagcgacgatatggccaaggcgcccaaaggcttaggcaaggtggggtccaagggccgtgaagctccgctgatgtccaagacgctgtccaagtcggagcactcgctcttccaggccaagggcagcccggcgggcggcgccaagacccccctggctccgctcgcgcccaacctgggaaagccgagccggatccctcgaggaccctatgcggaggtcaagccgctcagcaaggcgcctgaagcggccgtgagcgaagatggcaaatcggacgacgagctgctctccagcaaggccaaggcgcaaaagagctctgggcctgtcccctctgccaagggccaggaggagcgcgccttcctcaaggtggaccccgagctggtggtgaccgtgctgggagacctggagcagctgctcttcagccagatgctggacccagagtcccagagaaagaggacagtgcagaatgtcctggatctccggcagaacctggaagagaccatgtccagcctgcgagggtcccaggtgactcacagctccctggagatgacctgctacgacagcgatgatgccaacccacgcagcgtgtccagcctctccaaccgctcgtcccctctgtcatggcgctatggccagtccagtccgcggctgcaggctggtgacgcgccctctgtgggtgggagctgccgctcggaggggacgcccgcctggtacatgcacggcgaacgggcccactactcccacaccatgcccatgcgcagccccagcaagctcagccatatctcccgcctggagctggtcgaatccctggactcggatgaggtggacctcaagtccggctacatgagcgacagtgacctcatgggcaagaccatgacggaggatgatgacatcactaccggctgggatgaaagcagctccatcagtagtggactcagcgatgcctcagacaatctcagttcagaagaattcaatgccagctcctcactcaactccctcccaagtactcccactgcttctcgcaggaactcaacaatagtgctacgcacagactcagagaagcgctcactggcagaaagtgggctgagctggtttagtgaatcagaggagaaagcccctaaaaaactggagtacgacagtggtagcctgaagatggaacctgggacttctaagtggcggagggagcggcctgagagctgtgatgattcatccaagggtggagaactgaaaaagcccatcagcctgggccaccctggttccctgaagaagggcaagaccccacctgtggctgtaacttcccccatcactcacacagcccagagtgccctcaaagtcgcaggcaaacctgagggcaaagctacagacaagggtaagcttgcagtgaagaatactgggctccaacgctcctcctctgatgctggtcgggaccgcctgagtgatgctaagaagcccccctcgggcattgctcgcccctccacttcgggatcctttggctacaagaagcctcctcctgccacaggcacagccactgtcatgcaaactggtggttcagccactctcagcaagatccagaagtcctcaggcatccctgtcaagccagtaaatgggcgcaagactagcttagatgtttccaacagtgcagagccaggattcctggctcctggagcccgttctaacatccagtaccgcagcctgccccggccagccaagtcaagttctatgagcgtgaccggcgggcggggtggacctcgccctgtgagcagcagcattgaccccagtctcctcagcaccaagcagggaggccttacgccttccagactgaaggagcctaccaaggtagccagtgggcggaccactccagcccctgtcaatcagacagatcgggaaaaggagaaggccaaagccaaggcagtggccttggactcagacaacatctccttgaagagtattggctccccagaaagtactcccaagaaccaagcaagccaccccacagccaccaagctggcagagctgccaccaacccctctcagggccacagcgaagagctttgtcaaaccaccctcactagccaatcttgacaaggtcaactccaacagtctggatctaccatcatccagtgataccacccatgcttcaaaggtcccagatctgcatgctacaagctcagcatctgggggccctctcccttcctgcttcacccccagtccggcacccatcctcaatattaactcagccagcttctcccagggcctggagctaatgagtggtttcagtgtgccaaaagagacccgcatgtaccccaaactctcaggcctgcacaggagcatggagtccctccagatgccaatgagcctccccagtgccttccccagcagtactcccgtccccaccccacctgctccccctgctgctcccacagaagaagagacggaagagctgacttggagtggaagccccagagctgggcaactggacagtaatcagcgggatcggaacactcttcccaagaaagggctcaggtaccagcttcagtcccaggaggagaccaaggagaggcgacattcccataccattggtgggctgcctgaatccgatgaccagtcagagctgccttctccccctgcacttcccatgtctctgagtgcaaagggccaacttaccaacatagtgagtcccactgcggccaccacgccaagaatcacccgctccaacagcatccccacccacgaggcggccttcgagctgtacagcggctcccaaatggggagcaccctgtccctggccgagagacccaagggaatgattcggtcaggatccttccgagaccccacggacgatgttcacggctcagtgctgtccctggcctccagtgcctcctccacctactcctcacaaatccggaagcttcgtagggaactggaatcatcccaggaaaaagtggccaccttgacgtctcagctttctgccaatgctaatctggtggctgcttttgagcagagcctggtgaatatgacatcccgcctgcgacacctggcagagacggccgaggagaaggacactgagctgctggatttgcgagaaaccatagactttctgaagaaaaagaactctgaggcccaggcagtcattcagggagcccttaatgcctcagaaaccacacccaaagaacttcggatcaagagacaaaactcctcagatagcatctcaagcctcaacagcatcactagccattccagcatcggcagcagcaaggatgctgatgcgaaaaagaagaaaaaaaagagttgggtctatgagcttcgaagttccttcaacaaagcgttcagtataaaaaaggggcccaagtcagcttcctcatactcggatatagaggagattgctacacccgactcttcagccccctcatcccccaaactacagcatggttctacagagactgcttcaccctccatcaagtcctccacctcgtcctccgtgggcactgatgtcaccgagggccctgctcacccagccccccacactaggctgttccatgcaaatgaggaggaggagccagagaagaaggaggtatcggagctgcgctctgagctatgggagaaggaaatgaagcttacagacatccgcttggaggccctcaactctgcccaccaactggatcagcttcgggagaccatgcacaacatgcagttggaggtggacctgctgaaagcagagaatgaccgactgaaggtagccccaggcccctcatcaggctccactccagggcaggtccctggatcatctgcattatcttccccacgccgctccctaggcctggcactcacccattccttcggccccagtcttgcagacacagacctgtcacccatggatggcatcagtacttgtggtccaaaggaggaagtgaccctccgggtggtggtgaggatgcccccgcagcacatcatcaaaggggacttgaagcagcaggaattcttcctgggctgtagcaaggtcagtggaaaagttgactggaagatgctggatgaagctgttttccaagtgttcaaggactatatttctaaaatggacccagcctctaccctgggactaagcactgagtccatccatggctacagcatcagccacgtgaaacgagtgttggatgcagagccccccgagatgcctccttgccgtcgaggtgtcaataacatatcagtctccctcaaaggtctgaaggagaaatgcgtcgacagcctggtgttcgagacgctgatccccaagccgatgatgcagcactacataagcctcctgctgaagcaccggcgcctcgtcctctcgggccccagcggcacgggcaagacctacctgaccaatcgcttggccgagtacctggtggagcgctctggccgtgaggtcacagagggcatcgtcagcaccttcaacatgcaccagcagtcttgcaaggatctgcaactgtatctttccaacctagccaaccagatagaccgggaaacaggaattggggatgtgcccctggtgattctattggatgacctgagtgaagcaggctccatcagtgagttggtcaatggggccctcacctgcaagtatcataaatgtccctatattataggtaccaccaatcagcctgtaaaaatgacacccaaccatggcttgcacttgagcttcaggatgttgaccttctccaacaacgtggagccagccaatggcttcctggttcgttacctgaggaggaagctggtagagtcagacagcgacatcaatgccaacaaggaagagctgcttcgggtgctcgactgggtacccaagctgtggtatcatctccacaccttccttgagaagcacagcacctcagacttcctcatcggcccttgcttctttctgtcgtgtcccattggcattgaggacttccggacctggttcattgacctgtggaacaactctatcattccctatctacaggaaggagccaaggatgggataaaggtccatggacagaaagctgcttgggaggacccagtggaatgggtccgggacacacttccctggccatcagcccaacaagaccaatcaaagctgtaccacctgcccccacccaccgtgggccctcacagcattgcctcacctcccgaggataggacagtcaaagacagcaccccaagttctctggactcagatcctctgatggccatgctgctgaaacttcaagaagctgccaactacattgagtctccagatcgagaaaccatcctggaccccaaccttcaggcaacactttaagggttcggcaatcactgtcacccccggacagcagaacgctggcatcagctatcttagctcctcctctcccctctcctctttcagagcactggctctccagccccaggaggagaacaggagggaggaggagatgaaagaggagggacaggttcttggtgctgtacctttgagaacttcctaggaaggaatggtggggtggcgtttgggaacttgtgccccctaaacacatttactggcctcctctaatgactttggggaaaagatgattctgggtctttcccttgacttcttgtttcaattacaaactcctgggctttctggggaggggttcagaaaacatcaaaacactgcagcagttcctaaatgattctcacaagcaaccctgagagagacagtcttgtgagggagatctgggggaggcaggaagctcctcagattttctcacagacccttcccaattccatcaccactgccaacaactcctcccccagagatctggctggagcccagaaaaagaagcatgtggtttaaaaaatgtttaaatcaatctgtaaaaggtaaaaatgaaaaacaaaaacaagcaaacaaacaaaaaacaatggaaaagatgaagctggagagagaggaaccagttgccaaggtagagagctgcccgctcctgccctctggatgacataggggacatcaacaagacggctgccaacctgagaagtcaccaaaccacaaaaataaccttacagccttcagggaaagactaccagctctgtctttctaccctctaatttaacaatgcataagagtcaataaaccctacttttttatttttggtttttattttgttttcatttttttctcccatttgcctatttatttttttgtttcccttttttttttctttttccgtttttccatttcctcacatgtccacgagatgcttgggttgcttttccaggggctagtttggcttttccaagtgggttttctttggagaatctgatgccatgcaattggcatgacacctgccatgccactatctttggcatccatggggcttatatgagacatgaagcattggctcagaagtagagggagaagaggaacccagttcccttgacttcccttttgagagcacacgttctgctgggtagctcaattgccagcctctgtcatgagaaggtatagccccatcttgatagaagagttactccgagctttatcatggaccagaggaaaaccagaaaactgaaaacattcctctgtcttgtggccagtttggcctttcactgcactattctgatggtgcctgactgaatccaaatatcctagctggctcttactatttttcacaaatgagtattcacatataagagatgaacatccatgtgagatcatcccaatcagaatataagactcaaggagtttgacttggtggccaatacctgccttccaaagagatcctacctttgcagatttgctcctttcccattgccttgaaggtctggcaatccctgttctttcatttgacaagtacttactgagtactcactatatacaaatcattaggttaaaacagacacacacacacacacacacacacacacacacacacacacacacacaagacctgggcccttaagtttacagtccagcaggaaatgttaacctccattcagctacgcccccttgttatctagaccttcgggatcatctaagaaatgtagctgaaacccaaggagccagctagaaagaagcttttgattagatgtacaatacattgggggcagaagatctgggatcaattaagatggagcctgaaggactatggaatcttgcttgtcaggaatgggcaagtctacttcctgccatttctgaaagccccgcgggaccagcttctaggctgagctgcctagtaggctgaagcttcaggactctgcaggtcaaggatatgtgatgagcaccggcctaagtgtttgctcttcagattcctaagtagcacaagactttatcagaatctataggcataccaacctggatcactcttccacccaaccgaggagtagatgcatctgaatcttcatatcggtatattaagtccaaaagatggtccgggctgcccctcacaaaagcttctgcatccacgtggtaagctcccatggatgacagggttctgtatgatggagactattattgctattgctgctaattccatgagctgtgaagatccctaaccaactcagctgtaacatatgcaattctgtggtgggaagaggctgtgtgtccaaggatggtgctgaaatcactgccttaaggtctctgctgtgcagaatgaggaggcccccgagctggctgttctaacttagaaggaagagaagactggatgggcctgcttgggatctaggcctcttctaaaccctatcctaagctccagttccatggcaaggctcagacttttaatgccatcttaatctgatggttgagcgcttcactctattttctggtgctgcccagccagtgccttctgccatggatgttactggctacttgagaaaaaggagaggggagaaccccttctttcattccaactgcctccgaccccaaagggattcttggctctctggtaaccatggataccaccatgaattttatttggatcctcagcaggttgattctggaggcctcatgctatgactttttatttctcttcctgggatccaccaccctctactctcagctgactgctgcatttaggccaggtctccaattgctttcctccagaaagtgtgttcccgtctagtgaggtagtattgaagcctcggctttccctctggagcctgggaccctgtttacagttgcacatctgggcccctcactgtggggattgatcattctcatgaaggaatcacagttatatggcaactgcagaaggctgagcctcctcatggtgctataaccccttgggacactcatccagacttctctgaagcagaaaacctgagctccccactcactgccctagaatttatggcaaggagcaaatctacagcattctctcccacctacgtcctgcttcttggttgagactactgggatccttcagaaaagaaacactgggtcccatagctaaattctcaaccgccaggcaccttcagaagaatccagcctaatactggaatttgtgctattatcttcctctccagccccccaactccatccctcaccacagttgtctaggaaatgacatgaattcaatatctaatgtcaaccaatggggagagccacaactccaggagaggttcctgagctgagtcccttaatttctggatgaagaagaccaacaagttttgtccaatgtatttgtttctcagaccttgcctaggcactaaaaataaaatactaggtcattggaggctaatgtgggacctgatgtctgcgtgtgtgtgtgtgtgtgtgtgtgtgtgtgtctccctctctcacacacacaagagcagtttgctgttgctgtttcctaccttctgaggcttcaaagtattttttaaaatctatgctttgtggcagctctacggtgcttatctctgtctttgtgtcaatccttaagtacccatgtctttttcatgtctaaccattgggaaggtagaggctggcagggaagacaaatctgctacaagtccatgggaagaccctacaatgaaatgttcattggttggtatactgttttagtcttgaattgccaactttccaactgatctatccatattccttaagtactaaagacaaaatagagggcttctttttctctcttaatgtcttgccttctggttttcctggtttgcaagactaagtgtacctaatctcaccatctcttcacttctagctctctgaaacaagggtcacactactcagagggataaccccttacagtggtctgaggagtaactatttcctaaagtattctaaaagagtaggaagagagaaatggtagcctgctgcttctcacagacacctcacatcctcacttgggatggcatccacatagaaaccctgcatttaggtaaaatttgcctgactgaaggggactcagtcctccaaatcaaggtcaagaagatatctgcatgagaccttaagaactctttattgccattatttggagagggcgggggaattgtcctaatcacacatttaacacagggaataagtgctgaagtgacccagatcaccaagcgcagttcctcatcatactttatttttgctttccttattccttggcactgactaagctaaagttaagaagccgacttcataagccaacccctgtgatgggatggaaaaatgggcttttgcagagggtttattaatagagatggatatactactcacaagttctggctcatggctccactgagaaggccatagtaataaaatgatcttatgaacactgttccccaaaggccaaagcctgaagatattgccccttataatccaatcagccttatattttaataagtcctgaatcaacctgactacggatatatggggccaccagggtgcatgggtgcatgtctgctcagcctagccctggaagtgagcactgccggccacagatcctgggaaaggtggtagtaacccagaagatgtagccttgaagggaggatacctatcaaaatgccaaagctgcagggacacgaagacggttgaaaattcaacctgtgtatactagatccttccagtttgatggtttggtcattcttcttcatgattataccatggagaattttctgtgacaagggtggtcatggaagtaagtgagtgatcccctggtttctcattccttaaagcagtggttcgcaaagtatggcacaagaccagcagcatcagcagcctttgggaacttgttagaaacgaaaattctcaatcccatcccagatctgctgaatcagaaactctaatgagaggacccggcaatccacgttttaataagccctcctggtgattctgatgcacactaaattcaactgttttaaagggaaagccctttatagtattggagttcccacactgagaggctttggggcccaaaataagaaggttctaggttgtcattcagactttaacattaatttcaaagtcacctttctcatgcttccttgtgtttctgtttttccatttatgattttaacaaagaaaggtatgtgtgcttttgggtggaagttaggagaatgtttgtgtctttcctagttgaatacaaccttcagagaaaaaccttatgccttggaaattactacctggcacacaaaggggcttcaacaaggaaaagcagttggaggtctcttccagattgctcttctgccgaattatttgtatctattccgagctgattatgtaataggatggaaaaagtaaaaaaaaaaaaaaaaatctaatttgtatttccatgacaacgtgttctcccagcaacatccctctcctttatttgagttataaagggcactgctgggcctgagaaccaggccagaacctccttctgtatggcagctaacagtgtagggctccagtatcccaggaaggccccttatccacactccactcagctcataggagagtcttgcataatgaagacacagacctgggcacttcagtccttgtgctcctcctctcttttccccacagcaggacctggatacagaagtactcagccaaggtgacagaataaaatcctttttttgttgttttctgtttgtttgtttgttttggagaaggagtctcgctttgtcacccaggctggtgtgcagtggcacgatctcggctcactgcaacctccgcctcccaggttcaagcgattctcctgtctcagcctcctgagtagctgggattacagacgtgcgccatcacgcccagctaatttttgtatttttagtagatacggagttttgccttgttggccaggctgtgctggagctcctgacctcaggtgattcacctgccacagcctcccaaagtgctgggattacaggcgtgagccacagcaccctgccaaataagatcctttttaaaaaatatctgaaaaaagcttcatatctttacaaactcataaaatagctgattgggccatggaggagatgaggctgtttagaactggttttgtttcaagtttgtcaattttccctgtatgagaacttgggtaaagcacaaagaaacatacagtgctagtaacaggtctcctgcgccctggaactaagtgtttggaggaaggactaaaccccgggggaggtgagtataaaataattccactaagatcacctcctcagtccccagaaggctgatggtggatcctctggccatctcctgtggggtcttactgctcctctgccatttctctatgcctgaagacacgaagatgatatcaaggcagagctaccatatcgcagccagtctctaggctactgctgtgcagtggctcccactttctaatgcttttttgtttttgctttttctaacaaaacaatcttttttcaaaatgaattccaacccctgctagcttccttccccgcctccatactgttttaggcagcaccgtttatgtgacagagtccgtgtttctcaaatgcatggtgttcctcaggtggagagtgggcagaagtttttgcaacactttttttttaagttattgggtgcaaaatcccaaaccaggatatgtgtatgtctgtgtgtttatgttttttatttgaccctcccctctttcaacctacccccttttatatctaatgtagaaaaagcgaaattgaatctggaaagcaaactgttgtatatagttgcggtaacaatcatgaagagagagccgggctgtcccctcagtaattcattttaaataacaaattatttaaaaataaaattcatgccagagccagctgaagaggccttccttcatcaccactgaggccacccccaatctgggccctctgtccatctggcatgtctcctcccagcaagattcatctgttcaatgccatttgcgtttcaataaagttatctcctgtactgtccactg

SEQ ID NO: 299123 - DNA, 5609 bp, Artificial Sequence
  derived and/or modified sequence
atgctgggatcttccgtgaagagtgtgcagccagaggtggagttgtcatccggcggtggtgacgagggcgcagatgagccgcgaggagccggaaggaaggctgctgcggctgatggcagaggtatgctgcctaagagggctaaggcacccggtggtggcggaggcatggcgaaggctagcgcagcagaactgaaggttttcaaaagcggaagcgtagactcgcgagtgcccggaggaccacccgcttccaacctacgtaagcaaaagagccttaccaatttgtcttttctcactgactcggagaagaagcttcagctgtatgagccagagtggagtgacgatatggccaaggcaccaaaaggccttggcaaggtgggctcgaaaggcagagaagctcctcttatgagtaaaacactatcaaagagtgagcactccctgtttcaggccaaagggtccccagccggaggcgctaaaacaccattagcacctctggcccctaatctcggcaaaccttctcgaatccctaggggcccttatgccgaggttaagccactctctaaagccccagaagctgccgtctctgaggacggtaaatcggacgatgagctgttatcttcaaaggcgaaggcccagaagtcctctggtccagtgccaagcgctaaggggcaggaggaacgcgctttcctaaaagtggaccctgagttggtggtgaccgtgttaggcgatcttgagcagctgctattctcacagatgctcgaccccgaaagtcagaggaagcgcacggtgcaaaatgttctcgacctccgacaaaacctcgaggagacaatgtccagtctgaggggctctcaagtcacacactcatccctggaaatgacctgctatgactctgacgatgccaatcctcgctcagtatcctctctttcaaacaggtccagccccctgagttggagatacgggcaatccagtcctaggctgcaggctggagacgccccttcggttggaggatcatgtcgttccgaagggacccccgcttggtatatgcacggggagagagcacattactcccatacgatgcctatgagatcacccagcaagctgtcccacatctccaggctggagctggttgagtcgctcgattctgacgaggtagatctgaagtccgggtacatgagcgattcagacctgatggggaagaccatgacagaggacgacgacatcaccaccggatgggacgaatcctcaagcattagctctggactgtcagatgcaagtgataacctcagctcggaggagttcaacgcaagctcctcgctcaactctttaccgtctacccccacagcgtctaggaggaattctactatcgtcctccgcactgacagcgagaagaggagtttagctgagtcaggtctttcatggttctccgagagcgaggaaaaagccccaaaaaagctggagtacgattctggatctctcaagatggagccgggaacatctaagtggcgcagggagcgacccgagagctgtgacgattctagcaagggaggcgaactgaaaaaaccaattagtctgggacacccaggatccctcaagaaagggaagacccccccagtcgccgttacgtctccaataacccataccgcacaaagtgctctcaaggtagcaggcaagccagaggggaaagccacggacaagggaaagttggcagtaaagaatacaggcctgcagcgcagcagtagcgatgctggtagggatcgactctccgacgccaaaaaaccccctagtggaatcgcaaggcctagtacttcgggaagcttcggatataaaaagcccccacctgccacagggaccgctactgtgatgcagactggcggatcagccaccctgagtaaaattcagaaaagctctggcatcccagtaaaacccgtgaacggaaggaaaaccagccttgatgtttctaattctgctgagcccggattcctagccccaggggctaggagcaatatccaatataggtccctcccaagacccgctaagtctagtagtatgtctgttaccggagggagaggaggccctcgtcctgtctccagctcaatcgacccaagtttgttaagcacaaagcaaggcggtctgacacccagtcgactcaaggagccgaccaaggtcgcgtcaggacggacaactccagcccctgtgaaccagaccgatcgcgagaaggagaaggccaaagcgaaagctgtcgcgctggactctgataacattagcttgaaatccattggaagtcctgagtccacgcccaaaaaccaggctagtcaccccacagctactaagctcgccgagctccccccaacaccactgagagctactgccaaatcttttgttaaacctccctccttagcaaacttagacaaggtgaatagcaattcactcgacctgcccagcagcagcgacacaacccatgcgtccaaggtgcctgacctgcatgctacatcgtccgcctctggcggacccctcccttcttgcttcacgccatcaccagctcccattcttaacattaacagtgcatcctttagccagggccttgagttgatgtccggcttttccgtgccaaaggagacccgtatgtacccaaaattatccggccttcacaggagcatggaatctttacagatgcccatgtcgctgccttctgctttcccttcgtcgacgcctgttccaactccacccgctccacctgcggcaccaacagaggaggaaaccgaggagctcacttggtccgggtcccccagagcaggccaactggatagcaatcagcgcgaccgcaataccctgcctaagaagggtttgcggtaccagctgcagtctcaagaggagaccaaggagaggagacactctcataccatcgggggactcccagagtctgatgatcagagtgaactgccctcccccccagccctacccatgtcactgtccgccaaaggccagttaactaacattgtcagtcccaccgcggctaccacacccagaattacccgctccaattccatccctacacacgaagcggcttttgagctttactctgggtcccagatgggctcgaccctgagcctcgccgaaagacctaaggggatgatccgatctggcagcttccgagaccccactgacgacgtacatggcagtgtgttgagcttggccagttccgcctccagtacatattcctctcaaattcgaaagctgcgcagggagcttgaatcttcacaggagaaagttgcaacacttaccagtcaactttcagccaacgcaaacctagtggcggcttttgagcaatcactcgttaacatgaccagccggcttaggcatctcgccgaaaccgctgaagaaaaggacacggagctccttgatctccgcgagaccatcgatttccttaagaaaaagaattccgaggcccaagcagtgatccaaggggctttgaatgctagcgagaccaccccaaaagaactccgaatcaagaggcagaatagttccgacagcattagtagcctcaatagcataaccagccactcgtccataggatcatccaaggatgccgacgccaagaaaaaaaagaaaaaatcctgggtctacgagctacgaagttccttcaataaagctttctccatcaagaagggcccaaagagcgcgtcttcatattctgacatcgaggaaatagctacgcccgacagttcagctccttcgtccccaaagcttcagcacggaagtactgagaccgcctctccttccatcaaatctagcacttctagtagcgtgggaacagacgtgaccgaagggcctgcccaccccgctcctcacacccggttgtttcacgcaaacgaagaagaagagcctgagaagaaggaggtaagtgagttgagatctgagctctgggaaaaagagatgaaactgacagatataagattagaagctctgaactctgctcatcagctggatcagttaagagagaccatgcataacatgcagctagaggtggatttgctgaaggctgagaacgaccgcctgaaagtggcccctggcccaagcagtggatccacccccggacaggttcccggttccagtgccttgtcctctccacggaggtctctgggattagcacttacacacagctttggacctagcctggcggatacggacctttctcctatggacggaatctccacttgtggcccaaaagaggaggtgaccctccgggtcgtggttaggatgcctccccagcacatcatcaaaggcgacctgaaacagcaggagttctttctcggttgttccaaggtctccgggaaagttgattggaagatgttggacgaagcagtgtttcaagtatttaaagactatatatctaaaatggacccagctagcacgctgggcctctccaccgagagtatacatggctattccatcagccatgtaaagagggttctggatgccgaaccccctgagatgccaccgtgtcgacggggagttaataatattagcgtttccctaaaagggctcaaggaaaaatgtgtggactcactggtctttgaaactctcattccaaaacccatgatgcagcactatatatccctgctgttgaagcacaggcgactggtgctcagcggaccaagtggtaccggtaaaacataccttactaatcgactggccgagtacctggtggagcgctcagggagagaagtcacagagggcattgtgagcactttcaatatgcatcagcagagttgcaaggacctgcaactctacctttccaaccttgcgaatcagatcgatcgcgaaaccggtattggggacgtgcccctggttatactgcttgatgaccttagcgaggctgggtccataagtgagctggtaaacggggcactgacctgcaagtaccataaatgtccttacattattggtaccacaaatcagcctgtgaagatgaccccaaaccatggactgcatttgtctttcagaatgctcacattttccaacaacgtggaaccagccaacggcttcctagtgcggtatctgcgaagaaaactcgtagagtcagactctgacatcaacgcgaataaggaggagctgttacgtgtgttggattgggtgcccaagctgtggtaccaccttcatactttcctggagaaacattccacatccgacttcctcatcggaccttgcttctttctgtcttgtccaataggcattgaggatttccggacatggtttatcgacctgtggaacaactctattattccttatctacaggagggagcaaaggatggcatcaaagtccacggacagaaagccgcttgggaagatccagtagagtgggtacgggacactcttccttggccatcagcgcaacaggaccaaagtaaattgtaccatctgccgccacctacagtgggaccacatagcatcgcttctccaccggaggaccgcaccgtaaaagatagtacgccttcctccctggactctgaccctcttatggcaatgctgttgaaactgcaggaggctgccaactatatcgagtcacctgatcgcgagacaatcctggacccgaacttacaggcgacactgta

SEQ ID NO: 299124 - DNA, 5610 bp, Artificial Sequence
  derived and/or modified sequence
atgctgggcagcagcgtgaagagcgtgcagcccgaggtggagctgagcagcggcggcggcgacgagggcgccgacgagcccagaggcgccggcagaaaggccgccgccgccgacggcagaggcatgctgcccaagagagccaaggcccccggcggcggcggcggcatggccaaggccagcgccgccgagctgaaggtgttcaagagcggcagcgtggacagcagagtgcccggcggcccccccgccagcaacctgagaaagcagaagagcctgaccaacctgagcttcctgaccgacagcgagaagaagctgcagctgtacgagcccgagtggagcgacgacatggccaaggcccccaagggcctgggcaaggtgggcagcaagggcagagaggcccccctgatgagcaagaccctgagcaagagcgagcacagcctgttccaggccaagggcagccccgccggcggcgccaagacccccctggcccccctggcccccaacctgggcaagcccagcagaatccccagaggcccctacgccgaggtgaagcccctgagcaaggcccccgaggccgccgtgagcgaggacggcaagagcgacgacgagctgctgagcagcaaggccaaggcccagaagagcagcggccccgtgcccagcgccaagggccaggaggagagagccttcctgaaggtggaccccgagctggtggtgaccgtgctgggcgacctggagcagctgctgttcagccagatgctggaccccgagagccagagaaagagaaccgtgcagaacgtgctggacctgagacagaacctggaggagaccatgagcagcctgagaggcagccaggtgacccacagcagcctggagatgacctgctacgacagcgacgacgccaaccccagaagcgtgagcagcctgagcaacagaagcagccccctgagctggagatacggccagagcagccccagactgcaggccggcgacgcccccagcgtgggcggcagctgcagaagcgagggcacccccgcctggtacatgcacggcgagagagcccactacagccacaccatgcccatgagaagccccagcaagctgagccacatcagcagactggagctggtggagagcctggacagcgacgaggtggacctgaagagcggctacatgagcgacagcgacctgatgggcaagaccatgaccgaggacgacgacatcaccaccggctgggacgagagcagcagcatcagcagcggcctgagcgacgccagcgacaacctgagcagcgaggagttcaacgccagcagcagcctgaacagcctgcccagcacccccaccgccagcagaagaaacagcaccatcgtgctgagaaccgacagcgagaagagaagcctggccgagagcggcctgagctggttcagcgagagcgaggagaaggcccccaagaagctggagtacgacagcggcagcctgaagatggagcccggcaccagcaagtggagaagagagagacccgagagctgcgacgacagcagcaagggcggcgagctgaagaagcccatcagcctgggccaccccggcagcctgaagaagggcaagaccccccccgtggccgtgaccagccccatcacccacaccgcccagagcgccctgaaggtggccggcaagcccgagggcaaggccaccgacaagggcaagctggccgtgaagaacaccggcctgcagagaagcagcagcgacgccggcagagacagactgagcgacgccaagaagccccccagcggcatcgccagacccagcaccagcggcagcttcggctacaagaagcccccccccgccaccggcaccgccaccgtgatgcagaccggcggcagcgccaccctgagcaagatccagaagagcagcggcatccccgtgaagcccgtgaacggcagaaagaccagcctggacgtgagcaacagcgccgagcccggcttcctggcccccggcgccagaagcaacatccagtacagaagcctgcccagacccgccaagagcagcagcatgagcgtgaccggcggcagaggcggccccagacccgtgagcagcagcatcgaccccagcctgctgagcaccaagcagggcggcctgacccccagcagactgaaggagcccaccaaggtggccagcggcagaaccacccccgcccccgtgaaccagaccgacagagagaaggagaaggccaaggccaaggccgtggccctggacagcgacaacatcagcctgaagagcatcggcagccccgagagcacccccaagaaccaggccagccaccccaccgccaccaagctggccgagctgccccccacccccctgagagccaccgccaagagcttcgtgaagccccccagcctggccaacctggacaaggtgaacagcaacagcctggacctgcccagcagcagcgacaccacccacgccagcaaggtgcccgacctgcacgccaccagcagcgccagcggcggccccctgcccagctgcttcacccccagccccgcccccatcctgaacatcaacagcgccagcttcagccagggcctggagctgatgagcggcttcagcgtgcccaaggagaccagaatgtaccccaagctgagcggcctgcacagaagcatggagagcctgcagatgcccatgagcctgcccagcgccttccccagcagcacccccgtgcccaccccccccgccccccccgccgcccccaccgaggaggagaccgaggagctgacctggagcggcagccccagagccggccagctggacagcaaccagagagacagaaacaccctgcccaagaagggcctgagataccagctgcagagccaggaggagaccaaggagagaagacacagccacaccatcggcggcctgcccgagagcgacgaccagagcgagctgcccagcccccccgccctgcccatgagcctgagcgccaagggccagctgaccaacatcgtgagccccaccgccgccaccacccccagaatcaccagaagcaacagcatccccacccacgaggccgccttcgagctgtacagcggcagccagatgggcagcaccctgagcctggccgagagacccaagggcatgatcagaagcggcagcttcagagaccccaccgacgacgtgcacggcagcgtgctgagcctggccagcagcgccagcagcacctacagcagccagatcagaaagctgagaagagagctggagagcagccaggagaaggtggccaccctgaccagccagctgagcgccaacgccaacctggtggccgccttcgagcagagcctggtgaacatgaccagcagactgagacacctggccgagaccgccgaggagaaggacaccgagctgctggacctgagagagaccatcgacttcctgaagaagaagaacagcgaggcccaggccgtgatccagggcgccctgaacgccagcgagaccacccccaaggagctgagaatcaagagacagaacagcagcgacagcatcagcagcctgaacagcatcaccagccacagcagcatcggcagcagcaaggacgccgacgccaagaagaagaagaagaagagctgggtgtacgagctgagaagcagcttcaacaaggccttcagcatcaagaagggccccaagagcgccagcagctacagcgacatcgaggagatcgccacccccgacagcagcgcccccagcagccccaagctgcagcacggcagcaccgagaccgccagccccagcatcaagagcagcaccagcagcagcgtgggcaccgacgtgaccgagggccccgcccaccccgccccccacaccagactgttccacgccaacgaggaggaggagcccgagaagaaggaggtgagcgagctgagaagcgagctgtgggagaaggagatgaagctgaccgacatcagactggaggccctgaacagcgcccaccagctggaccagctgagagagaccatgcacaacatgcagctggaggtggacctgctgaaggccgagaacgacagactgaaggtggcccccggccccagcagcggcagcacccccggccaggtgcccggcagcagcgccctgagcagccccagaagaagcctgggcctggccctgacccacagcttcggccccagcctggccgacaccgacctgagccccatggacggcatcagcacctgcggccccaaggaggaggtgaccctgagagtggtggtgagaatgcccccccagcacatcatcaagggcgacctgaagcagcaggagttcttcctgggctgcagcaaggtgagcggcaaggtggactggaagatgctggacgaggccgtgttccaggtgttcaaggactacatcagcaagatggaccccgccagcaccctgggcctgagcaccgagagcatccacggctacagcatcagccacgtgaagagagtgctggacgccgagccccccgagatgcccccctgcagaagaggcgtgaacaacatcagcgtgagcctgaagggcctgaaggagaagtgcgtggacagcctggtgttcgagaccctgatccccaagcccatgatgcagcactacatcagcctgctgctgaagcacagaagactggtgctgagcggccccagcggcaccggcaagacctacctgaccaacagactggccgagtacctggtggagagaagcggcagagaggtgaccgagggcatcgtgagcaccttcaacatgcaccagcagagctgcaaggacctgcagctgtacctgagcaacctggccaaccagatcgacagagagaccggcatcggcgacgtgcccctggtgatcctgctggacgacctgagcgaggccggcagcatcagcgagctggtgaacggcgccctgacctgcaagtaccacaagtgcccctacatcatcggcaccaccaaccagcccgtgaagatgacccccaaccacggcctgcacctgagcttcagaatgctgaccttcagcaacaacgtggagcccgccaacggcttcctggtgagatacctgagaagaaagctggtggagagcgacagcgacatcaacgccaacaaggaggagctgctgagagtgctggactgggtgcccaagctgtggtaccacctgcacaccttcctggagaagcacagcaccagcgacttcctgatcggcccctgcttcttcctgagctgccccatcggcatcgaggacttcagaacctggttcatcgacctgtggaacaacagcatcatcccctacctgcaggagggcgccaaggacggcatcaaggtgcacggccagaaggccgcctgggaggaccccgtggagtgggtgagagacaccctgccctggcccagcgcccagcaggaccagagcaagctgtaccacctgcccccccccaccgtgggcccccacagcatcgccagcccccccgaggacagaaccgtgaaggacagcacccccagcagcctggacagcgaccccctgatggccatgctgctgaagctgcaggaggccgccaactacatcgagagccccgacagagagaccatcctggaccccaacctgcaggccaccctgtag

SEQ ID NO: 299125 - protein, 730 aa, Artificial Sequence
  derived and/or modified sequence
MEPGTSKWRRERPESCDDSSKGGELKKPISLGHPGSLKKGKTPPVAVTSPITHTAQSALKVAGKPEGKATDKGKLAVKNTGLQRSSSDAGRDRLSDAKKPPSGIARPSTSGSFGYKKPPPATGTATVMQTGGSATLSKIQKSSGIPVKPVNGRKTSLDVSNSAEPGFLAPGARSNIQYRSLPRPAKSSSMSVTGGRGGPRPVSSSIDPSLLSTKQGGLTPSRLKEPTKVASGRTTPAPVNQTDREKEKAKAKAVALDSDNISLKSIGSPESTPKNQASHPTATKLAELPPTPLRATAKSFVKPPSLANLDKVNSNSLDLPSSSDTTHASKVPDLHATSSASGGPLPSCFTPSPAPILNINSASFSQGLELMSGFSVPKETRMYPKLSGLHRSMESLQMPMSLPSAFPSSTPVPTPPAPPAAPTEEETEELTWSGSPRAGQLDSNQRDRNTLPKKGLRYQLQSQEETKERRHSHTIGGLPESDDQSELPSPPALPMSLSAKGQLTNIVSPTAATTPRITRSNSIPTHEAAFELYSGSQMGSTLSLAERPKGMIRSGSFRDPTDDVHGSVLSLASSASSTYSSQIRKLRRELESSQEKVATLTSQLSANANLVAAFEQSLVNMTSRLRHLAETAEEKMEFRSCHPGWSALARSWLTANSASQDTELLDLRETIDFLKKKNSEAQAVIQGALNASETTPKELRIKRQNSSDSISSLNSITSHSSIGSSKDADA

SEQ ID NO: 299126 - DNA, 13075 bp, Artificial Sequence
  derived and/or modified sequence
ggagccgcggggcttccatccttcctttgactgatttttaaattttaatttgtattttccccgccgccccgccccttttcctccgaccccgccctatcgctccccggcttccctgctctttcctttttcccggcttccttcctcgcgtttctttcccctgcgccctcggcttgcctctctccctcctccctcgctctctcccccttctctccccttcttcctcggtttcttccgtcctctctctccccctcctcctcccccgcctcctcctcctgcgctcccgccccctgccccctccccccgtgcctgcagacgcgcggatcgtccatgcgctcctcgcgggcagaatgctgggcagcagcgtcaagagcgtgcagcccgaggtggagctgagcagcggcggcggcgacgagggcgcggacgaaccgcggggcgccggcaggaaggcggcagcggcggacggcagaggcatgctgcccaagcgcgccaaggcgcccggcggcggcggcggcatggccaaggccagcgcggctgagctgaaggtcttcaagtccggcagcgtggacagccgtgtccccggcgggccgcccgcctccaacctgcgcaagcagaagtcactcaccaacctctcttttctcacggactccgagaaaaagctgcagctttatgagcccgaatggagcgacgatatggccaaggcgcccaaaggcttaggcaaggtggggtccaagggccgtgaagctccgctgatgtccaagacgctgtccaagtcggagcactcgctcttccaggccaagggcagcccggcgggcggcgccaagacccccctggctccgctcgcgcccaacctgggaaagccgagccggatccctcgaggaccctatgcggaggtcaagccgctcagcaaggcgcctgaagcggccgtgagcgaagatggcaaatcggacgacgagctgctctccagcaaggccaaggcgcaaaagagctctgggcctgtcccctctgccaagggccaggaggagcgcgccttcctcaaggtggaccccgagctggtggtgaccgtgctgggagacctggagcagctgctcttcagccagatgctggacccagagtcccagagaaagaggacagtgcagaatgtcctggatctccggcagaacctggaagagaccatgtccagcctgcgagggtcccaggtgactcacagctccctggagatgacctgctacgacagcgatgatgccaacccacgcagcgtgtccagcctctccaaccgctcgtcccctctgtcatggcgctatggccagtccagtccgcggctgcaggctggtgacgcgccctctgtgggtgggagctgccgctcggaggggacgcccgcctggtacatgcacggcgaacgggcccactactcccacaccatgcccatgcgcagccccagcaagctcagccatatctcccgcctggagctggtcgaatccctggactcggatgaggtggacctcaagtccggctacatgagcgacagtgacctcatgggcaagaccatgacggaggatgatgacatcactaccggctgggatgaaagcagctccatcagtagtggactcagcgatgcctcagacaatctcagttcagaagaattcaatgccagctcctcactcaactccctcccaagtactcccactgcttctcgcaggaactcaacaatagtgctacgcacagactcagagaagcgctcactggcagaaagtgggctgagctggtttagtgaatcagaggagaaagcccctaaaaaactggagtacgacagtggtagcctgaagatggaacctgggacttctaagtggcggagggagcggcctgagagctgtgatgattcatccaagggtggagaactgaaaaagcccatcagcctgggccaccctggttccctgaagaagggcaagaccccacctgtggctgtaacttcccccatcactcacacagcccagagtgccctcaaagtcgcaggcaaacctgagggcaaagctacagacaagggtaagcttgcagtgaagaatactgggctccaacgctcctcctctgatgctggtcgggaccgcctgagtgatgctaagaagcccccctcgggcattgctcgcccctccacttcgggatcctttggctacaagaagcctcctcctgccacaggcacagccactgtcatgcaaactggtggttcagccactctcagcaagatccagaagtcctcaggcatccctgtcaagccagtaaatgggcgcaagactagcttagatgtttccaacagtgcagagccaggattcctggctcctggagcccgttctaacatccagtaccgcagcctgccccggccagccaagtcaagttctatgagcgtgaccggcgggcggggtggacctcgccctgtgagcagcagcattgaccccagtctcctcagcaccaagcagggaggccttacgccttccagactgaaggagcctaccaaggtagccagtgggcggaccactccagcccctgtcaatcagacagatcgggaaaaggagaaggccaaagccaaggcagtggccttggactcagacaacatctccttgaagagtattggctccccagaaagtactcccaagaaccaagcaagccaccccacagccaccaagctggcagagctgccaccaacccctctcagggccacagcgaagagctttgtcaaaccaccctcactagccaatcttgacaaggtcaactccaacagtctggatctaccatcatccagtgataccacccatgcttcaaaggtcccagatctgcatgctacaagctcagcatctgggggccctctcccttcctgcttcacccccagtccggcacccatcctcaatattaactcagccagcttctcccagggcctggagctaatgagtggtttcagtgtgccaaaagagacccgcatgtaccccaaactctcaggcctgcacaggagcatggagtccctccagatgccaatgagcctccccagtgccttccccagcagtactcccgtccccaccccacctgctccccctgctgctcccacagaagaagagacggaagagctgacttggagtggaagccccagagctgggcaactggacagtaatcagcgggatcggaacactcttcccaagaaagggctcaggtaccagcttcagtcccaggaggagaccaaggagaggcgacattcccataccattggtgggctgcctgaatccgatgaccagtcagagctgccttctccccctgcacttcccatgtctctgagtgcaaagggccaacttaccaacatagtgagtcccactgcggccaccacgccaagaatcacccgctccaacagcatccccacccacgaggcggccttcgagctgtacagcggctcccaaatggggagcaccctgtccctggccgagagacccaagggaatgattcggtcaggatccttccgagaccccacggacgatgttcacggctcagtgctgtccctggcctccagtgcctcctccacctactcctcacaaatccggaagcttcgtagggaactggaatcatcccaggaaaaagtggccaccttgacgtctcagctttctgccaatgctaatctggtggctgcttttgagcagagcctggtgaatatgacatcccgcctgcgacacctggcagagacggccgaggagaagatggagtttcgttcttgtcacccaggctggagtgcactggcgcgatcttggctaactgcaaactctgcctcccaggacactgagctgctggatttgcgagaaaccatagactttctgaagaaaaagaactctgaggcccaggcagtcattcagggagcccttaatgcctcagaaaccacacccaaagaacttcggatcaagagacaaaactcctcagatagcatctcaagcctcaacagcatcactagccattccagcatcggcagcagcaaggatgctgatgcgaaaaagaagaaaaaaaagagttgggtaggtaaagcttcgaagttccttcaacaaagcgttcagtataaaaaaggggcccaagtcagcttcctcatactcggatatagaggagattgctacacccgactcttcagccccctcatcccccaaactacagcatggttctacagagactgcttcaccctccatcaagtcctccacctcgtcctccgtgggcactgatgtcaccgagggccctgctcacccagccccccacactaggctgttccatgcaaatgaggaggaggagccagagaagaaggaggtatcggagctgcgctctgagctatgggagaaggaaatgaagcttacagacatccgcttggaggccctcaactctgcccaccaactggatcagcttcgggagaccatgcacaacatgcagttggaggtggacctgctgaaagcagagaatgaccgactgaaggtagccccaggcccctcatcaggctccactccagggcaggtccctggatcatctgcattatcttccccacgccgctccctaggcctggcactcacccattccttcggccccagtcttgcagacacagacctgtcacccatggatggcatcagtacttgtggtccaaaggaggaagtgaccctccgggtggtggtgaggatgcccccgcagcacatcatcaaaggggacttgaagcagcaggaattcttcctgggctgtagcaaggtcagtggaaaagttgactggaagatgctggatgaagctgttttccaagtgttcaaggactatatttctaaaatggacccagcctctaccctgggactaagcactgagtccatccatggctacagcatcagccacgtgaaacgagtgttggatgcagagccccccgagatgcctccttgccgtcgaggtgtcaataacatatcagtctccctcaaaggtctgaaggagaaatgcgtcgacagcctggtgttcgagacgctgatccccaagccgatgatgcagcactacataagcctcctgctgaagcaccggcgcctcgtcctctcgggccccagcggcacgggcaagacctacctgaccaatcgcttggccgagtacctggtggagcgctctggccgtgaggtcacagagggcatcgtcagcaccttcaacatgcaccagcagtcttgcaaggatctgcaactgtatctttccaacctagccaaccagatagaccgggaaacaggaattggggatgtgcccctggtgattctattggatgacctgagtgaagcaggctccatcagtgagttggtcaatggggccctcacctgcaagtatcataaatgtccctatattataggtaccaccaatcagcctgtaaaaatgacacccaaccatggcttgcacttgagcttcaggatgttgaccttctccaacaacgtggagccagccaatggcttcctggttcgttacctgaggaggaagctggtagagtcagacagcgacatcaatgccaacaaggaagagctgcttcgggtgctcgactgggtacccaagctgtggtatcatctccacaccttccttgagaagcacagcacctcagacttcctcatcggcccttgcttctttctgtcgtgtcccattggcattgaggacttccggacctggttcattgacctgtggaacaactctatcattccctatctacaggaaggagccaaggatgggataaaggtccatggacagaaagctgcttgggaggacccagtggaatgggtccgggacacacttccctggccatcagcccaacaagaccaatcaaagctgtaccacctgcccccacccaccgtgggccctcacagcattgcctcacctcccgaggataggacagtcaaagacagcaccccaagttctctggactcagatcctctgatggccatgctgctgaaacttcaagaagctgccaactacattgagtctccagatcgagaaaccatcctggaccccaaccttcaggcaacactttaagggttcggcaatcactgtcacccccggacagcagaacgctggcatcagctatcttagctcctcctctcccctctcctctttcagagcactggctctccagccccaggaggagaacaggagggaggaggagatgaaagaggagggacaggttcttggtgctgtacctttgagaacttcctaggaaggaatggtggggtggcgtttgggaacttgtgccccctaaacacatttactggcctcctctaatgactttggggaaaagatgattctgggtctttcccttgacttcttgtttcaattacaaactcctgggctttctggggaggggttcagaaaacatcaaaacactgcagcagttcctaaatgattctcacaagcaaccctgagagagacagtcttgtgagggagatctgggggaggcaggaagctcctcagattttctcacagacccttcccaattccatcaccactgccaacaactcctcccccagagatctggctggagcccagaaaaagaagcatgtggtttaaaaaatgtttaaatcaatctgtaaaaggtaaaaatgaaaaacaaaaacaagcaaacaaacaaaaaacaatggaaaagatgaagctggagagagaggaaccagttgccaaggtagagagctgcccgctcctgccctctggatgacataggggacatcaacaagacggctgccaacctgagaagtcaccaaaccacaaaaataaccttacagccttcagggaaagactaccagctctgtctttctaccctctaatttaacaatgcataagagtcaataaaccctacttttttatttttggtttttattttgttttcatttttttctcccatttgcctatttatttttttgtttcccttttttttttctttttccgtttttccatttcctcacatgtccacgagatgcttgggttgcttttccaggggctagtttggcttttccaagtgggttttctttggagaatctgatgccatgcaattggcatgacacctgccatgccactatctttggcatccatggggcttatatgagacatgaagcattggctcagaagtagagggagaagaggaacccagttcccttgacttcccttttgagagcacacgttctgctgggtagctcaattgccagcctctgtcatgagaaggtatagccccatcttgatagaagagttactccgagctttatcatggaccagaggaaaaccagaaaactgaaaacattcctctgtcttgtggccagtttggcctttcactgcactattctgatggtgcctgactgaatccaaatatcctagctggctcttactatttttcacaaatgagtattcacatataagagatgaacatccatgtgagatcatcccaatcagaatataagactcaaggagtttgacttggtggccaatacctgccttccaaagagatcctacctttgcagatttgctcctttcccattgccttgaaggtctggcaatccctgttctttcatttgacaagtacttactgagtactcactatatacaaatcattaggttaaaacagacacacacacacacacacacacacacacacacacacacacacacacaagacctgggcccttaagtttacagtccagcaggaaatgttaacctccattcagctacgcccccttgttatctagaccttcgggatcatctaagaaatgtagctgaaacccaaggagccagctagaaagaagcttttgattagatgtacaatacattgggggcagaagatctgggatcaattaagatggagcctgaaggactatggaatcttgcttgtcaggaatgggcaagtctacttcctgccatttctgaaagccccgcgggaccagcttctaggctgagctgcctagtaggctgaagcttcaggactctgcaggtcaaggatatgtgatgagcaccggcctaagtgtttgctcttcagattcctaagtagcacaagactttatcagaatctataggcataccaacctggatcactcttccacccaaccgaggagtagatgcatctgaatcttcatatcggtatattaagtccaaaagatggtccgggctgcccctcacaaaagcttctgcatccacgtggtaagctcccatggatgacagggttctgtatgatggagactattattgctattgctgctaattccatgagctgtgaagatccctaaccaactcagctgtaacatatgcaattctgtggtgggaagaggctgtgtgtccaaggatggtgctgaaatcactgccttaaggtctctgctgtgcagaatgaggaggcccccgagctggctgttctaacttagaaggaagagaagactggatgggcctgcttgggatctaggcctcttctaaaccctatcctaagctccagttccatggcaaggctcagacttttaatgccatcttaatctgatggttgagcgcttcactctattttctggtgctgcccagccagtgccttctgccatggatgttactggctacttgagaaaaaggagaggggagaaccccttctttcattccaactgcctccgaccccaaagggattcttggctctctggtaaccatggataccaccatgaattttatttggatcctcagcaggttgattctggaggcctcatgctatgactttttatttctcttcctgggatccaccaccctctactctcagctgactgctgcatttaggccaggtctccaattgctttcctccagaaagtgtgttcccgtctagtgaggtagtattgaagcctcggctttccctctggagcctgggaccctgtttacagttgcacatctgggcccctcactgtggggattgatcattctcatgaaggaatcacagttatatggcaactgcagaaggctgagcctcctcatggtgctataaccccttgggacactcatccagacttctctgaagcagaaaacctgagctccccactcactgccctagaatttatggcaaggagcaaatctacagcattctctcccacctacgtcctgcttcttggttgagactactgggatccttcagaaaagaaacactgggtcccatagctaaattctcaaccgccaggcaccttcagaagaatccagcctaatactggaatttgtgctattatcttcctctccagccccccaactccatccctcaccacagttgtctaggaaatgacatgaattcaatatctaatgtcaaccaatggggagagccacaactccaggagaggttcctgagctgagtcccttaatttctggatgaagaagaccaacaagttttgtccaatgtatttgtttctcagaccttgcctaggcactaaaaataaaatactaggtcattggaggctaatgtgggacctgatgtctgcgtgtgtgtgtgtgtgtgtgtgtgtgtgtgtctccctctctcacacacacaagagcagtttgctgttgctgtttcctaccttctgaggcttcaaagtattttttaaaatctatgctttgtggcagctctacggtgcttatctctgtctttgtgtcaatccttaagtacccatgtctttttcatgtctaaccattgggaaggtagaggctggcagggaagacaaatctgctacaagtccatgggaagaccctacaatgaaatgttcattggttggtatactgttttagtcttgaattgccaactttccaactgatctatccatattccttaagtactaaagacaaaatagagggcttctttttctctcttaatgtcttgccttctggttttcctggtttgcaagactaagtgtacctaatctcaccatctcttcacttctagctctctgaaacaagggtcacactactcagagggataaccccttacagtggtctgaggagtaactatttcctaaagtattctaaaagagtaggaagagagaaatggtagcctgctgcttctcacagacacctcacatcctcacttgggatggcatccacatagaaaccctgcatttaggtaaaatttgcctgactgaaggggactcagtcctccaaatcaaggtcaagaagatatctgcatgagaccttaagaactctttattgccattatttggagagggcgggggaattgtcctaatcacacatttaacacagggaataagtgctgaagtgacccagatcaccaagcgcagttcctcatcatactttatttttgctttccttattccttggcactgactaagctaaagttaagaagccgacttcataagccaacccctgtgatgggatggaaaaatgggcttttgcagagggtttattaatagagatggatatactactcacaagttctggctcatggctccactgagaaggccatagtaataaaatgatcttatgaacactgttccccaaaggccaaagcctgaagatattgccccttataatccaatcagccttatattttaataagtcctgaatcaacctgactacggatatatggggccaccagggtgcatgggtgcatgtctgctcagcctagccctggaagtgagcactgccggccacagatcctgggaaaggtggtagtaacccagaagatgtagccttgaagggaggatacctatcaaaatgccaaagctgcagggacacgaagacggttgaaaattcaacctgtgtatactagatccttccagtttgatggtttggtcattcttcttcatgattataccatggagaattttctgtgacaagggtggtcatggaagtaagtgagtgatcccctggtttctcattccttaaagcagtggttcgcaaagtatggcacaagaccagcagcatcagcagcctttgggaacttgttagaaacgaaaattctcaatcccatcccagatctgctgaatcagaaactctaatgagaggacccggcaatccacgttttaataagccctcctggtgattctgatgcacactaaattcaactgttttaaagggaaagccctttatagtattggagttcccacactgagaggctttggggcccaaaataagaaggttctaggttgtcattcagactttaacattaatttcaaagtcacctttctcatgcttccttgtgtttctgtttttccatttatgattttaacaaagaaaggtatgtgtgcttttgggtggaagttaggagaatgtttgtgtctttcctagttgaatacaaccttcagagaaaaaccttatgccttggaaattactacctggcacacaaaggggcttcaacaaggaaaagcagttggaggtctcttccagattgctcttctgccgaattatttgtatctattccgagctgattatgtaataggatggaaaaagtaaaaaaaaaaaaaaaaatctaatttgtatttccatgacaacgtgttctcccagcaacatccctctcctttatttgagttataaagggcactgctgggcctgagaaccaggccagaacctccttctgtatggcagctaacagtgtagggctccagtatcccaggaaggccccttatccacactccactcagctcataggagagtcttgcataatgaagacacagacctgggcacttcagtccttgtgctcctcctctcttttccccacagcaggacctggatacagaagtactcagccaaggtgacagaataaaatcctttttttgttgttttctgtttgtttgtttgttttggagaaggagtctcgctttgtcacccaggctggtgtgcagtggcacgatctcggctcactgcaacctccgcctcccaggttcaagcgattctcctgtctcagcctcctgagtagctgggattacagacgtgcgccatcacgcccagctaatttttgtatttttagtagatacggagttttgccttgttggccaggctgtgctggagctcctgacctcaggtgattcacctgccacagcctcccaaagtgctgggattacaggcgtgagccacagcaccctgccaaataagatcctttttaaaaaatatctgaaaaaagcttcatatctttacaaactcataaaatagctgattgggccatggaggagatgaggctgtttagaactggttttgtttcaagtttgtcaattttccctgtatgagaacttgggtaaagcacaaagaaacatacagtgctagtaacaggtctcctgcgccctggaactaagtgtttggaggaaggactaaaccccgggggaggtgagtataaaataattccactaagatcacctcctcagtccccagaaggctgatggtggatcctctggccatctcctgtggggtcttactgctcctctgccatttctctatgcctgaagacacgaagatgatatcaaggcagagctaccatatcgcagccagtctctaggctactgctgtgcagtggctcccactttctaatgcttttttgtttttgctttttctaacaaaacaatcttttttcaaaatgaattccaacccctgctagcttccttccccgcctccatactgttttaggcagcaccgtttatgtgacagagtccgtgtttctcaaatgcatggtgttcctcaggtggagagtgggcagaagtttttgcaacactttttttttaagttattgggtgcaaaatcccaaaccaggatatgtgtatgtctgtgtgtttatgttttttatttgaccctcccctctttcaacctacccccttttatatctaatgtagaaaaagcgaaattgaatctggaaagcaaactgttgtatatagttgcggtaacaatcatgaagagagagccgggctgtcccctcagtaattcattttaaataacaaattatttaaaaataaaattcatgccagagccagctgaagaggccttccttcatcaccactgaggccacccccaatctgggccctctgtccatctggcatgtctcctcccagcaagattcatctgttcaatgccatttgcgtttcaataaagttatctcctgtactgtccactg

SEQ ID NO: 299127 - protein, 1817 aa, Artificial Sequence
  derived and/or modified sequence
MLGSSVKSVQPEVELSSGGGDEGADEPRGAGRKAAAADGRGMLPKRAKAPGGGGGMAKASAAELKVFKSGSVDSRVPGGPPASNLRKQKSLTNLSFLTDSEKKLQLYEPEWSDDMAKAPKGLGKVGSKGREAPLMSKTLSKSEHSLFQAKGSPAGGAKTPLAPLAPNLGKPSRIPRGPYAEVKPLSKAPEAAVSEDGKSDDELLSSKAKAQKSSGPVPSAKGQEERAFLKVDPELVVTVLGDLEQLLFSQMLDPESQRKRTVQNVLDLRQNLEETMSSLRGSQVTHSSLEMTCYDSDDANPRSVSSLSNRSSPLSWRYGQSSPRLQAGDAPSVGGSCRSEGTPAWYMHGERAHYSHTMPMRSPSKLSHISRLELVESLDSDEVDLKSGYMSDSDLMGKTMTEDDDITTGWDESSSISSGLSDASDNLSSEEFNASSSLNSLPSTPTASRRNSTIVLRTDSEKRSLAESGLSWFSESEEKAPKKLEYDSGSLKMEPGTSKWRRERPESCDDSSKGGELKKPISLGHPGSLKKGKTPPVAVTSPITHTAQSALKVAGKPEGKATDKGKLAVKNTGLQRSSSDAGRDRLSDAKKPPSGIARPSTSGSFGYKKPPPATGTATVMQTGGSATLSKIQKSSGIPVKPVNGRKTSLDVSNSAEPGFLAPGARSNIQYRSLPRPAKSSSMSVTGGRGGPRPVSSSIDPSLLSTKQGGLTPSRLKEPTKVASGRTTPAPVNQTDREKEKAKAKAVALDSDNISLKSIGSPESTPKNQASHPTATKLAELPPTPLRATAKSFVKPPSLANLDKVNSNSLDLPSSSDTTHASKVPDLHATSSASGGPLPSCFTPSPAPILNINSASFSQGLELMSGFSVPKETRMYPKLSGLHRSMESLQMPMSLPSAFPSSTPVPTPPAPPAAPTEEETEELTWSGSPRAGQLDSNQRDRNTLPKKGLRYQLQSQEETKERRHSHTIGGLPESDDQSELPSPPALPMSLSAKGQLTNIVHGSVLSLASSASSTYSSAEERMQSEQIRKLRRELESSQEKVATLTSQLSANANLVAAFEQSLVNMTSRLRHLAETAEEKDTELLDLRETIDFLKKKNSEAQAVIQGALNASETTPKELRIKRQNSSDSISSLNSITSHSSIGSSKDADAKKKKKKSWLRSSFNKAFSIKKGPKSASSYSDIEEIATPDSSAPSSPKLQHGSTETASPSIKSSTSSSVGTDVTEGPAHPAPHTRLFHANEEEEPEKKEVSELRSELWEKEMKLTDIRLEALNSAHQLDQLRETMHNMQLEVDLLKAENDRLKVAPGPSSGSTPGQVPGSSALSSPRRSLGLALTHSFGPSLADTDLSPMDGISTCGPKEEVTLRVVVRMPPQHIIKGDLKQQEFFLGCSKVSGKVDWKMLDEAVFQVFKDYISKMDPASTLGLSTESIHGYSISHVKRVLDAEPPEMPPCRRGVNNISVSLKGLKEKCVDSLVFETLIPKPMMQHYISLLLKHRRLVLSGPSGTGKTYLTNRLAEYLVERSGREVTEGIVSTFNMHQQSCKDLQLYLSNLANQIDRETGIGDVPLVILLDDLSEAGSISELVNGALTCKYHKCPYIIGTTNQPVKMTPNHGLHLSFRMLTFSNNVEPANGFLVRYLRRKLVESDSDINANKEELLRVLDWVPKLWYHLHTFLEKHSTSDFLIGPCFFLSCPIGIEDFRTWFIDLWNNSIIPYLQEGAKDGIKVHGQKAAWEDPVEWVRDTLPWPSAQQDQSKLYHLPPPTVGPHSIASPPEDRTVKDSTPSSLDSDPLMAMLLKLQEAANYIESPDRETILDPNLQATL

SEQ ID NO: 299128 - DNA, 5454 bp, Artificial Sequence
  derived and/or modified sequence
atgttgggatctagtgtcaaaagtgtccagcctgaggtggaactgtcttcagggggcggtgatgagggagcggacgagcctcggggagctggcaggaaagccgctgcggcagatggtcgtggtatgcttccaaagagggccaaggcacccgggggagggggaggtatggcgaaagcgtctgctgcagagttgaaggtgtttaagagcggcagcgtggacagcagggtgcctgggggtccaccagcaagtaatctgagaaagcagaaatccctgacaaatctaagttttctcacagacagtgaaaagaaattacagctatatgaacccgagtggagcgatgacatggccaaagctccaaagggacttggcaaagttggctcaaagggccgggaagcccctcttatgagcaagactcttagtaagtccgagcatagcctgttccaggccaagggatcccccgctggaggcgccaaaacccctctcgcccccctggcacccaacctgggtaagccttcccggataccgcggggaccttacgcggaggttaaacctttatcaaaggcgcctgaagccgctgtaagtgaggatggtaaatctgacgacgaattactcagctccaaagcaaaggcccagaagagttctggaccagtgccttccgcgaagggccaggaggagagggcattcctcaaagtagaccccgagctggtggtcaccgtgctgggtgatctcgagcagttgttgttttctcagatgttggacccagagtcccagcggaaaagaactgtgcagaatgttctcgatctgagacagaacctcgaggagacaatgtcatccttgagagggtcccaggtaactcattccagcttggagatgacatgctacgactctgatgacgcaaatccgaggagcgtgtcgagcctgtccaaccggtcttcaccactctcttggcgctacggacagtcaagtcccaggctccaggctggggatgctccatctgtcggcggaagttgccgttccgaagggactcccgcgtggtatatgcatggcgaacgtgcgcattactcccataccatgcccatgcgaagcccatctaagctttcgcacataagccggctagagctggtggagtctctggattcagacgaagtagatctgaaatccgggtacatgagtgattccgatcttatgggcaagaccatgaccgaagacgatgatattacaaccggttgggacgagagtagctctatttctagcggactgagcgacgcatcagataaccttagcagtgaagagttcaacgcctcctcatctctaaacagtcttcctagcacacctaccgcctctagaagaaattccaccatcgtcctgcggactgactccgaaaagcgctccctggccgagtcaggcctgtcgtggttttccgagagcgaggagaaagctccaaaaaaactggagtacgacagtggcagccttaagatggaacctggaacgagcaagtggagaagagaacgccctgaatcctgtgatgactcctcaaagggcggggaattaaagaagccaatatctctgggacatccaggcagcttgaagaagggcaagaccccacccgtggccgttacatccccaattacacataccgcccagtccgctctcaaggtagccggaaagcctgaggggaaggccaccgataagggcaagctcgcagttaaaaacaccggcctccagcgcagttcttcagatgctggccgagatcgactcagtgatgcgaagaaacccccctcagggatcgcccgaccaagtacatctggatcattcggctataagaagccgcctccagcaactggaaccgctaccgtcatgcaaaccggtggatccgcgactttgtccaagatccagaaatcttccggcatccctgtcaaaccggtcaacggccggaagacttcattagacgtgtctaattcggccgagccgggattcctcgccccaggcgcacggtccaacatccagtataggtctctgccgagacctgccaagagctcctcgatgagtgtcacaggcggacggggtggacctcgacccgtctcgtcttccatagaccctagtctgctctctaccaagcaggggggactgaccccaagtcgtctaaaggagcccacaaaggtggcctctggccggactacccctgcccctgtcaaccaaactgaccgcgagaaggaaaaagcgaaagctaaagcagtcgcgctggactcggataacatctccttaaaaagtatcggatctcccgaatccaccccgaaaaatcaggcaagtcacccaacagctaccaagctcgccgagctccccccaactccgctgagggctaccgcaaagtcatttgtgaagccaccaagtctcgccaacctggacaaggtgaattctaacagtctagatttgccctcctcttcagatacaacccacgctagcaaagtgcccgacctccatgcaacttcaagcgccagcggggggccactacctagctgctttacaccaagcccagcacccatcctcaatattaacagcgcctcattttcgcagggattggaattaatgtccggattcagcgtcccaaaggagactcgcatgtaccctaaactctcgggcctgcataggtcaatggaaagtctgcagatgccaatgtctttgccttctgcattcccctcgtctacccccgtgcctactccgcccgcccctccagctgccccaacggaggaggagacagaggaactgacctggagtggatctccccgggcgggccaactggactcaaaccagagggatagaaacacgctgccaaaaaagggcctccgatatcagctgcagtctcaggaggagaccaaggaaagaaggcatagtcacacaatcggtggtttaccagagtcagacgaccagagtgagctcccaagtcctccagccttaccaatgagcctcagcgcgaagggacagctgaccaatattgtccatggtagcgtcctctcgttagcctctagcgcatcaagcacttattcctcagcagaggaacgcatgcagtccgagcagattcgaaaactgcggcgggagctggagagcagtcaggagaaggtggctaccctgacatcccagctcagcgccaacgccaacttagtggcagcttttgagcaaagccttgtcaatatgactagtcgtctccggcatctagctgagacagcggaagaaaaggacaccgaattgctggatctcagagagacgatcgatttcctgaagaaaaaaaactccgaagcccaggccgtgatccagggggctctcaatgcttccgagactacccctaaagaactgaggatcaagcgccagaattccagcgattcaatttccagtctgaatagcataacgtctcattcctctattgggtcttccaaagacgcagacgcgaagaaaaagaagaaaaagtcttggctgagatcctccttcaacaaggcatttagcattaagaagggccccaagagtgcttcaagctattccgacatcgaggaaattgcaacccccgactcgtctgctccatcaagccccaagctgcagcacggcagtactgagactgccagtccctctatcaaatcgagcacatcttcctccgttgggacagatgtcactgagggccccgcgcaccctgccccgcacacacgcctattccatgccaacgaagaggaggaaccagagaagaaggaggtgagtgagctgcgctctgaactgtgggaaaaagagatgaaactcaccgatatccgtttggaggctctaaacagcgcccatcaacttgatcaattgagagagacaatgcataatatgcagttggaggttgaccttctcaaggccgagaatgaccgcctgaaagtggctccggggccttcttctggcagcactcccgggcaggtacctgggtcatccgccctgtccagccctcgacgctcactgggactggccctgacacactcctttggtccctcgctggccgacactgatttgtctcccatggatggaatctcgacctgtggccctaaggaggaagtgactttgagagtcgtggtgcggatgcccccgcaacatattataaagggagatttgaagcagcaggaatttttccttggttgcagcaaagtgtccggcaaagttgattggaagatgctggatgaggctgtgtttcaggtgttcaaggattatatttcaaagatggatccagcttcaactctcgggttgagcacagagtctattcatggatatagtatctcccacgtcaagcgagtgttagacgccgagccacccgaaatgcccccatgtcgacgcggggtgaacaatatctccgtctctctgaagggcttgaaggaaaagtgcgtggattcactggtgttcgaaaccttgattcccaagcccatgatgcaacattacatctccctcttattgaagcatcgccgcctggtcctgagcggcccttcgggcacaggaaaaacttatctgacgaaccggctcgctgaatacttggtagaacgttccgggagagaggtgaccgaaggtatcgtgagtactttcaacatgcaccagcagtcgtgtaaagatctccagctgtacctttctaacctggcaaaccagatcgatcgagaaaccggtatcggagatgtgcccttggtcattctgctcgacgacctgtctgaggccggatctatcagcgagctcgtaaacggggcactgacatgcaaatatcataaatgtccttacattatcggcaccaccaatcagcccgtgaaaatgaccccaaatcatggactgcatctctcgtttaggatgctgacattttctaataacgttgagccggccaacggattcctcgtgaggtacctcagacgaaaactggttgaatcagattcagatattaacgctaacaaggaagaactcttgcgcgtcctggactgggtaccaaaactttggtatcatttgcatacattcctcgaaaagcactctacttccgatttcctcatcggaccatgctttttcttgtcttgtccaattggcattgaagatttccgaacatggttcatagatttatggaacaattctataattccatatctgcaagagggtgcgaaggacggaatcaaagtccacgggcagaaagccgcatgggaggatccagtggagtgggttagggacactcttccctggccaagtgcacaacaggatcagagcaagctttaccacctccctccccccaccgtcggcccccattccattgccagccccccagaagatcggacggttaaggactccacaccaagctctctggatagcgatcccttgatggctatgttactgaagctgcaagaggctgcgaactacatcgaaagtccagacagagagaccattctggaccctaatctgcaggccactttgtag

SEQ ID NO: 299129 - DNA, 5454 bp, Artificial Sequence
  derived and/or modified sequence
atgctgggcagctctgtgaagtctgtgcagcctgaggtggagctgagcagcggcggcggagatgaaggagcagatgagcccaggggggccggcaggaaggctgctgctgctgatggccggggcatgctgcccaagagggccaaggcccctgggggcggcggcggcatggccaaggccagcgctgctgagctgaaggtgttcaagagcggctctgtggacagccgggtgcctgggggccccccagccagcaacctgaggaagcagaagagcctgaccaacctgtccttcctgacagacagcgagaagaagctgcagctgtatgagcctgagtggagcgatgacatggccaaggcccccaagggcctgggcaaggtgggcagcaagggccgggaggcccccctgatgagcaagaccctgagcaagtctgagcacagcctcttccaggccaagggcagccctgctgggggcgccaagacccccctggcccccctggcccccaacctgggcaagcccagccgcatcccccggggcccctatgcagaggtgaagcccctgagcaaggcccctgaggccgctgtgtctgaagatggcaagagtgatgatgagctgctgagcagcaaggccaaggcccagaagagcagcggccctgtgcccagcgccaagggccaggaggagcgggccttcctgaaggtggaccctgagctggtggtgacagtgctgggggacctggagcagctgctcttcagccagatgctggaccctgagagccagaggaagaggacagtgcagaatgtgctggacctgcggcagaacctggaggagaccatgagcagcctgcggggcagccaggtgacccacagcagcctggagatgacctgctatgacagtgatgatgccaaccccaggtctgtgagcagcctgagcaacagaagcagccccctgtcctggaggtatggccagagcagcccccggctgcaggccggagatgcccccagcgtgggcggcagctgccgctctgagggcaccccagcctggtacatgcacggggagcgggcccactacagccacaccatgcccatgaggagccccagcaagctgagccacatcagccggctggagctggtggagagcctggacagtgatgaggtggacctgaagagcggctacatgtctgacagcgacctgatgggcaagaccatgacagaagatgatgacatcaccaccggctgggatgagagcagcagcatcagcagcggcctgagtgatgccagtgacaacctgagcagcgaggagttcaatgccagcagcagcctgaacagcctgcccagcacccccacagccagcagaagaaacagcaccatcgtgctgaggacagacagcgagaagaggagcctggccgagagcggcctgtcctggttcagcgagagcgaggagaaggcccccaagaagctggagtatgacagcggcagcctgaagatggagcccggcaccagcaagtggaggcgggagaggcctgagagctgtgatgacagcagcaaaggaggagagctgaagaagcccatcagcctgggccaccctggcagcctgaagaagggcaagaccccacctgtggccgtgaccagccccatcacccacacagcccagagcgccctgaaggtggccggcaagccagagggcaaggccacagacaagggcaagctggccgtgaagaacacaggcctgcagaggagcagcagtgatgctggccgggaccggctgagtgatgccaagaagccacccagcggcatcgcccggcccagcaccagcggcagctttggctacaagaagcccccaccagccaccggcacagccaccgtgatgcagacaggaggcagcgccaccctgagcaagatccagaagagcagcggcatccctgtgaagcctgtgaatggaaggaagaccagcctggatgtgagcaacagcgctgagcccggcttcctggcccctggggcccggagcaacatccagtaccgcagcctgcccaggcctgccaagagcagctccatgtctgtgactggaggccggggcggccccaggcctgtgagcagcagcattgaccccagcctgctgagcaccaagcagggcggcctgacccccagccggctgaaggagcccaccaaggtggccagcggccgcaccaccccagcccctgtgaaccagacagaccgggagaaggagaaggccaaggccaaggctgtggccctggacagcgacaacatcagcctgaagagcatcggcagccctgagagcacccccaagaaccaggccagccaccccacagccaccaagctggccgagctgccccccacccccctgcgggccacagccaagagctttgtgaagccacccagcctggccaacctggacaaggtgaacagcaacagcctggacctgcccagcagcagtgacaccacccacgccagcaaggtgcctgacctgcacgccaccagcagcgccagcggcggccccctgcccagctgcttcacccccagccctgcccccatcctgaacatcaacagcgccagcttcagccagggcctggagctgatgagcggcttctctgtgcccaaggagaccaggatgtaccccaagctgagcggcctgcaccgctccatggagagcctgcagatgcccatgagcctgcccagcgccttccccagcagcacccctgtgcccaccccaccagcccccccagctgcccccacagaggaggagacagaggagctgacctggagcggcagcccccgggccggccagctggacagcaaccagagggacaggaacaccctgcccaagaagggcctgcgctaccagctgcagagccaggaggagaccaaggagaggaggcacagccacaccatcggcggcctgcctgagagtgatgaccagagcgagctgcccagccccccagccctgcccatgagcctgagcgccaagggccagctgaccaacatcgtgcacggctctgtgctgagcctggccagcagcgccagcagcacctacagcagcgctgaggagaggatgcagagcgagcagatcaggaagctgcggcgggagctggagagcagccaggagaaggtggccaccctgaccagccagctgagcgccaatgccaacctggtggccgcctttgagcagagcctggtgaacatgaccagccggctgcggcacctggccgagacagctgaggagaaggacacagagctgctggacctgcgggagaccatcgacttcctgaagaagaagaacagcgaggcccaggccgtcatccagggcgccctgaatgccagcgagaccacccccaaggagctgcgcatcaagaggcagaacagcagtgacagcatcagcagcctgaacagcatcaccagccacagcagcatcggcagcagcaaggatgctgatgccaagaagaagaagaagaagtcctggctgcggagcagcttcaacaaggccttcagcatcaagaagggccccaagagcgccagcagctacagcgacatcgaggagatcgccaccccagacagcagcgcccccagcagccccaagctgcagcacggcagcacagaaacagccagccccagcatcaagagcagcaccagcagctctgtgggcacagatgtgacagagggccctgcccacccagccccccacaccaggctcttccacgccaatgaggaggaggagcctgagaagaaggaggtgtctgagctgcggtctgagctgtgggagaaggagatgaagctgacagacatccggctggaggccctgaacagcgcccaccagctggaccagctgcgggagaccatgcacaacatgcagctggaggtggacctgctgaaggcagaaaatgaccggctgaaggtggcccctggccccagcagcggcagcaccccaggccaggtgcccggcagcagcgccctgagcagcccccggcgcagcctgggcctggccctgacccacagctttggccccagcctggccgacacagacctgagccccatggatggcatcagcacctgtggccccaaggaggaggtgaccctgcgggtggtggtgaggatgccaccccagcacatcatcaagggggacctgaagcagcaggagttcttcctgggctgcagcaaggtgtctgggaaggtggactggaagatgctggatgaagctgtgttccaggtgttcaaggactacatcagcaagatggaccctgccagcaccctgggcctgagcacagagagcatccacggctacagcatcagccacgtgaagagggtgctggatgctgagcccccagagatgccaccctgcagaagaggagtgaacaacatctctgtgtccctgaagggcctgaaggagaagtgtgtggacagcctggtgtttgagaccctcatccccaagcccatgatgcagcactacatcagcctgctgctgaagcaccggcggctggtgctgagcggccccagcggcaccgggaagacctacctgaccaaccggctggccgagtacctggtggagaggagcggccgggaggtgacagagggcatcgtgtccaccttcaacatgcaccagcagagctgcaaggacctgcagctgtacctgagcaacctggccaaccagattgaccgggagaccggcattggagatgtgcccctggtgatcctgctggatgacctgtctgaggccggcagcatcagcgagctggtgaatggagccctgacctgcaagtaccacaagtgcccctacatcatcggcaccaccaaccagcctgtgaagatgacccccaaccacggcctgcacctgtccttcaggatgctgaccttcagcaacaacgtggagcccgccaacggcttcctggtgcgctacctgcggaggaagctggtggagagtgacagcgacatcaatgccaacaaggaggagctgctgcgggtgctggactgggtgcccaagctgtggtaccacctgcacaccttcctggagaagcacagcaccagtgacttcctgattggcccctgcttcttcctgagctgccccatcggcatcgaggacttccgcacctggttcatcgacctgtggaacaacagcatcatcccctacctgcaggagggcgccaaggatggcatcaaggtgcacggccagaaggccgcctgggaggaccctgtggagtgggtgcgggacaccctgccctggcccagcgcccagcaggaccagagcaagctgtaccacctgcccccacccaccgtgggcccccacagcatcgccagccccccagaggacagaacagtgaaggacagcacccccagcagcctggacagcgaccccctgatggccatgctgctgaagctgcaggaggccgccaactacatcgagagcccagaccgggagaccatcctggaccccaacctgcaggccaccctgtag

SEQ ID NO: 299130 - DNA, 5454 bp, Artificial Sequence
  derived and/or modified sequence
atgctgggcagcagcgtgaagagcgtgcagcccgaggtggagctgtcctccggagggggagacgagggcgcagacgagccgcggggagcgggccggaaggccgcagcagccgacggccgcggaatgctgcccaagcgggccaaagcaccaggtggggggggagggatggccaaggccagcgcagctgagcttaaggtttttaagtccggaagtgtggactcccgggttccgggggggccccccgccagtaatctgagaaagcagaagtctctgaccaatctgtcattcctaacggattcagagaaaaagttgcaactgtacgaaccagagtggagcgatgacatggctaaggcgcccaaaggcctcggcaaggtgggctctaaaggaagagaggctcccctgatgagcaaaacactctcaaagagtgaacattccctgtttcaagccaaaggaagccccgctggcggagcaaagacgcccctcgctcccttggccccgaaccttggaaagccctcgcgcattcctaggggaccctatgccgaggttaaaccactgagcaaggctcccgaggccgctgtcagcgaggacggcaaatccgacgacgagctgctctcaagtaaggccaaagcccagaagtcaagtggaccagtgcctagtgcaaaggggcaggaggaaagagccttcctcaaggttgacccggagctcgtggtaacagtattaggggatctggagcagcttctgtttagccagatgttagaccccgaaagccagcgcaaacgcacagttcagaacgtcttggacctcaggcaaaacttggaggagacaatgtcctccttaaggggctcccaagtgacacatagctcactcgaaatgacgtgctatgatagtgacgacgccaacccccgaagtgtgtctagcctctccaaccgaagctcacccctctcctggcggtatggccagagtagcccacggcttcaggctggggatgccccatctgtgggcggctcttgcaggtccgagggtacacccgcgtggtacatgcatggagagagagctcactactcccatacgatgccgatgagaagccccagtaagctgtctcatatctcaaggttagagctggtcgagtcccttgatagtgatgaggtcgacctaaaatcgggatatatgtctgattctgatcttatggggaaaactatgaccgaagacgacgacatcactactggctgggacgaatcttcaagcatttcttccggcctgtcggatgccagcgacaacttgagcagtgaagaatttaacgccagcagcagcctgaatagccttcctagcacacccactgcgtcgagacgcaacagcactattgtgctccgcacagacagcgagaagaggtcactggcagaatctggcctgtcctggtttagtgagtccgaagagaaagctccaaagaagctggaatatgatagtggctctctaaagatggagccgggtacctccaagtggcgccgagagaggcctgagtcatgcgacgacagttcaaaagggggtgagttgaagaagcctatcagcttgggacaccccggctccctgaagaagggtaagaccccacctgtggccgttacaagccctattacacacactgcccagtccgctctgaaggtggctggcaagcctgagggcaaagctactgataaaggaaaacttgcggtgaaaaataccggactgcagcggtcctccagcgatgctggcagagaccgactatctgacgccaaaaagcccccatccggcatcgcccggcctagtacatcaggatccttcgggtacaagaaaccaccacctgccaccggaaccgccaccgttatgcagaccggcggcagtgcaaccctctcaaaaatacagaagtcctctggcattcccgtcaagcctgtcaacggccgcaaaacatccctggacgtttcaaactctgcagaacctgggtttctggctcctggcgccagatctaacatccagtataggtctctgccacggcccgctaagtcttcttccatgtctgttaccggcggccgtggtggcccccgccctgtgagtagttcaattgacccatccttgctctcaactaaacagggcggactgactccttctagacttaaagagccaactaaagtggcaagcggccgcacaacacccgcgcctgtgaaccagacggatagggagaaggagaaagctaaagccaaagccgtcgctctcgattctgataatataagcctaaaatctatcggcagtcccgagtctactcctaagaatcaggcatcccacccaactgccacgaagttggcagagctgccaccaacgcccctccgcgctaccgccaagtcgttcgtgaaacctcccagcctggccaatctggacaaagtgaattccaattctttggaccttccatcatcatccgacaccacacacgcatctaaagtgccagacctccacgccacgtcaagcgcgagcgggggcccacttccatcctgttttactccttcacctgcgccaatcttgaatatcaacagtgcttcgttcagccagggcctcgaactgatgagtggattttccgttcccaaggagacccgaatgtatccaaagctttcaggcctacatagaagtatggagagcttacaaatgcccatgtctctcccaagtgcattcccatcgagcactcccgtacctactccaccggccccacccgccgcaccgactgaggaagaaacagaagagctcacctggtcaggcagtcccagggcagggcagctggattctaaccaaagggaccgcaatactctgccaaagaaaggcctgcgctaccaactccagtcacaggaggagaccaaagaaagaaggcatagccacaccatcggaggcctgccagagtccgacgatcagtcagaacttccttcacctccggccttgccaatgtcactctcagccaaagggcagcttacgaacatagtgcacggcagcgtgctgtccttggcatcctcagcctctagtacatattcctctgctgaagagagaatgcagagcgagcaaattcgcaaacttcgacgcgaactcgagtccagccaggaaaaagttgctacactgacaagccagctctccgctaatgccaacctagtggccgctttcgagcagtccctggttaatatgacaagcagactcagacatctggctgaaactgctgaagaaaaagacactgagctgttggatttacgcgagactatcgattttctgaagaagaagaattctgaagctcaggcagtcatccagggcgcgctaaatgcttcagagaccacccccaaggaactcagaatcaagcggcaaaactcctctgactctatcagctctcttaatagtataacatctcactcgagcatagggtcaagcaaagatgccgatgcaaaaaagaaaaagaaaaagtcatggttacggagttcatttaacaaggctttttccatcaagaagggcccgaaatctgcatcctcctactctgatatagaagaaatcgctaccccagattcatcagcaccaagcagccccaagctgcagcatggatcgacggaaacagctagtccaagcattaaaagttccacatcctcttcagttggaaccgatgtgacagagggaccggcccatccggccccgcacaccagactgttccacgctaatgaagaggaggagcccgagaaaaaagaggtgagcgagctgaggtctgagctctgggaaaaggagatgaagctcacagacattcgtctcgaggccctgaactcggcccaccagctagatcagttgcgcgaaacaatgcacaacatgcaactcgaagtggatctgctgaaggccgagaatgacaggcttaaagtggccccaggcccatcctccggatctacccccggccaagtacccggcagcagcgctttgtcttctccacgacgatccctcggcctcgcactgacacacagcttcggaccctccctggccgacaccgatttgtcaccgatggacggtataagtacatgtggtccgaaggaggaggtgacacttcgggtggtcgtgaggatgccaccccagcacatcattaagggtgatctgaagcagcaggaatttttcttgggttgtagtaaggtttctggtaaggtggattggaagatgctggacgaggccgttttccaggtgtttaaggactacatcagtaaaatggacccagccagcacccttgggctcagcacagaatcaatccacgggtactctatctcccacgttaaaagggtcctggatgcagaacccccagaaatgcccccttgcaggagaggggtcaacaacatcagcgtgagtcttaagggattgaaagaaaagtgtgtcgactcactcgttttcgagacgctgattcccaagccaatgatgcagcactacatctccttgctgctgaagcaccgaaggcttgttttatcaggcccctcggggacaggtaaaacatacttgaccaatagactggcagaatacctagtagagaggagcggtagagaagtgaccgagggcatcgtgagtacatttaatatgcatcaacaaagctgcaaggatctgcaactctatttgtctaacctcgccaaccagatcgatcgcgagaccggtataggagatgtgcctttggtcatactgcttgacgatttgtccgaagcaggctcaatcagcgagttggtgaatggagccttgacttgtaagtatcataaatgcccatacattattggcacaaccaatcaaccagtgaaaatgacaccaaatcatggtcttcatctcagtttcaggatgctgacgttcagcaacaatgttgagccagcgaacggatttctggttcggtatctgagacgaaagctcgtggagagtgatagcgatatcaacgcaaacaaggaagagttacttcgcgtgctagactgggtgccaaagttatggtatcacctccacacgtttcttgagaaacactctacgtcagacttcctgattggtccctgtttctttttaagctgtcctattggcattgaggacttccgtacctggtttattgacttgtggaataacagtattattccctatctgcaggagggagccaaggacggaattaaggttcacggacagaaagctgcctgggaagacccggtggagtgggtcagggatacactgccatggccctctgctcagcaggaccagagcaagctgtatcacctcccacctccaacagtcggaccccattcaattgcctcaccaccagaagaccgtacggtgaaggactccacccccagctctctggactctgaccccctgatggccatgctgttgaaactgcaggaagctgcaaactacattgagtctcccgaccgagagacaatactggacccaaacctgcaagccacactctag

SEQ ID NO: 299131 - DNA, 12843 bp, Artificial Sequence
  derived and/or modified sequence
ggagccgcggggcttccatccttcctttgactgatttttaaattttaatttgtattttccccgccgccccgccccttttcctccgaccccgccctatcgctccccggcttccctgctctttcctttttcccggcttccttcctcgcgtttctttcccctgcgccctcggcttgcctctctccctcctccctcgctctctcccccttctctccccttcttcctcggtttcttccgtcctctctctccccctcctcctcccccgcctcctcctcctgcgctcccgccccctgccccctccccccgtgcctgcagacgcgcggatcgtccatgcgctcctcgcgggcagaatgctgggcagcagcgtcaagagcgtgcagcccgaggtggagctgagcagcggcggcggcgacgagggcgcggacgaaccgcggggcgccggcaggaaggcggcagcggcggacggcagaggcatgctgcccaagcgcgccaaggcgcccggcggcggcggcggcatggccaaggccagcgcggctgagctgaaggtcttcaagtccggcagcgtggacagccgtgtccccggcgggccgcccgcctccaacctgcgcaagcagaagtcactcaccaacctctcttttctcacggactccgagaaaaagctgcagctttatgagcccgaatggagcgacgatatggccaaggcgcccaaaggcttaggcaaggtggggtccaagggccgtgaagctccgctgatgtccaagacgctgtccaagtcggagcactcgctcttccaggccaagggcagcccggcgggcggcgccaagacccccctggctccgctcgcgcccaacctgggaaagccgagccggatccctcgaggaccctatgcggaggtcaagccgctcagcaaggcgcctgaagcggccgtgagcgaagatggcaaatcggacgacgagctgctctccagcaaggccaaggcgcaaaagagctctgggcctgtcccctctgccaagggccaggaggagcgcgccttcctcaaggtggaccccgagctggtggtgaccgtgctgggagacctggagcagctgctcttcagccagatgctggacccagagtcccagagaaagaggacagtgcagaatgtcctggatctccggcagaacctggaagagaccatgtccagcctgcgagggtcccaggtgactcacagctccctggagatgacctgctacgacagcgatgatgccaacccacgcagcgtgtccagcctctccaaccgctcgtcccctctgtcatggcgctatggccagtccagtccgcggctgcaggctggtgacgcgccctctgtgggtgggagctgccgctcggaggggacgcccgcctggtacatgcacggcgaacgggcccactactcccacaccatgcccatgcgcagccccagcaagctcagccatatctcccgcctggagctggtcgaatccctggactcggatgaggtggacctcaagtccggctacatgagcgacagtgacctcatgggcaagaccatgacggaggatgatgacatcactaccggctgggatgaaagcagctccatcagtagtggactcagcgatgcctcagacaatctcagttcagaagaattcaatgccagctcctcactcaactccctcccaagtactcccactgcttctcgcaggaactcaacaatagtgctacgcacagactcagagaagcgctcactggcagaaagtgggctgagctggtttagtgaatcagaggagaaagcccctaaaaaactggagtacgacagtggtagcctgaagatggaacctgggacttctaagtggcggagggagcggcctgagagctgtgatgattcatccaagggtggagaactgaaaaagcccatcagcctgggccaccctggttccctgaagaagggcaagaccccacctgtggctgtaacttcccccatcactcacacagcccagagtgccctcaaagtcgcaggcaaacctgagggcaaagctacagacaagggtaagcttgcagtgaagaatactgggctccaacgctcctcctctgatgctggtcgggaccgcctgagtgatgctaagaagcccccctcgggcattgctcgcccctccacttcgggatcctttggctacaagaagcctcctcctgccacaggcacagccactgtcatgcaaactggtggttcagccactctcagcaagatccagaagtcctcaggcatccctgtcaagccagtaaatgggcgcaagactagcttagatgtttccaacagtgcagagccaggattcctggctcctggagcccgttctaacatccagtaccgcagcctgccccggccagccaagtcaagttctatgagcgtgaccggcgggcggggtggacctcgccctgtgagcagcagcattgaccccagtctcctcagcaccaagcagggaggccttacgccttccagactgaaggagcctaccaaggtagccagtgggcggaccactccagcccctgtcaatcagacagatcgggaaaaggagaaggccaaagccaaggcagtggccttggactcagacaacatctccttgaagagtattggctccccagaaagtactcccaagaaccaagcaagccaccccacagccaccaagctggcagagctgccaccaacccctctcagggccacagcgaagagctttgtcaaaccaccctcactagccaatcttgacaaggtcaactccaacagtctggatctaccatcatccagtgataccacccatgcttcaaaggtcccagatctgcatgctacaagctcagcatctgggggccctctcccttcctgcttcacccccagtccggcacccatcctcaatattaactcagccagcttctcccagggcctggagctaatgagtggtttcagtgtgccaaaagagacccgcatgtaccccaaactctcaggcctgcacaggagcatggagtccctccagatgccaatgagcctccccagtgccttccccagcagtactcccgtccccaccccacctgctccccctgctgctcccacagaagaagagacggaagagctgacttggagtggaagccccagagctgggcaactggacagtaatcagcgggatcggaacactcttcccaagaaagggctcaggtaccagcttcagtcccaggaggagaccaaggagaggcgacattcccataccattggtgggctgcctgaatccgatgaccagtcagagctgccttctccccctgcacttcccatgtctctgagtgcaaagggccaacttaccaacatagttcacggctcagtgctgtccctggcctccagtgcctcctccacctactcctcagctgaggagaggatgcaatctgagcaaatccggaagcttcgtagggaactggaatcatcccaggaaaaagtggccaccttgacgtctcagctttctgccaatgctaatctggtggctgcttttgagcagagcctggtgaatatgacatcccgcctgcgacacctggcagagacggccgaggagaaggacactgagctgctggatttgcgagaaaccatagactttctgaagaaaaagaactctgaggcccaggcagtcattcagggagcccttaatgcctcagaaaccacacccaaagaacttcggatcaagagacaaaactcctcagatagcatctcaagcctcaacagcatcactagccattccagcatcggcagcagcaaggatgctgatgcgaaaaagaagaaaaaaaagagttggcttcgaagttccttcaacaaagcgttcagtataaaaaaggggcccaagtcagcttcctcatactcggatatagaggagattgctacacccgactcttcagccccctcatcccccaaactacagcatggttctacagagactgcttcaccctccatcaagtcctccacctcgtcctccgtgggcactgatgtcaccgagggccctgctcacccagccccccacactaggctgttccatgcaaatgaggaggaggagccagagaagaaggaggtatcggagctgcgctctgagctatgggagaaggaaatgaagcttacagacatccgcttggaggccctcaactctgcccaccaactggatcagcttcgggagaccatgcacaacatgcagttggaggtggacctgctgaaagcagagaatgaccgactgaaggtagccccaggcccctcatcaggctccactccagggcaggtccctggatcatctgcattatcttccccacgccgctccctaggcctggcactcacccattccttcggccccagtcttgcagacacagacctgtcacccatggatggcatcagtacttgtggtccaaaggaggaagtgaccctccgggtggtggtgaggatgcccccgcagcacatcatcaaaggggacttgaagcagcaggaattcttcctgggctgtagcaaggtcagtggaaaagttgactggaagatgctggatgaagctgttttccaagtgttcaaggactatatttctaaaatggacccagcctctaccctgggactaagcactgagtccatccatggctacagcatcagccacgtgaaacgagtgttggatgcagagccccccgagatgcctccttgccgtcgaggtgtcaataacatatcagtctccctcaaaggtctgaaggagaaatgcgtcgacagcctggtgttcgagacgctgatccccaagccgatgatgcagcactacataagcctcctgctgaagcaccggcgcctcgtcctctcgggccccagcggcacgggcaagacctacctgaccaatcgcttggccgagtacctggtggagcgctctggccgtgaggtcacagagggcatcgtcagcaccttcaacatgcaccagcagtcttgcaaggatctgcaactgtatctttccaacctagccaaccagatagaccgggaaacaggaattggggatgtgcccctggtgattctattggatgacctgagtgaagcaggctccatcagtgagttggtcaatggggccctcacctgcaagtatcataaatgtccctatattataggtaccaccaatcagcctgtaaaaatgacacccaaccatggcttgcacttgagcttcaggatgttgaccttctccaacaacgtggagccagccaatggcttcctggttcgttacctgaggaggaagctggtagagtcagacagcgacatcaatgccaacaaggaagagctgcttcgggtgctcgactgggtacccaagctgtggtatcatctccacaccttccttgagaagcacagcacctcagacttcctcatcggcccttgcttctttctgtcgtgtcccattggcattgaggacttccggacctggttcattgacctgtggaacaactctatcattccctatctacaggaaggagccaaggatgggataaaggtccatggacagaaagctgcttgggaggacccagtggaatgggtccgggacacacttccctggccatcagcccaacaagaccaatcaaagctgtaccacctgcccccacccaccgtgggccctcacagcattgcctcacctcccgaggataggacagtcaaagacagcaccccaagttctctggactcagatcctctgatggccatgctgctgaaacttcaagaagctgccaactacattgagtctccagatcgagaaaccatcctggaccccaaccttcaggcaacactttaagggttcggcaatcactgtcacccccggacagcagaacgctggcatcagctatcttagctcctcctctcccctctcctctttcagagcactggctctccagccccaggaggagaacaggagggaggaggagatgaaagaggagggacaggttcttggtgctgtacctttgagaacttcctaggaaggaatggtggggtggcgtttgggaacttgtgccccctaaacacatttactggcctcctctaatgactttggggaaaagatgattctgggtctttcccttgacttcttgtttcaattacaaactcctgggctttctggggaggggttcagaaaacatcaaaacactgcagcagttcctaaatgattctcacaagcaaccctgagagagacagtcttgtgagggagatctgggggaggcaggaagctcctcagattttctcacagacccttcccaattccatcaccactgccaacaactcctcccccagagatctggctggagcccagaaaaagaagcatgtggtttaaaaaatgtttaaatcaatctgtaaaaggtaaaaatgaaaaacaaaaacaagcaaacaaacaaaaaacaatggaaaagatgaagctggagagagaggaaccagttgccaaggtagagagctgcccgctcctgccctctggatgacataggggacatcaacaagacggctgccaacctgagaagtcaccaaaccacaaaaataaccttacagccttcagggaaagactaccagctctgtctttctaccctctaatttaacaatgcataagagtcaataaaccctacttttttatttttggtttttattttgttttcatttttttctcccatttgcctatttatttttttgtttcccttttttttttctttttccgtttttccatttcctcacatgtccacgagatgcttgggttgcttttccaggggctagtttggcttttccaagtgggttttctttggagaatctgatgccatgcaattggcatgacacctgccatgccactatctttggcatccatggggcttatatgagacatgaagcattggctcagaagtagagggagaagaggaacccagttcccttgacttcccttttgagagcacacgttctgctgggtagctcaattgccagcctctgtcatgagaaggtatagccccatcttgatagaagagttactccgagctttatcatggaccagaggaaaaccagaaaactgaaaacattcctctgtcttgtggccagtttggcctttcactgcactattctgatggtgcctgactgaatccaaatatcctagctggctcttactatttttcacaaatgagtattcacatataagagatgaacatccatgtgagatcatcccaatcagaatataagactcaaggagtttgacttggtggccaatacctgccttccaaagagatcctacctttgcagatttgctcctttcccattgccttgaaggtctggcaatccctgttctttcatttgacaagtacttactgagtactcactatatacaaatcattaggttaaaacagacacacacacacacacacacacacacacacacacacacacacacacaagacctgggcccttaagtttacagtccagcaggaaatgttaacctccattcagctacgcccccttgttatctagaccttcgggatcatctaagaaatgtagctgaaacccaaggagccagctagaaagaagcttttgattagatgtacaatacattgggggcagaagatctgggatcaattaagatggagcctgaaggactatggaatcttgcttgtcaggaatgggcaagtctacttcctgccatttctgaaagccccgcgggaccagcttctaggctgagctgcctagtaggctgaagcttcaggactctgcaggtcaaggatatgtgatgagcaccggcctaagtgtttgctcttcagattcctaagtagcacaagactttatcagaatctataggcataccaacctggatcactcttccacccaaccgaggagtagatgcatctgaatcttcatatcggtatattaagtccaaaagatggtccgggctgcccctcacaaaagcttctgcatccacgtggtaagctcccatggatgacagggttctgtatgatggagactattattgctattgctgctaattccatgagctgtgaagatccctaaccaactcagctgtaacatatgcaattctgtggtgggaagaggctgtgtgtccaaggatggtgctgaaatcactgccttaaggtctctgctgtgcagaatgaggaggcccccgagctggctgttctaacttagaaggaagagaagactggatgggcctgcttgggatctaggcctcttctaaaccctatcctaagctccagttccatggcaaggctcagacttttaatgccatcttaatctgatggttgagcgcttcactctattttctggtgctgcccagccagtgccttctgccatggatgttactggctacttgagaaaaaggagaggggagaaccccttctttcattccaactgcctccgaccccaaagggattcttggctctctggtaaccatggataccaccatgaattttatttggatcctcagcaggttgattctggaggcctcatgctatgactttttatttctcttcctgggatccaccaccctctactctcagctgactgctgcatttaggccaggtctccaattgctttcctccagaaagtgtgttcccgtctagtgaggtagtattgaagcctcggctttccctctggagcctgggaccctgtttacagttgcacatctgggcccctcactgtggggattgatcattctcatgaaggaatcacagttatatggcaactgcagaaggctgagcctcctcatggtgctataaccccttgggacactcatccagacttctctgaagcagaaaacctgagctccccactcactgccctagaatttatggcaaggagcaaatctacagcattctctcccacctacgtcctgcttcttggttgagactactgggatccttcagaaaagaaacactgggtcccatagctaaattctcaaccgccaggcaccttcagaagaatccagcctaatactggaatttgtgctattatcttcctctccagccccccaactccatccctcaccacagttgtctaggaaatgacatgaattcaatatctaatgtcaaccaatggggagagccacaactccaggagaggttcctgagctgagtcccttaatttctggatgaagaagaccaacaagttttgtccaatgtatttgtttctcagaccttgcctaggcactaaaaataaaatactaggtcattggaggctaatgtgggacctgatgtctgcgtgtgtgtgtgtgtgtgtgtgtgtgtgtgtctccctctctcacacacacaagagcagtttgctgttgctgtttcctaccttctgaggcttcaaagtattttttaaaatctatgctttgtggcagctctacggtgcttatctctgtctttgtgtcaatccttaagtacccatgtctttttcatgtctaaccattgggaaggtagaggctggcagggaagacaaatctgctacaagtccatgggaagaccctacaatgaaatgttcattggttggtatactgttttagtcttgaattgccaactttccaactgatctatccatattccttaagtactaaagacaaaatagagggcttctttttctctcttaatgtcttgccttctggttttcctggtttgcaagactaagtgtacctaatctcaccatctcttcacttctagctctctgaaacaagggtcacactactcagagggataaccccttacagtggtctgaggagtaactatttcctaaagtattctaaaagagtaggaagagagaaatggtagcctgctgcttctcacagacacctcacatcctcacttgggatggcatccacatagaaaccctgcatttaggtaaaatttgcctgactgaaggggactcagtcctccaaatcaaggtcaagaagatatctgcatgagaccttaagaactctttattgccattatttggagagggcgggggaattgtcctaatcacacatttaacacagggaataagtgctgaagtgacccagatcaccaagcgcagttcctcatcatactttatttttgctttccttattccttggcactgactaagctaaagttaagaagccgacttcataagccaacccctgtgatgggatggaaaaatgggcttttgcagagggtttattaatagagatggatatactactcacaagttctggctcatggctccactgagaaggccatagtaataaaatgatcttatgaacactgttccccaaaggccaaagcctgaagatattgccccttataatccaatcagccttatattttaataagtcctgaatcaacctgactacggatatatggggccaccagggtgcatgggtgcatgtctgctcagcctagccctggaagtgagcactgccggccacagatcctgggaaaggtggtagtaacccagaagatgtagccttgaagggaggatacctatcaaaatgccaaagctgcagggacacgaagacggttgaaaattcaacctgtgtatactagatccttccagtttgatggtttggtcattcttcttcatgattataccatggagaattttctgtgacaagggtggtcatggaagtaagtgagtgatcccctggtttctcattccttaaagcagtggttcgcaaagtatggcacaagaccagcagcatcagcagcctttgggaacttgttagaaacgaaaattctcaatcccatcccagatctgctgaatcagaaactctaatgagaggacccggcaatccacgttttaataagccctcctggtgattctgatgcacactaaattcaactgttttaaagggaaagccctttatagtattggagttcccacactgagaggctttggggcccaaaataagaaggttctaggttgtcattcagactttaacattaatttcaaagtcacctttctcatgcttccttgtgtttctgtttttccatttatgattttaacaaagaaaggtatgtgtgcttttgggtggaagttaggagaatgtttgtgtctttcctagttgaatacaaccttcagagaaaaaccttatgccttggaaattactacctggcacacaaaggggcttcaacaaggaaaagcagttggaggtctcttccagattgctcttctgccgaattatttgtatctattccgagctgattatgtaataggatggaaaaagtaaaaaaaaaaaaaaaaatctaatttgtatttccatgacaacgtgttctcccagcaacatccctctcctttatttgagttataaagggcactgctgggcctgagaaccaggccagaacctccttctgtatggcagctaacagtgtagggctccagtatcccaggaaggccccttatccacactccactcagctcataggagagtcttgcataatgaagacacagacctgggcacttcagtccttgtgctcctcctctcttttccccacagcaggacctggatacagaagtactcagccaaggtgacagaataaaatcctttttttgttgttttctgtttgtttgtttgttttggagaaggagtctcgctttgtcacccaggctggtgtgcagtggcacgatctcggctcactgcaacctccgcctcccaggttcaagcgattctcctgtctcagcctcctgagtagctgggattacagacgtgcgccatcacgcccagctaatttttgtatttttagtagatacggagttttgccttgttggccaggctgtgctggagctcctgacctcaggtgattcacctgccacagcctcccaaagtgctgggattacaggcgtgagccacagcaccctgccaaataagatcctttttaaaaaatatctgaaaaaagcttcatatctttacaaactcataaaatagctgattgggccatggaggagatgaggctgtttagaactggttttgtttcaagtttgtcaattttccctgtatgagaacttgggtaaagcacaaagaaacatacagtgctagtaacaggtctcctgcgccctggaactaagtgtttggaggaaggactaaaccccgggggaggtgagtataaaataattccactaagatcacctcctcagtccccagaaggctgatggtggatcctctggccatctcctgtggggtcttactgctcctctgccatttctctatgcctgaagacacgaagatgatatcaaggcagagctaccatatcgcagccagtctctaggctactgctgtgcagtggctcccactttctaatgcttttttgtttttgctttttctaacaaaacaatcttttttcaaaatgaattccaacccctgctagcttccttccccgcctccatactgttttaggcagcaccgtttatgtgacagagtccgtgtttctcaaatgcatggtgttcctcaggtggagagtgggcagaagtttttgcaacactttttttttaagttattgggtgcaaaatcccaaaccaggatatgtgtatgtctgtgtgtttatgttttttatttgaccctcccctctttcaacctacccccttttatatctaatgtagaaaaagcgaaattgaatctggaaagcaaactgttgtatatagttgcggtaacaatcatgaagagagagccgggctgtcccctcagtaattcattttaaataacaaattatttaaaaataaaattcatgccagagccagctgaagaggccttccttcatcaccactgaggccacccccaatctgggccctctgtccatctggcatgtctcctcccagcaagattcatctgttcaatgccatttgcgtttcaataaagttatctcctgtactgtccactg

SEQ ID NO: 299132 - DNA, 5454 bp, Artificial Sequence
  derived and/or modified sequence
atgctgggctcttccgtcaaatctgttcagcctgaggtggaattgagcagcggtggaggcgatgaaggggcagatgaacccaggggcgctggaagaaaggctgcagccgcagacggacgtgggatgctcccaaagcgcgctaaggcaccaggtggtgggggaggcatggccaaggccagcgctgccgagctgaaggtgttcaaatccggaagcgtggacagtagggttcctggcggaccacccgcttctaatctcagaaaacaaaagtctctgacgaacctgtcatttctgactgatagtgagaaaaaacttcaactttatgagcccgaatggtccgacgatatggccaaggcacctaaaggcctgggcaaggtcggctccaaaggcagggaagctccacttatgtccaagacactcagcaagtctgagcattcactgtttcaagcaaagggaagtccagcagggggtgcaaagacaccactggcgccactcgcacctaacctgggaaagccatcccgaatacccagaggcccatacgcagaggtcaagcccctgtccaaagccccagaggcggctgtgagcgaggacggaaagtcagacgacgagctgctgtcttcgaaagcgaaagcccagaaatcttccggcccagttccctccgcaaagggacaagaagaaagggcctttctgaaagttgatcccgaactagtggtcactgtcctgggagaccttgaacaactgctcttcagccagatgcttgatcctgagtctcagaggaagcggactgttcagaatgtgctcgacttgagacagaatcttgaagagactatgtcttctttaagagggtcccaggtaactcactcaagcctggaaatgacctgctatgactccgacgacgcaaatccgcgttccgtcagttcactgtccaatcgctcttcacctttgtcatggaggtacggacagtcctctcctcgcctccaggcaggtgacgcaccttctgtcgggggtagttgccggtcagagggcactcccgcatggtatatgcatggagagcgggctcattattctcacaccatgcctatgagatcaccttccaaactgtcccacatttcccgattagaacttgtggagagcctggatagcgacgaagttgacttaaagtctggctacatgtctgactcggacctgatgggcaagaccatgacggaggacgacgacattactacagggtgggatgaatccagctcaatcagcagtggattgagtgacgcttccgacaacctgagctcagaagagttcaatgctagtagcagtcttaattccctgccttcgactcccacagcctcacgtagaaactcaacaatcgtgctgaggacagattcagagaagaggtcactggccgaaagcgggctgtcatggttttcagaaagcgaggagaaggccccaaagaaactggaatacgattctggctcactcaagatggaaccgggaacatcaaagtggagacgggaaaggcctgagtcttgcgatgacagcagcaaggggggagaacttaaaaaacctatctcccttggacaccctggatctctgaaaaaggggaagacaccgcctgttgctgtcactagcccaataactcataccgcacagtctgctctgaaggtcgcgggtaaacctgagggcaaggctactgataaaggcaaactggctgtgaaaaacacggggcttcaacgttccagctccgacgcaggcagagataggcttagtgatgcgaagaaacctccgagtgggatagcccgacctagtacaagcggatcttttggttacaaaaagccacctcctgcgacaggtactgcaaccgttatgcagactggaggttctgccacgttgagtaagattcagaagtcttccgggatccccgtgaagccagtgaacggacgcaaaaccagcttagatgtgagtaacagcgctgagccagggttccttgctcccggagccaggagtaacatccagtatcggagtttacccagacctgccaaatcaagtagcatgtcagttacgggcggaaggggcggacccagaccagtgtctagctcaattgacccgtctctactctctaccaagcaggggggactgaccccgagtaggctcaaggagcctacaaaagtcgcctcggggaggaccacccctgcgcctgtgaaccaaaccgaccgagaaaaggaaaaggctaaagccaaggccgttgccttagattcagataatatcagccttaaaagcattggctcgcctgagagcacacccaaaaatcaggcatcacaccccactgcaaccaagttagcggaacttccacccacgccattgagagccactgccaagagtttcgtgaagcccccatctctggcaaatctcgacaaagtgaattccaactcattggatttaccgtcttctagcgataccacacatgccagcaaagtacccgatttacatgcaacgtcatctgcttccggtggacccctgcctagttgctttacacctagccccgcaccaatacttaatatcaattccgcttccttcagtcagggtttggagctaatgtctggcttcagtgtccccaaggaaacccggatgtaccccaagttgagcggtctgcaccgcagcatggaaagcttgcagatgcccatgtcgttgccctcagcttttccgtcttctacgccagttcccactcctcctgcccctccagctgccccaactgaggaagaaactgaggagctgacttggtccggctctccacgggcaggccaactggattcaaatcagagagaccgaaacactctgccgaagaaggggctgagatatcagctccagtcccaagaggaaaccaaggaaagacgccactcccacaccattggcggtcttcctgaaagtgatgaccagagtgagctgccatcccccccagctctgcccatgtctctctctgctaagggccaattgacaaacattgttcacggctcggtgctgtcactggcttcttccgccagttctacgtatagttctgctgaagaacgaatgcagtctgagcagatcaggaaactgagacgcgagctggaatcatcacaagagaaggttgcgactttgacgtcccagctgtccgcaaacgcgaacctggtggccgcattcgaacaaagcctagttaacatgaccagccgcctgcgacacctggccgagaccgctgaggagaaagacaccgaactactggatttaagagagacgatcgacttcctgaagaagaaaaactctgaggctcaggcagtgatccaaggggcactcaatgcctccgaaactaccccaaaagaacttaggatcaagcggcagaattccagcgattccatcagttctcttaacagtatcacatctcacagctctattgggagcagtaaggacgcagatgccaagaagaaaaaaaagaaatcttggctacgcagcagttttaacaaggctttcagcattaaaaagggcccaaagagtgcttcctcatatagtgacatagaggagatcgctactccagacagttctgcccctagttcccccaagctgcaacatggcagtacagaaacagccagcccttctataaagagttctacctcctcatccgtagggaccgatgtaactgaaggaccagcacatcccgctcctcatacaaggttgttccatgccaatgaggaggaagaaccggagaagaaagaggtctctgaactaaggtcagagctgtgggagaaggaaatgaaactcacagacattcggcttgaagcgctgaattccgctcaccaattggaccagttaagagagactatgcataacatgcagctggaggtcgatttgcttaaagctgaaaatgacaggcttaaagtagccccagggcctagctccgggagcacacctggccaggtgcctggcagctctgccttgtctagtcccagacgctcactaggcctcgcactgacccacagctttggcccatcgttagctgatacagacctttcacccatggacggcatcagcacctgcggtcccaaggaggaagtgacacttagagtcgtcgtgcgcatgcccccacagcacatcattaaaggtgatttaaagcagcaggagttcttcctggggtgctccaaggtgtcaggcaaagttgattggaagatgctcgacgaagcggttttccaggtgtttaaggattacatctctaaaatggacccagcctctaccctgggcctgtccaccgagtctatccacggatactccatttctcacgtaaagcgagtgctggatgctgaacctccagagatgcccccatgccgcagaggcgtaaataacatcagcgtctccctgaagggactgaaagagaaatgcgtagactctctcgttttcgaaaccctgattccaaaaccgatgatgcagcactacatttccttactgctgaaacacaggcgcctggtgctgtctggccctagcggcaccggcaagacgtacttgaccaataggctcgcagagtacctcgtcgaacggtcagggagggaagttactgaggggattgtatctacattcaacatgcatcaacagtcttgcaaagatctgcagttgtatctaagcaacctggctaaccaaatcgatcgcgagacaggaattggtgatgttcccctggtgattctgctcgatgatctcagcgaggccggtagtatttctgaattggtcaatggagcattaacatgtaaatatcacaaatgcccatacatcatcgggactaccaatcagccagtgaagatgacacctaaccacggcttgcacctgtcctttagaatgctgacgtttagtaacaacgtggagcccgcaaatggatttctggtgaggtacttaaggagaaaattggtggaatccgattctgatattaatgccaacaaggaggagcttcttcgggttctggactgggtccccaagctgtggtatcacctccatacctttctcgagaaacactccacaagcgattttttgatcggtccctgcttttttctcagttgtcctatcggtatcgaagatttccgaacctggtttattgacctctggaacaactcaattataccgtacctacaggaaggagccaaggacggcatcaaagtacacgggcagaaggcggcatgggaagaccctgtggaatgggtgagagacactctcccctggccgagcgcacagcaggaccaatccaaactctaccacctcccaccaccaacagtggggcctcactccattgcctcccctcccgaagatcggactgttaaggattccacacctagctcgttggactctgatccacttatggctatgctgttgaaactgcaggaagcagcaaattacatcgagagtccggacagagagacgatcctcgacccaaatctgcaggccaccctgtat

SEQ ID NO: 299133 - DNA, 5454 bp, Artificial Sequence
  derived and/or modified sequence
atgctgggcagcagcgtgaagagcgtgcagcccgaggtggagctgagcagcggcggcggcgacgagggcgccgacgagcccagaggcgccggcagaaaggccgccgccgccgacggcagaggcatgctgcccaagagagccaaggcccccggcggcggcggcggcatggccaaggccagcgccgccgagctgaaggtgttcaagagcggcagcgtggacagcagagtgcccggcggcccccccgccagcaacctgagaaagcagaagagcctgaccaacctgagcttcctgaccgacagcgagaagaagctgcagctgtacgagcccgagtggagcgacgacatggccaaggcccccaagggcctgggcaaggtgggcagcaagggcagagaggcccccctgatgagcaagaccctgagcaagagcgagcacagcctgttccaggccaagggcagccccgccggcggcgccaagacccccctggcccccctggcccccaacctgggcaagcccagcagaatccccagaggcccctacgccgaggtgaagcccctgagcaaggcccccgaggccgccgtgagcgaggacggcaagagcgacgacgagctgctgagcagcaaggccaaggcccagaagagcagcggccccgtgcccagcgccaagggccaggaggagagagccttcctgaaggtggaccccgagctggtggtgaccgtgctgggcgacctggagcagctgctgttcagccagatgctggaccccgagagccagagaaagagaaccgtgcagaacgtgctggacctgagacagaacctggaggagaccatgagcagcctgagaggcagccaggtgacccacagcagcctggagatgacctgctacgacagcgacgacgccaaccccagaagcgtgagcagcctgagcaacagaagcagccccctgagctggagatacggccagagcagccccagactgcaggccggcgacgcccccagcgtgggcggcagctgcagaagcgagggcacccccgcctggtacatgcacggcgagagagcccactacagccacaccatgcccatgagaagccccagcaagctgagccacatcagcagactggagctggtggagagcctggacagcgacgaggtggacctgaagagcggctacatgagcgacagcgacctgatgggcaagaccatgaccgaggacgacgacatcaccaccggctgggacgagagcagcagcatcagcagcggcctgagcgacgccagcgacaacctgagcagcgaggagttcaacgccagcagcagcctgaacagcctgcccagcacccccaccgccagcagaagaaacagcaccatcgtgctgagaaccgacagcgagaagagaagcctggccgagagcggcctgagctggttcagcgagagcgaggagaaggcccccaagaagctggagtacgacagcggcagcctgaagatggagcccggcaccagcaagtggagaagagagagacccgagagctgcgacgacagcagcaagggcggcgagctgaagaagcccatcagcctgggccaccccggcagcctgaagaagggcaagaccccccccgtggccgtgaccagccccatcacccacaccgcccagagcgccctgaaggtggccggcaagcccgagggcaaggccaccgacaagggcaagctggccgtgaagaacaccggcctgcagagaagcagcagcgacgccggcagagacagactgagcgacgccaagaagccccccagcggcatcgccagacccagcaccagcggcagcttcggctacaagaagcccccccccgccaccggcaccgccaccgtgatgcagaccggcggcagcgccaccctgagcaagatccagaagagcagcggcatccccgtgaagcccgtgaacggcagaaagaccagcctggacgtgagcaacagcgccgagcccggcttcctggcccccggcgccagaagcaacatccagtacagaagcctgcccagacccgccaagagcagcagcatgagcgtgaccggcggcagaggcggccccagacccgtgagcagcagcatcgaccccagcctgctgagcaccaagcagggcggcctgacccccagcagactgaaggagcccaccaaggtggccagcggcagaaccacccccgcccccgtgaaccagaccgacagagagaaggagaaggccaaggccaaggccgtggccctggacagcgacaacatcagcctgaagagcatcggcagccccgagagcacccccaagaaccaggccagccaccccaccgccaccaagctggccgagctgccccccacccccctgagagccaccgccaagagcttcgtgaagccccccagcctggccaacctggacaaggtgaacagcaacagcctggacctgcccagcagcagcgacaccacccacgccagcaaggtgcccgacctgcacgccaccagcagcgccagcggcggccccctgcccagctgcttcacccccagccccgcccccatcctgaacatcaacagcgccagcttcagccagggcctggagctgatgagcggcttcagcgtgcccaaggagaccagaatgtaccccaagctgagcggcctgcacagaagcatggagagcctgcagatgcccatgagcctgcccagcgccttccccagcagcacccccgtgcccaccccccccgccccccccgccgcccccaccgaggaggagaccgaggagctgacctggagcggcagccccagagccggccagctggacagcaaccagagagacagaaacaccctgcccaagaagggcctgagataccagctgcagagccaggaggagaccaaggagagaagacacagccacaccatcggcggcctgcccgagagcgacgaccagagcgagctgcccagcccccccgccctgcccatgagcctgagcgccaagggccagctgaccaacatcgtgcacggcagcgtgctgagcctggccagcagcgccagcagcacctacagcagcgccgaggagagaatgcagagcgagcagatcagaaagctgagaagagagctggagagcagccaggagaaggtggccaccctgaccagccagctgagcgccaacgccaacctggtggccgccttcgagcagagcctggtgaacatgaccagcagactgagacacctggccgagaccgccgaggagaaggacaccgagctgctggacctgagagagaccatcgacttcctgaagaagaagaacagcgaggcccaggccgtgatccagggcgccctgaacgccagcgagaccacccccaaggagctgagaatcaagagacagaacagcagcgacagcatcagcagcctgaacagcatcaccagccacagcagcatcggcagcagcaaggacgccgacgccaagaagaagaagaagaagagctggctgagaagcagcttcaacaaggccttcagcatcaagaagggccccaagagcgccagcagctacagcgacatcgaggagatcgccacccccgacagcagcgcccccagcagccccaagctgcagcacggcagcaccgagaccgccagccccagcatcaagagcagcaccagcagcagcgtgggcaccgacgtgaccgagggccccgcccaccccgccccccacaccagactgttccacgccaacgaggaggaggagcccgagaagaaggaggtgagcgagctgagaagcgagctgtgggagaaggagatgaagctgaccgacatcagactggaggccctgaacagcgcccaccagctggaccagctgagagagaccatgcacaacatgcagctggaggtggacctgctgaaggccgagaacgacagactgaaggtggcccccggccccagcagcggcagcacccccggccaggtgcccggcagcagcgccctgagcagccccagaagaagcctgggcctggccctgacccacagcttcggccccagcctggccgacaccgacctgagccccatggacggcatcagcacctgcggccccaaggaggaggtgaccctgagagtggtggtgagaatgcccccccagcacatcatcaagggcgacctgaagcagcaggagttcttcctgggctgcagcaaggtgagcggcaaggtggactggaagatgctggacgaggccgtgttccaggtgttcaaggactacatcagcaagatggaccccgccagcaccctgggcctgagcaccgagagcatccacggctacagcatcagccacgtgaagagagtgctggacgccgagccccccgagatgcccccctgcagaagaggcgtgaacaacatcagcgtgagcctgaagggcctgaaggagaagtgcgtggacagcctggtgttcgagaccctgatccccaagcccatgatgcagcactacatcagcctgctgctgaagcacagaagactggtgctgagcggccccagcggcaccggcaagacctacctgaccaacagactggccgagtacctggtggagagaagcggcagagaggtgaccgagggcatcgtgagcaccttcaacatgcaccagcagagctgcaaggacctgcagctgtacctgagcaacctggccaaccagatcgacagagagaccggcatcggcgacgtgcccctggtgatcctgctggacgacctgagcgaggccggcagcatcagcgagctggtgaacggcgccctgacctgcaagtaccacaagtgcccctacatcatcggcaccaccaaccagcccgtgaagatgacccccaaccacggcctgcacctgagcttcagaatgctgaccttcagcaacaacgtggagcccgccaacggcttcctggtgagatacctgagaagaaagctggtggagagcgacagcgacatcaacgccaacaaggaggagctgctgagagtgctggactgggtgcccaagctgtggtaccacctgcacaccttcctggagaagcacagcaccagcgacttcctgatcggcccctgcttcttcctgagctgccccatcggcatcgaggacttcagaacctggttcatcgacctgtggaacaacagcatcatcccctacctgcaggagggcgccaaggacggcatcaaggtgcacggccagaaggccgcctgggaggaccccgtggagtgggtgagagacaccctgccctggcccagcgcccagcaggaccagagcaagctgtaccacctgcccccccccaccgtgggcccccacagcatcgccagcccccccgaggacagaaccgtgaaggacagcacccccagcagcctggacagcgaccccctgatggccatgctgctgaagctgcaggaggccgccaactacatcgagagccccgacagagagaccatcctggaccccaacctgcaggccaccctgtag

SEQ ID NO: 299134 - protein, 408 aa, Artificial Sequence
  derived and/or modified sequence
MPNLKDELHHSGWNTCSSCFGDSTKSRTKLVLPSLISSRIYVVDVGSEPRAPKLHKVIEPKDIHAKCELAFLHTSHCLASGEVMISSLGDVKGNGKGGFVLLDGETFEVKGTWERPGGAAPLGYDFWYQPRHNVMISTEWAAPNVLRDGFNPADVEAGLYGSHLYVWDWQRHEIVQTLSLKDGLIPLEIRFLHNPDAAQGFVGCALSSTIQRFYKNEGGTWSVEKVIQVPPKKVKGWLLPEMPGLITDILLSLDDRFLYFSNWLHGDLRQYDISDPQRPRLTGQLFLGGSIVKGGPVQVLEDEELKSQPEPLVVKGKRVAGGPQMIQLSLDGKRLYITTSLYSAWDKQFYPDLIREGSVMLQVDVDTVKGGLKLNPNFLVDFGKEPLGPALAHELRYPGGDCSSDIWI

SEQ ID NO: 299135 - DNA, 1752 bp, Artificial Sequence
  derived and/or modified sequence
ataaattccctcccttcgctccttccccggaacagcggcctctgacaccagcacagcaaacccgccgggatcaaagtgtaccagtcggcagcatggctacgaaatgtgggaattgtggacccggctactccacccctctggaggccatgaaaggacccagggaagagatcgtctacctgccctgcatttaccgaaacacaggcactgaggccccagattatctggccactgtggatgttgaccccaagtctccccagtattgccaggtcatccaccggctgcccatgcccaacctgaaggacgagctgcatcactcaggatggaacacctgcagcagctgcttcggtgatagcaccaagtcgcgcaccaagctggtgctgcccagtctcatctcctctcgcatctatgtggtggacgtgggctctgagccccgggccccaaagctgcacaaggtcattgagcccaaggacatccatgccaagtgcgaactggcctttctccacaccagccactgcctggccagcggggaagtgatgatcagctccctgggagacgtcaagggcaatggcaaagggggttttgtgctgctggatggggagacgttcgaggtgaaggggacatgggagagacctgggggtgctgcaccgttgggctatgacttctggtaccagcctcgacacaatgtcatgatcagcactgagtgggcagctcccaatgtcttacgagatggcttcaaccccgctgatgtggaggctggactgtacgggagccacttatatgtatgggactggcagcgccatgagattgtgcagaccctgtctctaaaagatgggcttattcccttggagatccgcttcctgcacaacccagacgctgcccaaggctttgtgggctgcgcactcagctccaccatccagcgcttctacaagaacgagggaggtacatggtcagtggagaaggtgatccaggtgccccccaagaaagtgaagggctggctgctgcccgaaatgccaggcctgatcaccgacatcctgctctccctggacgaccgcttcctctacttcagcaactggctgcatggggacctgaggcagtatgacatctctgacccacagagaccccgcctcacaggacagctcttcctcggaggcagcattgttaagggaggccctgtgcaagtgctggaggacgaggaactaaagtcccagccagagcccctagtggtcaagggaaaacgggtggctggaggccctcagatgatccagctcagcctggatgggaagcgcctctacatcaccacgtcgctgtacagtgcctgggacaagcagttttaccctgatctcatcagggaaggctctgtgatgctgcaggttgatgtagacacagtaaaaggagggctgaagttgaaccccaacttcctggtggacttcgggaaggagccccttggcccagcccttgcccatgagctccgctaccctgggggcgattgtagctctgacatctggatttgaactccaccctcatcacccacactccctattttgggccctcacttccttggggacctggcttcattctgctctctcttggcacccgacccttggcagcatgtaccacacagccaagctgagactgtggcaatgtgttgagtcatatacatttactgaccactgttgcttgttgctcactgtgctgcttttccatgagctcttggaggcaccaagaaataaactcgtaaccctgtccttcaga

SEQ ID NO: 299136 - DNA, 1928 bp, Artificial Sequence
  derived and/or modified sequence
aacagcggcctctgacaccagcacagcaaacccgccgggatcaaagtgtaccagtcggcagcatgggtcatgtgtctccagctcttcccagcacaacctcaccctcctcagggctctgagggggcggagaggacaggccagagcgatgaggctggagtggggacctaggccagccgcactgccgtggcccgctgggatgtgtgctgcagaacgtgcggagggagccttcaccctccagagcgtggcccagccaatgcgccccattgcttccacagctacgaaatgtgggaattgtggacccggctactccacccctctggaggccatgaaaggacccagggaagagatcgtctacctgccctgcatttaccgaaacacaggcactgaggccccagattatctggccactgtggatgttgaccccaagtctccccagtattgccaggtcatccaccggctgcccatgcccaacctgaaggacgagctgcatcactcaggatggaacacctgcagcagctgcttcggtgatagcaccaagtcgcgcaccaagctggtgctgcccagtctcatctcctctcgcatctatgtggtggacgtgggctctgagccccgggccccaaagctgcacaaggtcattgagcccaaggacatccatgccaagtgcgaactggcctttctccacaccagccactgcctggccagcggggaagtgatgatcagctccctgggagacgtcaagggcaatggcaaagggggttttgtgctgctggatggggagacgttcgaggtgaaggggacatgggagagacctgggggtgctgcaccgttgggctatgacttctggtaccagcctcgacacaatgtcatgatcagcactgagtgggcagctcccaatgtcttacgagatggcttcaaccccgctgatgtggaggctggactgtacgggagccacttatatgtatgggactggcagcgccatgagattgtgcagaccctgtctctaaaagatgggcttattcccttggagatccgcttcctgcacaacccagacgctgcccaaggctttgtgggctgcgcactcagctccaccatccagcgcttctacaagaacgagggaggtacatggtcagtggagaaggtgatccaggtgccccccaagaaagtgaagggctggctgctgcccgaaatgccaggcctgatcaccgacatcctgctctccctggacgaccgcttcctctacttcagcaactggctgcatggggacctgaggcagtatgacatctctgacccacagagaccccgcctcacaggacagctcttcctcggaggcagcattgttaagggaggccctgtgcaagtgctggaggacgaggaactaaagtcccagccagagcccctagtggtcaagggaaaacgggtggctggaggccctcagatgatccagctcagcctggatgggaagcgcctctacatcaccacgtcgctgtacagtgcctgggacaagcagttttaccctgatctcatcagggaaggctctgtgatgctgcaggttgatgtagacacagtaaaaggagggctgaagttgaaccccaacttcctggtggacttcgggaaggagccccttggcccagcccttgcccatgagctccgctaccctgggggcgattgtagctctgacatctggatttgaactccaccctcatcacccacactccctattttgggccctcacttccttggggacctggcttcattctgctctctcttggcacccgacccttggcagcatgtaccacacagccaagctgagactgtggcaatgtgttgagtcatatacatttactgaccactgttgcttgttgctcactgtgctgcttttccatgagctcttggaggcaccaagaaataaactcgtaaccctgtccttc

SEQ ID NO: 299137 - protein, 246 aa, Artificial Sequence
  derived and/or modified sequence
  misc_feature (1)..(1): Xaa can be any naturally occurring amino acid
XSSFTNSTWAQTQGSGWLDDLQIHGWDSDSGTAIFLKPWSKGNFSDKEVAELEEIFRVYIFGFAREVQDFAGDFQMKYPFEIQGIAGCELHSGGAIVSFLRGALGGLDFLSVKNASCVPSPEGGSRAQKFCALIIQYQGIMETVRILLYETCPRYLLGVLNAGKADLQRQVKPEAWLSSGPSPGPGRLQLVCHVSGFYPKPVWVMWMRGNPTSIGSIVLAIIVPSLLLLLCLALWYMRRRSYQNIP

SEQ ID NO: 299138 - DNA, 741 bp, Artificial Sequence
  derived and/or modified sequence
tgatcctctttcacgaacagcacttgggctcagacacaggggagtggttggctggatgacctacagatccacggttgggactcggattccgggacagcaatcttcctcaaaccgtggtcgaaaggcaacttcagcgacaaagaggtagcggaattggaagaaatttttcgagtatacatttttggcttcgctcgtgaggtgcaggactttgcaggcgattttcagatgaagtaccccttcgagatccagggaatcgccggctgtgagcttcactcagggggagccatcgtctccttccttaggggcgcccttggcggcctcgattttttatctgtgaagaacgcctcctgcgtgccttccccggagggaggcagccgggctcagaagttctgtgccctgatcatccaatatcagggcattatggagaccgtgaggattctgttatatgagacatgccctcgttaccttctgggcgtgctcaatgccggcaaagcagacctgcagcgacaggtgaagcctgaggcttggctgtcctccgggccttcccccggcccaggcaggctccagcttgtttgtcatgtgagcggattctaccccaaacccgtttgggttatgtggatgagggggaaccccacaagcattggttccattgtgctcgccatcatagttccatcccttctgctgctgctgtgtttggcactctggtacatgcgcagaaggtcctatcagaatataccttag

SEQ ID NO: 299139 - DNA, 741 bp, Artificial Sequence
  derived and/or modified sequence
tgaagcagcttcaccaacagcacctgggcccagacccagggcagcggctggctggatgacctgcagatccacggctgggacagcgacagcggcacagccatcttcctgaagccctggagcaaaggaaacttcagtgacaaggaggtggccgagctggaggagatcttccgggtgtacatctttggatttgcccgggaggtgcaggactttgctggggacttccagatgaagtacccctttgagatccagggcattgctggctgtgagctgcacagcggcggggccatcgtgtccttcctgcggggggccctgggcggcctggacttcctgtctgtgaagaatgccagctgtgtgcccagccctgagggcggcagccgggcccagaagttctgtgccctgatcatccagtaccagggcatcatggagaccgtgcgcatcctgctgtatgagacctgcccccgctacctgctgggcgtgctgaatgctgggaaggctgacctgcagaggcaggtgaagccagaggcctggctgagcagcggccccagccctggccctggccgcctgcagctggtgtgccacgtgtctggcttctaccccaagcctgtgtgggtgatgtggatgaggggcaaccccaccagcatcggcagcatcgtgctggccatcatcgtgcccagcctgctgctgctgctgtgcctggccctgtggtacatgagaagaagaagctaccagaacatcccctag

SEQ ID NO: 299140 - DNA, 741 bp, Artificial Sequence
  derived and/or modified sequence
tgaagcagcttcaccaacagcacctgggcccagacccagggcagcggctggctcgacgatttacagattcacggatgggattcagactctgggacggcaatcttcctcaaaccatggagtaagggcaatttctctgataaagaagtagccgaacttgaggagatctttcgggtttatatctttggttttgcacgggaagtccaggactttgccggagatttccagatgaagtatccttttgagatccagggaatcgcgggatgtgaattacactctggtggagcaattgtatctttcctacggggggctcttggcggcctggacttcttaagcgtcaagaacgcatcttgtgtcccgtctcctgagggagggtcacgcgcccagaaattctgtgctctgattatccagtaccagggtatcatggaaacagtgaggattctcctgtacgagacctgccctcgttatttattaggtgtgctgaacgctgggaaagcagaccttcagaggcaggtgaagcccgaagcatggctgtcttcaggtccctcccctggcccggggcgtctccagctggtgtgccacgtcagtggattttatcccaagcccgtgtgggtgatgtggatgcggggcaacccaaccagcattggaagcattgtgcttgcgataattgtgccatcgcttctgcttctactgtgcctggctctgtggtatatgaggcgcagatcctatcagaatatcccttag

SEQ ID NO: 299141 - DNA, 741 bp, Artificial Sequence
  derived and/or modified sequence
tgaagctccttcactaacagcacttgggcacagacgcagggtagcggctggcttgacgacctccaaattcacgggtgggatagcgactccggaactgcaatcttccttaaaccttggtctaaggggaacttcagcgacaaagaggtcgccgaacttgaggagatctttagggtgtacattttcggattcgccagggaggttcaggacttcgcaggggatttccagatgaagtacccttttgagattcaaggtatcgctggatgcgaactgcactccggcggagccattgtgtcctttcttaggggggcacttggcggattagattttcttagcgtcaagaatgcctcctgcgtgccctcacctgagggaggctcacgcgctcagaaattttgcgctctgattatccagtaccagggaattatggagactgtgcggatccttctgtatgaaacctgtcctagatatttgctgggggtgctgaacgcgggaaaggccgacctgcagcgccaggtgaaacctgaagcgtggctgtccagcggaccctcaccgggtccaggaagactgcagctggtgtgccacgttagcggattttatcccaagcccgtgtgggtgatgtggatgaggggcaacccaacctcaattggaagcatagtgttggctatcattgttccctctctgctgttgctcctgtgtctggcgttatggtacatgagacgacggagctaccagaacatcccctag

SEQ ID NO: 299142 - DNA, 1024 bp, Artificial Sequence
  derived and/or modified sequence
ctcgtcctttaccaatagtacctgggcacaaactcaaggctcaggctggttggatgatttgcagattcatggctgggatagcgactcaggcactgccatattcctgaagccttggtctaaaggtaactttagtgataaggaggttgctgagttagaggagatattccgagtctacatctttggattcgctcgagaagtacaagactttgccggtgatttccagatgaaatacccctttgagatccagggcatagcaggctgtgagctacattctggaggtgccatagtaagcttcctgaggggagctctaggaggattggatttcctgagtgtcaagaatgcttcatgtgtgccttccccagaaggtggcagcagggcacagaaattctgtgcactaatcatacaatatcaaggtatcatggaaactgtgagaattctcctctatgaaacctgcccccgatatctcttgggcgtcctcaatgcaggaaaagcagatctgcaaagacaagtgaagcctgaggcctggctgtccagtggccccagtcctggacctggccgtctgcagcttgtgtgccatgtctcaggattctacccaaagcccgtgtgggtgatgtggatgcggggaaaccccacctccattggctcaattgttttggcaataatagtgccttccttgctccttttgctatgccttgcattatggtatatgaggcgccggtcatatcagaatatcccatgagccatcatcatgtctcctctcccattcgcaataagtaccaagaagcccaagatatcagcccaaaagtcaatcttatcatatttcaaatgattttcaaatttgatgaaatcagagttttcatgtattttaaaataaattattatttaaacatcagcaaaaaagtacttaaaactgtaaatttattatgagactgtactaacagtgtgattcaccctgattttacacacattaaaatgttagaaaaaatgtgtctcaaaataaatgaaatataatacatatgactta

SEQ ID NO: 299143 - DNA, 741 bp, Artificial Sequence
  derived and/or modified sequence
tgaagcagcttcaccaacagcacctgggcccagacccagggcagcggctggctggacgacctgcagatccacggctgggacagcgacagcggcaccgccatcttcctgaagccctggagcaagggcaacttcagcgacaaggaggtggccgagctggaggagatcttcagagtgtacatcttcggcttcgccagagaggtgcaggacttcgccggcgacttccagatgaagtaccccttcgagatccagggcatcgccggctgcgagctgcacagcggcggcgccatcgtgagcttcctgagaggcgccctgggcggcctggacttcctgagcgtgaagaacgccagctgcgtgcccagccccgagggcggcagcagagcccagaagttctgcgccctgatcatccagtaccagggcatcatggagaccgtgagaatcctgctgtacgagacctgccccagatacctgctgggcgtgctgaacgccggcaaggccgacctgcagagacaggtgaagcccgaggcctggctgagcagcggccccagccccggccccggcagactgcagctggtgtgccacgtgagcggcttctaccccaagcccgtgtgggtgatgtggatgagaggcaaccccaccagcatcggcagcatcgtgctggccatcatcgtgcccagcctgctgctgctgctgtgcctggccctgtggtacatgagaagaagaagctaccagaacatcccctag

SEQ ID NO: 299144 - protein, 281 aa, Artificial Sequence
  derived and/or modified sequence
MLTKLQIKQMMEAATRQIEERKKQLSFISPPTPQPKTPSSSQPERLPIGNTIQPSQAATFMNDAIEKARKAAELQARIQAQLALKPGLIGNANMVGLANLHAMGIAPPKVELKDQTKPTPLILDEQGRTVDATGKEIELTHRMPTLKANIRAVKREQFKQQLKEKPSEDMESNTFFDPRVSIAPSQRQRRTFKFHDKGKFEKIAQRLRTKAQLEKLQAEISQAARKTGIHTSTRLALIAPKKELKEGDIPEIEWWDSYIIPNGFDLGKSQERRLFWNHKSC

SEQ ID NO: 299145 - DNA, 846 bp, Artificial Sequence
  derived and/or modified sequence
atgctgaccaagctgcagatcaagcagatgatggaggccgccaccagacagatcgaggagagaaagaagcagctgagcttcatcagcccccccaccccccagcccaagacccccagcagcagccagcccgagagactgcccatcggcaacaccatccagcccagccaggccgccaccttcatgaacgacgccatcgagaaggccagaaaggccgccgagctgcaggccagaatccaggcccagctggccctgaagcccggcctgatcggcaacgccaacatggtgggcctggccaacctgcacgccatgggcatcgccccccccaaggtggagctgaaggaccagaccaagcccacccccctgatcctggacgagcagggcagaaccgtggacgccaccggcaaggagatcgagctgacccacagaatgcccaccctgaaggccaacatcagagccgtgaagagagagcagttcaagcagcagctgaaggagaagcccagcgaggacatggagagcaacaccttcttcgaccccagagtgagcatcgcccccagccagagacagagaagaaccttcaagttccacgacaagggcaagttcgagaagatcgcccagagactgagaaccaaggcccagctggagaagctgcaggccgagatcagccaggccgccagaaagaccggcatccacaccagcaccagactggccctgatcgcccccaagaaggagctgaaggagggcgacatccccgagatcgagtggtgggacagctacatcatccccaacggcttcgacctgggcaagagccaggagagaagactgttctggaaccacaagagctgctag

SEQ ID NO: 299146 - DNA, 846 bp, Artificial Sequence
  derived and/or modified sequence
atgctgactaagttgcagattaaacagatgatggaagcggccacaaggcagatagaggaacggaagaaacagctgtcattcatctcaccaccaaccccacagccaaaaaccccaagtagcagtcagccagaacgcctgccaattggcaacacgatccaaccctctcaggcagcaacctttatgaacgacgcgattgagaaagctagaaaggcagccgagctgcaggcaagaatccaggcacagctcgcactcaagcctggacttatcggaaatgctaatatggtcggcctggccaatttacacgccatgggaatagcgccacctaaagttgaactgaaggatcaaaccaagcctacaccactcatccttgacgaacaaggccgcactgttgatgccaccgggaaggaaattgaattgacccatcgaatgcctactctgaaggcaaatattcgggcggttaagcgtgagcagtttaaacagcagctgaaggagaagccaagtgaggacatggagtcaaacaccttttttgaccccagagtgagcattgctcccagtcagcgccagcggaggacatttaaatttcatgacaaagggaaatttgagaaaatcgctcagcgattgcggactaaagcacagctggagaaactgcaggccgagatctcccaggccgcccgcaagacaggcatccacacgtccacgcgccttgctctgattgctcccaagaaagagctcaaagagggcgatatcccagagattgagtggtgggactcctacatcattcctaacggattcgatctgggcaagtcgcaggaacgtcggttgttctggaaccacaaaagttgctag

SEQ ID NO: 299147 - DNA, 846 bp, Artificial Sequence
  derived and/or modified sequence
atgctgaccaagctgcagatcaagcagatgatggaggccgccacccggcagatcgaggagaggaagaagcagctgtccttcatcagcccccccaccccccagcccaagacccccagcagcagccagcctgagcggctgcccatcggcaacaccatccagcccagccaggccgccaccttcatgaatgatgccatcgagaaggccaggaaggctgctgagctgcaggcccgcatccaggcccagctggccctgaagccaggcctgattggaaatgccaacatggtgggcctggccaacctgcacgccatgggcatcgccccacccaaggtggagctgaaggaccagaccaagcccacccccctcatcctggatgagcagggccgcacagtggatgccaccgggaaggagattgagctgacccacaggatgcccaccctgaaggccaacatccgggctgtgaagcgggagcagttcaagcagcagctgaaggagaagcccagcgaggacatggagagcaacaccttctttgacccccgggtgtccatcgcccccagccagaggcagaggaggaccttcaagttccatgacaagggcaagtttgagaagatcgcccagaggctgcggaccaaggcccagctggagaagctgcaggccgagatcagccaggccgccaggaagacaggcatccacaccagcacccggctggccctgattgcccccaagaaggagctgaaggagggggacatccctgagattgagtggtgggacagctacatcatccccaacggctttgacctgggcaagagccaggagcggcggctcttctggaaccacaagagctgctag

SEQ ID NO: 299148 - DNA, 846 bp, Artificial Sequence
  derived and/or modified sequence
atgctgaccaagctgcagatcaagcagatgatggaggccgccacccgtcagatcgaagagcgtaaaaaacagcttagttttattagtcccccaactccccagcctaaaactcctagcagctcacagcccgagagactgccaataggtaatacaattcagccatcacaggccgcaacctttatgaatgacgccatcgagaaggccagaaaggccgctgaactgcaggctcgcatccaggcccagctggccctaaaacccggcctgatcggtaacgctaacatggtgggcctcgcgaatctccatgccatggggatcgccccccccaaagtggagttaaaagatcagacaaagccaacgcctctgatacttgacgagcagggcagaacggtggatgccacaggtaaggagatcgaactgacccatcggatgccgaccctgaaggccaatatccgggctgtaaaacgggagcagttcaaacagcagctcaaggaaaaacccagcgaggacatggagagcaatactttctttgacccgcgggtgagcatcgccccgtctcagaggcagcgtagaaccttcaagttccatgataagggcaagtttgaaaagattgcccagcggttgaggactaaagcacaactggaaaagttgcaagcggaaatctctcaggcagctagaaaaaccggcattcacaccagtaccaggctcgccctaatcgccccaaagaaagagctcaaggagggtgatattcctgagatagaatggtgggattcctacatcatcccaaacggcttcgatctggggaaatcacaggagaggcgcttattttggaatcacaagtcctgttag

SEQ ID NO: 299149 - DNA, 846 bp, Artificial Sequence
  derived and/or modified sequence
atgctgacaaagctccaaatcaagcagatgatggaggcggctacccgacagatagaagaacgtaagaaacaacttagctttatttcccccccaactccccagcccaagacgccttcttcttcccagccggaacggttaccgatcggaaataccatccagccttcccaggctgccacattcatgaatgatgccatcgaaaaagcaagaaaagcagcggagctccaggcacgaatacaggctcaactggccctgaaacccggtctgattgggaacgctaacatggtagggctcgcaaacttacacgctatgggcattgccccacccaaagtcgagctgaaagatcaaacgaagcctaccccattgatcctggacgaacaggggaggacagtggatgccacaggcaaggaaattgagctgacacatcggatgccaaccttgaaagctaacattcgcgctgtcaaaagagaacagtttaagcagcagctgaaagaaaaaccaagtgaggatatggagagcaatacgttttttgacccaagagtctccatcgcaccaagtcagcgccagcggcgaaccttcaagtttcatgataagggcaaatttgagaaaattgcacagaggctaagaacaaaggcacaacttgaaaagctgcaggctgagatcagtcaggcagctcgaaagacagggatccacacgagtaccaggctggccttgatcgcaccaaaaaaagagctcaaggaaggagatataccagaaattgaatggtgggacagttacatcatcccaaatggatttgacttaggcaagtcacaggaacgtagactgttttggaatcataagtcctgctag

SEQ ID NO: 299150 - protein, 290 aa, Artificial Sequence
  derived and/or modified sequence
MLLLFLLFEGLCCPGENTAAPQALQSYHLAAEEQLSFRMLQTSSFANHSWAHSEGSGWLGDLQTHGWDTVLGTIRFLKPWSHGNFSKQELKNLQSLFQLYFHSFIQIVQASAGQFQLEYPFEIQILAGCRMNAPQIFLNMAYQGSDFLSFQGISWEPSPGAGIRAQNICKVLNRYLDIKEILQSLLGHTCPRFLAGLMEAGESELKRKVKPEAWLSCGPSPGPGRLQLVCHVSGFYPKPVWVMWMRGEQEQRGTQRGDVLPNADETWWIFHLSHPDLFDCDSYPGHIGCS

SEQ ID NO: 299151 - protein, 60 aa, Artificial Sequence
  derived and/or modified sequence
  misc_feature (1)..(1): Xaa can be any naturally occurring amino acid
XVSGFYPKPVWVMWMRGEQEQRGTQRGDVLPNADETWWIFHLSHPDLFDCDSYPGHIGCS

SEQ ID NO: 299152 - DNA, 873 bp, Artificial Sequence
  derived and/or modified sequence
atgttgcttctttttctgctgttcgaggggctgtgctgccccggggaaaacacagcggctccccaggctctccagagctatcacttggctgctgaggagcaactgagtttccggatgctgcagacaagttcgttcgccaatcactcttgggcccactccgaaggaagtggctggctgggcgacttacagacccacggctgggacaccgtgctaggcaccatacgatttctcaagccttggtctcatggtaatttcagtaagcaggaacttaagaacctccaatctttattccagctatatttccactccttcattcaaatcgtccaggcatctgcgggacagtttcagctcgagtacccatttgagatccagatcttggcagggtgccggatgaacgcgccacaaatttttctgaacatggcttaccaggggtcagacttcctctccttccagggtatctcctgggaacctagcccaggcgccggaatccgagcccagaacatctgcaaggtcctcaatcgttatctcgacataaaagaaatcctgcaatcgctcctgggacatacgtgccctcgattccttgcggggctcatggaagctggggagagcgaactcaaaaggaaagtgaaaccagaggcctggttaagttgtggacccagcccaggacccggcaggctgcagctagtgtgtcatgtgtccggtttttatcctaagccagtctgggttatgtggatgcggggtgaacaggaacagcgaggaacacagcgcggcgatgttctacccaacgccgacgaaacctggtggattttccacctcagccatccggatctgttcgattgtgacagttatcctggccacatcggttgctcatag

SEQ ID NO: 299153 - DNA, 873 bp, Artificial Sequence
  derived and/or modified sequence
atgctgctgctcttcctgctgtttgagggcctgtgctgccctggagagaacacagctgccccccaggccctgcagagctaccacctggccgctgaggagcagctgtccttcaggatgctgcagaccagcagctttgccaaccacagctgggcccacagcgagggcagcggctggctgggggacctgcagacccacggctgggacacagtgctgggcaccatccgcttcctgaagccctggagccacggcaacttcagcaagcaggagctgaagaacctgcagagcctcttccagctgtacttccacagcttcatccagatcgtgcaggccagcgctggccagttccagctggagtacccctttgagatccagatcctggccggctgcaggatgaatgccccccagatcttcctgaacatggcctaccagggcagtgacttcctgtccttccagggcatctcctgggagcccagccctggagctggcatccgggcccagaacatctgcaaggtgctgaaccgctacctggacatcaaggagatcctgcagagcctgctgggccacacctgcccccgcttcctggccggcctgatggaggccggggagagcgagctgaagaggaaggtgaagccagaggcctggctgagctgtggccccagccctggccctggccgcctgcagctggtgtgccacgtgtctggcttctaccccaagcctgtgtgggtgatgtggatgagaggagagcaggagcagaggggcacccagagaggagatgtgctgcccaatgctgatgagacctggtggatcttccacctgagccacccagacctgtttgactgtgacagctacccaggccacatcggctgcagctag

SEQ ID NO: 299154 - DNA, 873 bp, Artificial Sequence
  derived and/or modified sequence
atgctgctgctgttcctgctgttcgagggcctgtgctgccccggcgagaacaccgccgctccccaggccctccagtcatatcatttggccgctgaggagcagctctcttttaggatgctgcagaccagttcttttgcgaatcattcatgggcccactctgaagggtcaggatggctgggagatcttcagacccacggctgggataccgtgctcgggaccatccgattccttaagccgtggtcccacggtaatttttcaaagcaagaactgaagaacctgcaaagtctgttccaattgtattttcactcattcattcaaatagtgcaggccagtgccgggcaatttcaactggagtacccttttgagattcagatcctggctggctgcaggatgaatgctcctcagatcttcctcaatatggcgtatcagggaagcgacttcctgtcgtttcagggaatttcctgggaaccctcgcctggcgccgggatacgggcccagaatatctgtaaggtcctgaacagatatctcgatattaaggagatacttcagtccctgctcggacacacttgccctcggtttcttgccggacttatggaggcaggggaatccgagttgaagcgaaaggtcaagcccgaggcctggttgagctgcggccccagccccggacccgggaggcttcagctggtttgtcacgtgtcggggttctaccctaagcctgtatgggtgatgtggatgaggggggaacaggagcagcggggcacccagcggggggacgtccttcccaatgccgacgaaacctggtggatttttcacctctcacatcctgatctattcgactgcgactcctatcctggccacattggctgttcatag

SEQ ID NO: 299155 - DNA, 873 bp, Artificial Sequence
  derived and/or modified sequence
atgctgctgctgtttctgttgtttgagggcctgtgctgccctggagagaacaccgcggctccacaagcccttcaatcttaccacctggccgcagaggagcagctgagctttcggatgctacagacttcctcctttgcaaatcactcctgggcgcatagcgagggctcaggctggctgggggatttgcagacccatgggtgggacacagttctgggcaccatcaggttccttaagccttggtcccatggcaacttcagcaagcaagaactgaagaacctgcagtccctgtttcagctgtactttcacagctttattcaaattgtccaggcctcagcagggcaatttcagctcgaataccccttcgaaatccagatcctcgccggatgtaggatgaatgccccacagatatttcttaacatggcttatcaaggcagcgacttcttaagctttcaagggatctcatgggagccgagtcccggagccggaatccgcgctcagaacatctgcaaggtgctcaacagatacctggatatcaaggagatcctgcagtccctgcttggccacacatgtcctcgcttccttgccggtttgatggaggccggtgaatctgaactgaagaggaaggtaaaaccagaggcatggctgagctgcggccctagcccaggaccaggccgactccaactcgtctgccacgtgagcggcttttatccgaagcccgtatgggtcatgtggatgcgcggagagcaagaacagcgcggaacccagcgtggcgacgtgctgcctaatgccgatgagacctggtggatcttccacctgagccaccccgatttatttgactgcgattcatatccaggtcatattggatgcagctag

SEQ ID NO: 299156 - DNA, 1689 bp, Artificial Sequence
  derived and/or modified sequence
atgctgctcctgttcctcctcttcgagggtctctgctgtcctggggaaaatacagcagctccccaggctctacaatcctatcatctagcagcagaggagcagctgtccttccgcatgctccaaacttcctcctttgccaaccacagctgggcacacagtgagggctcaggatggctgggtgacctgcagactcatggctgggacactgtcttgggcaccatccgctttctgaagccctggtcccatggaaacttcagcaagcaggagctgaaaaacttacagtcactgttccagttatacttccatagttttatccagatagtgcaagcttctgctggtcaatttcagcttgaataccccttcgagatccagatattagctggctgtagaatgaatgccccacaaatcttcttaaatatggcatatcaagggtcagatttcctgagtttccaaggaatttcctgggagccatctccaggagcagggatccgggcccagaacatctgtaaagtgctcaatcgctacctagatattaaggaaatactgcaaagccttcttggtcacacctgccctcgatttctagcggggctcatggaagcaggggagtcagaactgaaacggaaagtgaagccagaggcctggctgtcctgtggccccagtcctggccctggccgtctgcagcttgtgtgccatgtctcaggattctacccaaagcccgtgtgggtgatgtggatgcggggtgagcaggagcagcggggcactcagcgaggggacgtcctgcctaatgctgacgagacatggtggatattccatctttctcatcctgatctgtttgactgtgatagttaccctggtcatattggttgtagttgactcacggttaaaaaaacagagttcaaataagaacattctttctccccacacacccagccctgtctttctcatgggagccaacactcaggacaccaagaattcaagacatcagttctgcttggcacaagtatcgtggatcaaaaacagagtattgaagaagtggaagacacgcctaaaccaactctggtgacatttgctttaccttatacataaaatccttgtctgcatcttcttaaacaccgtccatgtcccataagggaagcatgcttttatttaaacagtttatactagcaaagatactgacccctttaggaatactttttccccatcttccagagattttttttttcctgctttggctacatatccatcattgtttatttttgaaactataatccagatacttctttttcatggattcccgagatcacccaattgatagctcttctgtactccccaaattgaactgatcttcacaagcacattcatctcttcctactctgaacagtagttatttaggtttttgctctttttttttttttaatctcagttgcttgaaagtaggatttaggtatttgtgtctgtattcatgaccaaaaatcttatctgaattcagggccagcttcataagcatgtgacctgtgcagacacatggaatcgtatgctctgcaagaacccatgctagatttaatgctctgctgttgtcatcttggaatccttagtcattttcaaacaagagatattgtattttcatttttcactgaccccacaaattatatagctgattcagtgtgaatgtaatatttctcaataaat

SEQ ID NO: 299157 - DNA, 873 bp, Artificial Sequence
  derived and/or modified sequence
atgctgctgctgttcctgctgttcgagggcctgtgctgccccggcgagaacaccgccgccccccaggccctgcagagctaccacctggccgccgaggagcagctgagcttcagaatgctgcagaccagcagcttcgccaaccacagctgggcccacagcgagggcagcggctggctgggcgacctgcagacccacggctgggacaccgtgctgggcaccatcagattcctgaagccctggagccacggcaacttcagcaagcaggagctgaagaacctgcagagcctgttccagctgtacttccacagcttcatccagatcgtgcaggccagcgccggccagttccagctggagtaccccttcgagatccagatcctggccggctgcagaatgaacgccccccagatcttcctgaacatggcctaccagggcagcgacttcctgagcttccagggcatcagctgggagcccagccccggcgccggcatcagagcccagaacatctgcaaggtgctgaacagatacctggacatcaaggagatcctgcagagcctgctgggccacacctgccccagattcctggccggcctgatggaggccggcgagagcgagctgaagagaaaggtgaagcccgaggcctggctgagctgcggccccagccccggccccggcagactgcagctggtgtgccacgtgagcggcttctaccccaagcccgtgtgggtgatgtggatgagaggcgagcaggagcagagaggcacccagagaggcgacgtgctgcccaacgccgacgagacctggtggatcttccacctgagccaccccgacctgttcgactgcgacagctaccccggccacatcggctgcagctag

SEQ ID NO: 299158 - DNA, 4435 bp, Artificial Sequence
  derived and/or modified sequence
acattgtaggggctgctggccatggaagggcactgtctctctgctttgacaatggtccccttgaacaagttcctttagctctggaggagactgcaagcatcgggatgcccaggccccaaggaggccctcttcctgcagatccgagaaggactggacacctttctgggactgcagcaccagggtggctacgcctcccggctggatcaggattcctgtcatccatctgctggccctttggaccactcggccactggcatgctttccaagtctgtacccgtgagtggcatcaactgtctcttggaccgttcggatacagatgggaatgtatcccagtcctctgccattgacctcaggaaacgctgcagccagctggaaggacattcaggtacccgggtaggctcctccctgcgacagaccttcagcttcctctcgggcatgaccggaaaggccaagacccgggaaaaggagaagatgaaggaagccaaggatgcccgctataccaatgggcacctcttcaccaccatttcagtttcaggcatgaccatgtgctatgcctgtaacaagagcatcacagccaaggaagccctcatctgcccaacctgcaatgtgactatccacaaccgctgtaaagacaccctcgccaactgtaccaaggtcaagcagaagcaacagaaagcggccctgctgaagaacaacaccgccttgcagtccgtttctcttcgaagtaagacaaccatccgggagcggccaagctcggccatctacccctccgacagcttccggcagtccctcctgggctcccgccgtggccgctcctccttgtctttagccaagagtgtttctaccaccaacattgctggacatttcaatgatgagtctcccctggggctgcgccggatcctctcacagtccacagactccctcaacatgcggaaccgaaccctatccgtggaatccctcattgacgaagaggtaatctacagtgagctgatgagtgactttgagatggatgagaaggactttgcagctgactcttggagtcttgctgtggacagcagcttcctgcagcagcataaaaaggaggtgatgaagcagcaagatgtcatctatgagctaatccagacagagctgcaccatgtgaggacactgaagatcatgacccgcctcttccgcacggggatgctggaagagctacacttggagccaggagtggtccagggcctgttcccctgcgtggacgagctcagtgacatccatacacgcttcctcagccagctattagaacgccgacgccaggccctgtgccctggcagcacccggaactttgtcatccatcgcttgggtgatctgctcatcagccagttctcaggtcctagtgcggagcagatgtgtaagacctactcggagttctgcagccgccacagcaaggccttaaagctctataaggagctgtacgcccgagacaaacgcttccagcaattcatccggaaagtgacccgccccgccgtgctcaagcggcacggggtacaggagtgcatcctgctggtgactcagcgcatcaccaagtacccgttactcatcagccgcatcctgcagcattcccacgggatcgaggaggagcgccaggacctgaccacagcactggggctagtgaaggagctgctgtccaatgtggacgagggtatttatcagctggagaaaggggcccgtctgcaggagatctacaaccgcatggaccctcgggcccaaaccccagtgcctggcaagggcccctttggccgagaggaacttctgaggcgcaaactcatccacgatggctgcctgctctggaagacagcgacggggcgcttcaaagatgtgctagtgctgctgatgacagatgtactggtgtttctccaggaaaaggaccagaagtacatctttcctaccctggacaagccttcagtggtatcgctgcagaatctaatcgtacgagacattgccaaccaggagaaagggatgtttctgatcagcgcagccccacctgagatgtacgaggtgcacacagcatcccgggatgaccggagcacctggatccgggtcattcagcagagcgtgcgcacatgcccatccagggaggacttccccctgattgagacagaggatgaggcttacctgcggcgaattaagatggagttgcagcagaaggaccgggcactggtggagctgctgcgagagaaggtcgggctgtttgctgagatgacccatttccaggccgaagaggatggtggcagtgggatggccctgcccaccctgcccaggggccttttccgctctgagtcccttgagtcccctcgtggcgagcggctgctgcaggatgccatccgtgaggtggagggtctgaaagacctgctggtggggccaggagtggaactgctcttgacaccccgagagccagccctgcccttggaaccagacagcggtggtaacacgagtcctggggtcactgccaatggtgaggccagaaccttcaatggctccattgaactctgcagagctgactcagactctagccagagggatcgaaatggaaatcagctgagatcaccgcaagaggaggcgttacagcgattggtcaatctctatggacttctacatggcctacaggcagctgtggcccagcaggacactctgatggaagcccggttccctgagggccctgagcggcgggagaagctgtgccgagccaactctcgggatggggaggctggcagggctggggctgcccctgtggcccctgaaaagcaggccacggaactggcattactgcagcggcaacatgcgctgctgcaggaggagctacggcgctgccggcggctaggtgaagaacgggcaaccgaagctggcagcctggaggcccggctccgggagagtgagcaggcccgggcactgctggagcgtgaggccgaagaggctcgaaggcagctggccgccctgggccagaccgagccactcccagctgaggccccctgggcccgcagacctgtggatcctcggcggcgcagcctccccgcaggcgatgccctgtacttgagtttcaaccccccacagcccagccgaggcactgaccgcctggatctacctgtcactactcgctctgtccatcgaaactttgaggaccgagagaggcaggaactggggagccccgaagagcggctgcaagacagcagtgaccctgacactggcagcgaggaggaaggtagcagccgtctgtctccgccccacagtccacgagactttaccagaatgcaggacatcccggaggagacggagagccgcgacggggaggctgtagcctccgagagctaagggggcccctcccccctgccccgtgccccactgaagaacattactgagggggctaaccttggggactccaatttgccaatgatgagggaacatttgaaagaactgcaaattgtccttgccagctcttgggatccttggatacctggggccatttaagaagctaggggaattaggccacaacaccccctgggacatccgaaagctacaccacagatgccagtggttcatgccttcttcccgcaactttaggaaaatttatttatttattgtttattagttatggggggagaggggagatttaaaggaccagggacatgggaaccaagccatagggatcagagggccttgtccttgaacactactggggtatattcaggctcatccacgcagctgctgggttcttgccctaacggccctcccctgcaacatccgtcttggaggagaggctgcagccacagcaccctactgccctttaaataaaggagggctgtgggcagggccatgtccctttctcctctcccctcaacctcttactgctgttctccctttctccgtccttcatggaagccctgggagataacctggcttcctggagttgatggaataaaggttggggtggccataatggtttgttgggggtgagggaaaaaacccacagggaccagaatgttttgttgttcttttgttttcttttttgtaccaaagtcaactgcacgtgttttatatttttaagagatcgtaggcaattagagatcgaagcctcctatctccacatctctgaagaagttgaggggtgggggagagaatgacttctgccttcatctgcagtaacggggggacctatactgacctcttccccagccatttagaaacaagttctagggtgggttggaaaatctccaagagccctgacctcatcttccacctcagcaaccatgacctgaaacctcagcgtgaatttgggggatttttcagtggaacccttgcccccaaatgtcgaccagcccccaaatgtcgaagaattttcttcttgccaattttgttgtttaaaaaaaaaattcagggaaaattaaaaacctggaactcc

SEQ ID NO: 299159 - DNA, 2074 bp, Artificial Sequence
  derived and/or modified sequence
agtttgggtctgggctgtgcttatgccaacaggaagggctgggctgggggcaagcaacagggctgggctgaggcgaggcagtgttcctccctggtgcccgtcactggccactggatacagacggtagtggtggcgatgtgtgtttcaggaggagactgcaagcatcgggatgcccaggccccaaggaggccctcttcctgcagatccgagaaggactggacacctttctgggactgcagcaccagggtggctacgcctcccggctggatcaggattcctgtcatccatctgctggccctttggaccactcggccactggcatgctttccaagtctgtacccgtgagtggcatcaactgtctcttggaccgttcggatacagatgggaatgtatcccagtcctctgccattgacctcaggaaacgctgcagccagctggaaggacattcaggtacccgggtaggctcctccctgcgacagaccttcagcttcctctcgggcatgaccggaaaggccaagacccgggaaaaggagaagatgaaggaagccaaggatgcccgctataccaatgggcacctcttcaccaccatttcagtttcaggcatgaccatgtgctatgcctgtaacaagagcatcacagccaaggaagccctcatctgcccaacctgcaatgtgactatccacaaccgctgtaaagacaccctcgccaactgtaccaaggtcaagcagaagcaacagaaagcggccctgctgaagaacaacaccgccttgcagtccgtttctcttcgaagtaagacaaccatccgggagcggccaagctcggccatctacccctccgacagcttccggcagtccctcctgggctcccgccgtggccgctcctccttgtctttagccaagagtgtttctaccaccaacattgctggacatttcaatgatgagtctcccctggggctgcgccggatcctctcacagtccacagactccctcaacatgcggaaccgaaccctatccgtggaatccctcattgacgaagcagaggtaatctacagtgagctgatgagtgactttgagatggatgagaaggactttgcagctgactcttggagtcttgctgtggacagcagcttcctgcagcagcataaaaaggaggtgatgaagcagcaagatgtcatctatgagctaatccagacagagctgcaccatgtgaggacactgaagatcatgacccgcctcttccgcacggggatgctggaagagctacacttggagccaggagtggtccagggcctgttcccctgcgtggacgagctcagtgacatccatacacgcttcctcagccagctattagaacgccgacgccaggccctgtgccctggcagcacccggaactttgtcatccatcgcttgggtgatctgctcatcagccagttctcaggtcctagtgcggagcagatgtgtaagacctactcggagttctgcagccgccacagcaaggccttaaagctctataaggagctgtacgcccgagacaaacgcttccagcaattcatccggaaagtgacccgccccgccgtgctcaagcggcacggggtacaggagtgcatcctgctggtgactcagcgcatcaccaagtacccgttactcatcagccgcatcctgcagcattcccacgggatcgaggaggagcgccaggacctgaccacagcactggggctagtgaaggagctgctgtccaatgtggacgagggtatttatcagctggagaaaggggcccgtctgcaggagatctacaacctcttactgctgttctccctttctccgtccttcatggaagccctgggagataacctggcttcctggagttgatggaataaaggttggggtggccataatggtttgttgggggtgagggaaaaaacccacagggaccagaatgttttgttgttcttttgttttcttttttgtaccaaagtcaactgcacgtgttttatatttttaagagatcgtaggcaattagagatcgaagcctcctatctccacatctctgaagaagttgaggggtgggggagaga

SEQ ID NO: 299160 - protein, 515 aa, Artificial Sequence
  derived and/or modified sequence
MLSKSVPVSGINCLLDRSDTDGNVSQSSAIDLRKRCSQLEGHSGTRVGSSLRQTFSFLSGMTGKAKTREKEKMKEAKDARYTNGHLFTTISVSGMTMCYACNKSITAKEALICPTCNVTIHNRCKDTLANCTKVKQKQQKAALLKNNTALQSVSLRSKTTIRERPSSAIYPSDSFRQSLLGSRRGRSSLSLAKSVSTTNIAGHFNDESPLGLRRILSQSTDSLNMRNRTLSVESLIDEAEVIYSELMSDFEMDEKDFAADSWSLAVDSSFLQQHKKEVMKQQDVIYELIQTELHHVRTLKIMTRLFRTGMLEELHLEPGVVQGLFPCVDELSDIHTRFLSQLLERRRQALCPGSTRNFVIHRLGDLLISQFSGPSAEQMCKTYSEFCSRHSKALKLYKELYARDKRFQQFIRKVTRPAVLKRHGVQECILLVTQRITKYPLLISRILQHSHGIEEERQDLTTALGLVKELLSNVDEGIYQLEKGARLQEIYNLLLLFSLSPSFMEALGDNLASWS

SEQ ID NO: 299161 - DNA, 1548 bp, Artificial Sequence
  derived and/or modified sequence
atgctctccaaaagcgttccggtttcaggcatcaactgtctcctggataggagcgacactgatggaaacgtgtcccagtctagcgccatcgatttaaggaagaggtgtagccagcttgagggccacagcggcacccgggtgggaagcagtctgcgccagacgttctcgttcctgagcggaatgacaggcaaggccaaaactagggaaaaggagaagatgaaggaggccaaagatgccaggtataccaatggccacctcttcactaccatttctgtctctgggatgaccatgtgctacgcatgcaacaagagcatcaccgcgaaggaagccctgatatgtcccacatgtaacgttaccatccacaacaggtgtaaggatacactggcgaattgcactaaggttaaacagaaacagcaaaaagcagccctgctcaaaaacaatactgcattacagagtgtgagcctccgaagcaagacaacaattcgcgagcgaccatcatctgcaatatacccttcagattcgtttagacaaagcttattggggtcacgtagagggcggagcagtttgtctctagccaagtctgtctcgacaactaatatagccggccacttcaacgatgagtcgccattaggcctgcggcggatattgtcacaatccaccgatagcctgaatatgcgcaatcgtactctctccgtcgaatccttgattgatgaagccgaagtgatttactccgagttgatgagtgacttcgagatggacgagaaggactttgcggcagatagctggagtctggcagttgactcctcgtttttgcaacagcacaaaaaggaggtgatgaagcagcaggacgttatctatgaactaatccagactgagctgcatcacgtcagaaccttaaaaataatgaccaggctctttagaactggcatgctggaagagctgcacctcgagcctggcgtggtgcagggcctgttcccctgcgtggatgaactgagcgacatccacactagatttctgagccaactgttggagagaagacggcaggccttgtgcccaggaagtactagaaactttgttattcaccggctgggagacttgctcattagccaatttagtggtccaagcgctgagcagatgtgtaagacatatagcgaattctgtagcaggcactctaaagccctgaaactgtataaggaactgtatgcacgggataagcgcttccagcagtttatcaggaaagtcactcggcctgcagtgctgaaacggcacggggttcaagaatgcatactgctagtgacccaaagaattaccaagtatcccctcctgatatccaggattctacaacactcgcacggcattgaggaggaacgccaggatcttacaaccgctcttgggttggtaaaagaacttctgagcaacgttgatgaaggcatctaccaattggaaaaaggcgcaagattgcaggagatttacaacctgctgctccttttttccctttcaccctcgtttatggaggcgctgggagataatctcgcaagttggagctag

SEQ ID NO: 299162 - DNA, 1548 bp, Artificial Sequence
  derived and/or modified sequence
atgctgagcaagtctgtgcctgtgtctggcatcaactgcctgctggacagaagtgacacagatggaaatgtgtcccagagcagcgccatcgacctgaggaagcgctgcagccagctggagggccacagcggcaccagggtgggcagcagcctgcggcagaccttctccttcctgagcggcatgaccgggaaggccaagacccgggagaaggagaagatgaaggaggccaaggatgcccgctacaccaacggccacctgttcaccaccatctctgtgtctggcatgaccatgtgctacgcctgcaacaagagcatcacagccaaggaggccctgatctgccccacctgcaatgtgaccatccacaaccgctgcaaggacaccctggccaactgcaccaaggtgaagcagaagcagcagaaggccgccctgctgaagaacaacacagccctgcagagcgtgtccctgcggagcaagaccaccatccgggagcggcccagcagcgccatctaccccagcgacagcttccggcagagcctgctgggcagcagaagaggccgcagcagcctgagcctggccaagtctgtgtccaccaccaacattgctggccacttcaatgatgagagccccctgggcctgcggcgcatcctgagccagagcacagacagcctgaacatgaggaacagaaccctgtctgtggagagcctgattgatgaagctgaggtgatctacagcgagctgatgtctgactttgagatggatgagaaggactttgctgctgacagctggagcctggccgtggacagcagcttcctgcagcagcacaagaaggaggtgatgaagcagcaggatgtgatctatgagctgatccagacagagctgcaccacgtgaggaccctgaagatcatgaccaggctcttcagaacaggcatgctggaggagctgcacctggagcccggggtggtgcagggcctcttcccctgtgtggatgagctgagtgacatccacacccgcttcctgagccagctgctggagcggcggcggcaggccctgtgccccggcagcaccaggaacttcgtcatccaccggctgggggacctgctgatcagccagttcagcggccccagcgctgagcagatgtgcaagacctacagcgagttctgcagccgccacagcaaggccctgaagctgtacaaggagctgtatgcccgggacaagcgcttccagcagttcatcaggaaggtgaccaggcctgctgtgctgaagagacatggagtgcaggagtgcatcctgctggtgacccagaggatcaccaagtaccccctgctgatcagccgcatcctgcagcacagccatggaattgaggaggagcggcaggacctgaccacagccctgggcctggtgaaggagctgctgagcaatgtggatgagggcatctaccagctggagaagggggcccggctgcaggagatctacaacctgctgctgctcttcagcctgagccccagcttcatggaggccctgggggacaacctggcctcctggagctag

SEQ ID NO: 299163 - DNA, 1548 bp, Artificial Sequence
  derived and/or modified sequence
atgctgagcaagagcgtgcccgtgagcggcatcaactgcctgctggatcgtagcgataccgatgggaacgtgtcccagagcagcgcgatcgacttgcgcaagcggtgtagccagttagagggccactcggggacgagagtagggtcctctctgcgtcagacattttcgttcctgagcggcatgaccggcaaagccaagactcgggaaaaagagaaaatgaaggaggcaaaagacgctcgttacaccaatggccacctgttcactaccataagcgtttccggcatgacaatgtgctatgcgtgcaataaatcaatcaccgcaaaggaggctctcatttgtccaacttgtaacgttacgatccacaatcgctgcaaggacaccctggccaactgcaccaaggtgaagcagaagcaacagaaggccgcactgcttaagaacaacaccgcactgcaaagcgtatctttacgctccaagaccaccatccgggaaagaccatcctccgcgatttatccgagtgattcctttcggcagagcctgctcggttctaggagaggacgcagtagcctgtccctcgcaaaaagtgtgagcaccaccaatatcgccggacatttcaatgatgagagtcctctcggccttaggaggattctgagccagagtaccgactctctgaacatgcgcaaccggacactcagcgtagaaagcttaatcgacgaggccgaggtgatctattctgagctgatgtccgatttcgaaatggatgaaaaagacttcgcagcagactcttggtctctggctgtggatagctcttttctgcagcagcacaaaaaagaggtgatgaaacagcaagatgtaatctatgagctgatccagaccgagctgcaccacgtccgcactcttaagataatgactaggctgtttcgaaccggcatgctcgaggaactacacctggagcccggcgtcgtgcaaggattgtttccctgtgtggatgagctatccgatattcatacccgatttctgtcacaacttctggagcgacgtcgacaggctctatgtcctgggagtaccagaaactttgtgatccaccggcttggggaccttctgatcagtcagtttagtgggccatccgccgaacagatgtgcaagacttattccgagttctgctcgcggcattcgaaggccctaaaactctataaggaactctatgctagagacaaacgctttcagcaattcataaggaaagtgactcggccagcggtcttaaagcgccacggcgtacaggaatgcatcctgctcgtgacccagcgaataactaaataccctctactaatcagcaggattctgcagcacagtcacggcatcgaagaagaacgacaggacctgaccactgctctgggcttggtgaaggaactcttaagcaacgtggatgagggaatctaccagttagagaaaggtgctcgccttcaggagatttacaacctccttctcttgttttcgctgagtccgagctttatggaggcactgggggacaatctggccagctggagctag

SEQ ID NO: 299164 - DNA, 1548 bp, Artificial Sequence
  derived and/or modified sequence
atgctcagtaaatccgtacccgtaagtgggatcaactgtctgttggaccgcagtgacaccgatggcaatgtctctcagtcttcagcgattgatctgcgcaaacggtgcagccagttggagggacattctggcactagagtgggcagctctctcaggcagactttctcctttttaagcggaatgacagggaaagccaaaacccgggagaaagaaaagatgaaagaggcaaaggacgcaaggtacacgaacggacatctgttcacaactatttcagtgagcggcatgactatgtgctatgcttgcaacaaatcgattactgctaaggaagccctaatatgccccacttgtaatgtcactatccacaatagatgcaaggacacactcgccaactgtacaaaggtaaaacagaaacagcagaaagccgctctgctgaaaaacaatacggctctgcagagtgtgtccctgaggtccaagaccactattagggagcgcccttcaagtgcaatctacccctcagatagttttcggcagtccctgttggggtctcgcagagggaggtcctccctctcactggcaaaaagtgtgagcacaactaatattgctgggcactttaatgacgaaagcccgctgggactgagacgaatcttgtcccaatccaccgactccttgaatatgaggaatcgcacactcagtgtcgagtctttaatagacgaggctgaggtcatatacagtgagctgatgagtgattttgagatggacgaaaaagactttgccgctgactcatggagtctggcagtggatagtagtttcttgcaacagcacaaaaaagaggttatgaaacaacaagacgtgatatacgagctcatacagactgagctgcaccacgtcaggactcttaagatcatgacacggctgttcaggacggggatgctagaggagcttcatttagagccgggagtggtccagggactatttccctgtgtcgacgagcttagtgacattcacacccggtttctttctcaacttctggagaggcggcgtcaagctttgtgtccaggtagcacccgtaattttgtgatccatcggctgggagacttactgatctcacaattttctggccctagtgcagagcagatgtgtaaaacctacagcgagttttgtagccgccattcaaaagccctgaaactctacaaagagctatacgcgagggataagaggtttcagcaattcatccgaaaggtgactcggcctgcggtgctcaaaaggcatggggtgcaagaatgcattctgctagtgacccaacgtattactaaatatccactgctcatctcaaggattttgcagcacagccatggtattgaggaggagcggcaggatctgacgaccgccctgggcctcgtgaaggagctcctctccaacgtcgacgagggcatttaccagctggagaagggcgctagactccaggagatctacaatttgctcctcctcttctccctgtcaccctcgttcatggaggccctgggcgataatctggctagctggtcctag

SEQ ID NO: 299165 - DNA, 1548 bp, Artificial Sequence
  derived and/or modified sequence
atgctgagcaagagcgtgcccgtgagcggcatcaactgcctgctggacagaagcgacaccgacggcaacgtgagccagagcagcgccatcgacctgagaaagagatgcagccagctggagggccacagcggcaccagagtgggcagcagcctgagacagaccttcagcttcctgagcggcatgaccggcaaggccaagaccagagagaaggagaagatgaaggaggccaaggacgccagatacaccaacggccacctgttcaccaccatcagcgtgagcggcatgaccatgtgctacgcctgcaacaagagcatcaccgccaaggaggccctgatctgccccacctgcaacgtgaccatccacaacagatgcaaggacaccctggccaactgcaccaaggtgaagcagaagcagcagaaggccgccctgctgaagaacaacaccgccctgcagagcgtgagcctgagaagcaagaccaccatcagagagagacccagcagcgccatctaccccagcgacagcttcagacagagcctgctgggcagcagaagaggcagaagcagcctgagcctggccaagagcgtgagcaccaccaacatcgccggccacttcaacgacgagagccccctgggcctgagaagaatcctgagccagagcaccgacagcctgaacatgagaaacagaaccctgagcgtggagagcctgatcgacgaggccgaggtgatctacagcgagctgatgagcgacttcgagatggacgagaaggacttcgccgccgacagctggagcctggccgtggacagcagcttcctgcagcagcacaagaaggaggtgatgaagcagcaggacgtgatctacgagctgatccagaccgagctgcaccacgtgagaaccctgaagatcatgaccagactgttcagaaccggcatgctggaggagctgcacctggagcccggcgtggtgcagggcctgttcccctgcgtggacgagctgagcgacatccacaccagattcctgagccagctgctggagagaagaagacaggccctgtgccccggcagcaccagaaacttcgtgatccacagactgggcgacctgctgatcagccagttcagcggccccagcgccgagcagatgtgcaagacctacagcgagttctgcagcagacacagcaaggccctgaagctgtacaaggagctgtacgccagagacaagagattccagcagttcatcagaaaggtgaccagacccgccgtgctgaagagacacggcgtgcaggagtgcatcctgctggtgacccagagaatcaccaagtaccccctgctgatcagcagaatcctgcagcacagccacggcatcgaggaggagagacaggacctgaccaccgccctgggcctggtgaaggagctgctgagcaacgtggacgagggcatctaccagctggagaagggcgccagactgcaggagatctacaacctgctgctgctgttcagcctgagccccagcttcatggaggccctgggcgacaacctggccagctggagctag

SEQ ID NO: 299166 - protein, 958 aa, Artificial Sequence
  derived and/or modified sequence
MKEAKDARYTNGHLFTTISVSGMTMCYACNKSITAKEALICPTCNVTIHNRCKDTLANCTKVKQKQQKAALLKNNTALQSVSLRSKTTIRERPSSAIYPSDSFRQSLLGSRRGRSSLSLAKSVSTTNIAGHFNDESPLGLRRILSQSTDSLNMRNRTLSVESLIDEEVIYSELMSDFEMDEKDFAADSWSLAVDSSFLQQHKKEVMKQQDVIYELIQTELHHVRTLKIMTRLFRTGMLEELHLEPGVVQGLFPCVDELSDIHTRFLSQLLERRRQALCPGSTRNFVIHRLGDLLISQFSGPSAEQMCKTYSEFCSRHSKALKLYKELYARDKRFQQFIRKVTRPAVLKRHGVQECILLVTQRITKYPLLISRILQHSHGIEEERQDLTTALGLVKELLSNVDEGIYQLEKGARLQEIYNRMDPRAQTPVPGKGPFGREELLRRKLIHDGCLLWKTATGRFKDVLVLLMTDVLVFLQEKDQKYIFPTLDKPSVVSLQNLIVRDIANQEKGMFLISAAPPEMYEVHTASRDDRSTWIRVIQQSVRTCPSREDFPLIETEDEAYLRRIKMELQQKDRALVELLREKVGLFAEMTHFQAEEDGGSGMALPTLPRGLFRSESLESPRGERLLQDAIREVEGLKDLLVGPGVELLLTPREPALPLEPDSGGNTSPGVTANGEARTFNGSIELCRADSDSSQRDRNGNQLRSPQEEALQRLVNLYGLLHGLQAAVAQQDTLMEARFPEGPERREKLCRANSRDGEAGRAGAAPVAPEKQATELALLQRQHALLQEELRRCRRLGEERATEAGSLEARLRESEQARALLEREAEEARRQLAALGQTEPLPAEAPWARRPVDPRRRSLPAGDALYLSFNPPQPSRGTDRLDLPVTTRSVHRNFEDRERQELGSPEERLQDSSDPDTGSEEEGSSRLSPPHSPRDFTRMQDIPEETESRDGEAVASES

SEQ ID NO: 299167 - DNA, 4077 bp, Artificial Sequence
  derived and/or modified sequence
gggatcccgggagggagcggagcggacctgggcttggtcgcctccaagccggcgggaccgagtgctttaggccgcttgaaagaaagttgctccgacccgggaaaaggagaagatgaaggaagccaaggatgcccgctataccaatgggcacctcttcaccaccatttcagtttcaggcatgaccatgtgctatgcctgtaacaagagcatcacagccaaggaagccctcatctgcccaacctgcaatgtgactatccacaaccgctgtaaagacaccctcgccaactgtaccaaggtcaagcagaagcaacagaaagcggccctgctgaagaacaacaccgccttgcagtccgtttctcttcgaagtaagacaaccatccgggagcggccaagctcggccatctacccctccgacagcttccggcagtccctcctgggctcccgccgtggccgctcctccttgtctttagccaagagtgtttctaccaccaacattgctggacatttcaatgatgagtctcccctggggctgcgccggatcctctcacagtccacagactccctcaacatgcggaaccgaaccctatccgtggaatccctcattgacgaagaggtaatctacagtgagctgatgagtgactttgagatggatgagaaggactttgcagctgactcttggagtcttgctgtggacagcagcttcctgcagcagcataaaaaggaggtgatgaagcagcaagatgtcatctatgagctaatccagacagagctgcaccatgtgaggacactgaagatcatgacccgcctcttccgcacggggatgctggaagagctacacttggagccaggagtggtccagggcctgttcccctgcgtggacgagctcagtgacatccatacacgcttcctcagccagctattagaacgccgacgccaggccctgtgccctggcagcacccggaactttgtcatccatcgcttgggtgatctgctcatcagccagttctcaggtcctagtgcggagcagatgtgtaagacctactcggagttctgcagccgccacagcaaggccttaaagctctataaggagctgtacgcccgagacaaacgcttccagcaattcatccggaaagtgacccgccccgccgtgctcaagcggcacggggtacaggagtgcatcctgctggtgactcagcgcatcaccaagtacccgttactcatcagccgcatcctgcagcattcccacgggatcgaggaggagcgccaggacctgaccacagcactggggctagtgaaggagctgctgtccaatgtggacgagggtatttatcagctggagaaaggggcccgtctgcaggagatctacaaccgcatggaccctcgggcccaaaccccagtgcctggcaagggcccctttggccgagaggaacttctgaggcgcaaactcatccacgatggctgcctgctctggaagacagcgacggggcgcttcaaagatgtgctagtgctgctgatgacagatgtactggtgtttctccaggaaaaggaccagaagtacatctttcctaccctggacaagccttcagtggtatcgctgcagaatctaatcgtacgagacattgccaaccaggagaaagggatgtttctgatcagcgcagccccacctgagatgtacgaggtgcacacagcatcccgggatgaccggagcacctggatccgggtcattcagcagagcgtgcgcacatgcccatccagggaggacttccccctgattgagacagaggatgaggcttacctgcggcgaattaagatggagttgcagcagaaggaccgggcactggtggagctgctgcgagagaaggtcgggctgtttgctgagatgacccatttccaggccgaagaggatggtggcagtgggatggccctgcccaccctgcccaggggccttttccgctctgagtcccttgagtcccctcgtggcgagcggctgctgcaggatgccatccgtgaggtggagggtctgaaagacctgctggtggggccaggagtggaactgctcttgacaccccgagagccagccctgcccttggaaccagacagcggtggtaacacgagtcctggggtcactgccaatggtgaggccagaaccttcaatggctccattgaactctgcagagctgactcagactctagccagagggatcgaaatggaaatcagctgagatcaccgcaagaggaggcgttacagcgattggtcaatctctatggacttctacatggcctacaggcagctgtggcccagcaggacactctgatggaagcccggttccctgagggccctgagcggcgggagaagctgtgccgagccaactctcgggatggggaggctggcagggctggggctgcccctgtggcccctgaaaagcaggccacggaactggcattactgcagcggcaacatgcgctgctgcaggaggagctacggcgctgccggcggctaggtgaagaacgggcaaccgaagctggcagcctggaggcccggctccgggagagtgagcaggcccgggcactgctggagcgtgaggccgaagaggctcgaaggcagctggccgccctgggccagaccgagccactcccagctgaggccccctgggcccgcagacctgtggatcctcggcggcgcagcctccccgcaggcgatgccctgtacttgagtttcaaccccccacagcccagccgaggcactgaccgcctggatctacctgtcactactcgctctgtccatcgaaactttgaggaccgagagaggcaggaactggggagccccgaagagcggctgcaagacagcagtgaccctgacactggcagcgaggaggaaggtagcagccgtctgtctccgccccacagtccacgagactttaccagaatgcaggacatcccggaggagacggagagccgcgacggggaggctgtagcctccgagagctaagggggcccctcccccctgccccgtgccccactgaagaacattactgagggggctaaccttggggactccaatttgccaatgatgagggaacatttgaaagaactgcaaattgtccttgccagctcttgggatccttggatacctggggccatttaagaagctaggggaattaggccacaacaccccctgggacatccgaaagctacaccacagatgccagtggttcatgccttcttcccgcaactttaggaaaatttatttatttattgtttattagttatggggggagaggggagatttaaaggaccagggacatgggaaccaagccatagggatcagagggccttgtccttgaacactactggggtatattcaggctcatccacgcagctgctgggttcttgccctaacggccctcccctgcaacatccgtcttggaggagaggctgcagccacagcaccctactgccctttaaataaaggagggctgtgggcagggccatgtccctttctcctctcccctcaacctcttactgctgttctccctttctccgtccttcatggaagccctgggagataacctggcttcctggagttgatggaataaaggttggggtggccataatggtttgttgggggtgagggaaaaaacccacagggaccagaatgttttgttgttcttttgttttcttttttgtaccaaagtcaactgcacgtgttttatatttttaagagatcgtaggcaattagagatcgaagcctcctatctccacatctctgaagaagttgaggggtgggggagagaatgacttctgccttcatctgcagtaacggggggacctatactgacctcttccccagccatttagaaacaagttctagggtgggttggaaaatctccaagagccctgacctcatcttccacctcagcaaccatgacctgaaacctcagcgtgaatttgggggatttttcagtggaacccttgcccccaaatgtcgaccagcccccaaatgtcgaagaattttcttcttgccaattttgttgtttaaaaaaaaaattcagggaaaattaaaaacctggaactcca

SEQ ID NO: 299168 - DNA, 180 bp, Artificial Sequence
  derived and/or modified sequence
atgaccagcgtcagcacacaactgagcctcgtgctcatgagtctgttgcttgtactccctgttgttgaggccgtggaggccggagacgccatagcccttctgctgggagtggttctgagtatcactggaatctgtgcttgcctgggcgtgtatgctcgaaaaaggaacgggcagatgtag

SEQ ID NO: 299169 - DNA, 387 bp, Artificial Sequence
  derived and/or modified sequence
atgagctgccaccagagccccctggtgttcgacgtgggccagtgcagacagcacgacctggccggccagatcctgatctaccacagcctgacccccgccggccccctgggcagaccccccgacgtgccccacagcccccacctggccagccccaccggcagcagacagagaaccgtgggcggcacctgcgacaccgccctgttcctgtgcagctgcttcagcagcagcttcttcagcctgctggtgaccctgttcttcttcaccctgagcccccacaagaccagaaacttcgtgatcctgctgatcttcctgtacagcgtgtgcctgcacaccgacggctacctgagagccagcgagctgagcctgccccccagcatcatcagctag

SEQ ID NO: 299170 - protein, 372 aa, Artificial Sequence
  derived and/or modified sequence
MTFQFNFTIEDHLENELTPIRDGALTLDSSKELSVSESQKGEERDRKCSAEQFDLPQDHLWEHKSMENAAPSQDTDSPLSAASSSRNLEPHGKQPSLRAAKEHAMPKDLKKMLENKVIETLPGFQHVKLSVVKTILLKENFPGENIVSKSFSSHSDLITGVYEGGLKIWECTFDLLAYFTKAKVKFAGKKVLDLGCGSGLLGITAFKGGSKEIHFQDYNSMVIDEVTLPNVVANSTLEDEENDVNEPDVKRCRKPKVTQLYKCRFFSGEWSEFCKLVLSSEKLFVKYDLILTSETIYNPDYYSNLHQTFLRLLSKNGRVLLASKAHYFGVGGGVHLFQKFVEERDVFKTRILKIIDEGLKRFIIEITFKFPG

SEQ ID NO: 299171 - protein, 184 aa, Artificial Sequence
  derived and/or modified sequence
MTFQFNFTIEDHLENELTPIRDGALTLDSSKELSVSESQKGEERDRKCSAEQFDLPQDHLWEHKSMENAAPSQDTDSPLSAASSSRNLEPHGKQPSLRAAKEHAMPKDLKKMLENKVIETLPGFQHVKLSVVKTILLKENFPGENIVSKSFSSHSDLITGVYEGGLKIWECTFDLLAYFTKAKV

SEQ ID NO: 299172 - DNA, 555 bp, Artificial Sequence
  derived and/or modified sequence
atgaccttccagttcaacttcaccatcgaggaccacctggagaacgagctgacccccatcagagacggcgccctgaccctggacagcagcaaggagctgagcgtgagcgagagccagaagggcgaggagagagacagaaagtgcagcgccgagcagttcgacctgccccaggaccacctgtgggagcacaagagcatggagaacgccgcccccagccaggacaccgacagccccctgagcgccgccagcagcagcagaaacctggagccccacggcaagcagcccagcctgagagccgccaaggagcacgccatgcccaaggacctgaagaagatgctggagaacaaggtgatcgagaccctgcccggcttccagcacgtgaagctgagcgtggtgaagaccatcctgctgaaggagaacttccccggcgagaacatcgtgagcaagagcttcagcagccacagcgacctgatcaccggcgtgtacgagggcggcctgaagatctgggagtgcaccttcgacctgctggcctacttcaccaaggccaaggtgtag

SEQ ID NO: 299173 - DNA, 1119 bp, Artificial Sequence
  derived and/or modified sequence
atgacctttcaattcaatttcactattgaggaccacctggagaacgagctgaccccaattcgagacggtgcacttactctcgatagttcaaaggagctttcagtcagtgagtcccaaaaaggggaggagcgggatcgtaaatgttccgcggagcagttcgatctgccacaggatcacctatgggagcacaaatccatggagaatgctgctccaagccaggacaccgattcaccactctccgccgcttcttcgagtcgtaatctcgagcctcatggaaagcaaccaagcctcagagcggccaaagagcatgcaatgcctaaggacctcaagaaaatgctggaaaacaaggtcatagaaacccttccgggatttcagcacgtgaagttgtccgttgtcaaaacgattcttctgaaggaaaattttccaggagaaaacatagtgtcaaagagcttttcctctcacagtgatctgatcactggtgtgtatgagggtggacttaagatctgggaatgcacatttgacctgctggcctacttcacaaaggctaaagttaagtttgctggaaagaaagtcctggatttaggctgcggaagcggcctgctgggtattaccgcgttcaagggtggcagtaaagaaattcactttcaggactacaactctatggtcatcgatgaagtcacactacctaacgtcgttgcgaactctacactggaagatgaggaaaatgacgtgaacgaacctgatgtcaagagatgccgcaaaccgaaagttacacagctctataagtgccgattctttagcggcgagtggtcagagttctgcaagctagttctgagcagcgaaaagctgttcgttaaatatgatctgatccttacctctgagacaatctataatcccgattattacagtaacctgcatcaaacgtttctccgacttctgtccaaaaacgggcgtgtgctgctggcctccaaagcccactacttcggggtgggcggaggtgtccatctttttcagaaattcgttgaggagagagacgtctttaaaactaggatacttaaaatcatcgacgagggcttgaaaagatttatcatcgagatcacgttcaagtttccaggatag

SEQ ID NO: 299174 - DNA, 1119 bp, Artificial Sequence
  derived and/or modified sequence
atgactttccagttcaactttaccattgaggatcacctggaaaatgagttaacacccatacgcgacggtgcactcacactggattctagtaaagagcttagtgtctccgaatctcagaaaggcgaagagcgggaccgcaaatgctcggcggagcagttcgatctgccgcaagatcacctttgggaacataaatccatggagaatgccgctcccagccaggacacagactcccctttgtcagcagcttcgagcagtcgaaatttagaacctcacggcaagcagccttccctaagggccgccaaagagcatgcgatgcctaaggaccttaagaagatgcttgagaataaagtgatagagaccctgcccggctttcaacacgtgaaactgagcgtcgtgaagaccatcctgttgaaagaaaacttccctggggaaaatattgtgtcgaaatcgtttagctcccattccgatttgatcacaggcgtttatgagggggggctgaagatctgggagtgcacctttgaccttctcgcttactttacgaaggctaaggttaaatttgcaggcaaaaaagtactggacctggggtgcgggtcagggttactgggaattacggcttttaaaggtgggagcaaagagattcatttccaggattataattccatggtgatagatgaggtgactctgcccaatgtggtggccaacagcacactggaggatgaagaaaatgacgtgaatgaacccgatgtgaagcgctgtagaaaacctaaagtcacccagctgtacaagtgccggtttttcagcggcgaatggtccgagttttgtaagttggtgctctctagtgagaagctcttcgtgaaatacgatctcatccttacatccgaaactatctacaaccctgactactacagtaatttacaccagacgtttctccgattgctcagcaaaaacgggcgtgtactgctggcctctaaagcccactactttggcgtcggaggcggcgtgcatctctttcagaaatttgtcgaggaacgggacgtgttcaagactaggattcttaaaatcattgatgagggcttgaaacggttcatcatcgagatcacattcaaattccccggatag

SEQ ID NO: 299175 - DNA, 555 bp, Artificial Sequence
  derived and/or modified sequence
atgaccttccagtttaattttacaattgaggaccatcttgagaacgaattaacacctattcgggatggggctctgaccctcgattcttccaaagagctctctgtgagtgaatcacagaaaggggaggaacgcgatcggaaatgcagcgccgagcagttcgacctgcctcaagaccacctgtgggagcataagtccatggagaacgcagcccccagccaggacaccgattctcccctgtccgcagcttctagcagccgcaacttggaaccccacggcaagcagccttctctccgcgctgcaaaggaacacgccatgcccaaagacttgaagaaaatgttggagaacaaggtaatcgagaccttgccaggatttcaacatgtgaagctgtcagtggtcaagaccatcttgctgaaagagaattttcctggggaaaacatcgtgagcaaaagctttagctcccattcagacctcatcactggcgtgtacgaaggaggccttaaaatctgggagtgtacctttgatttgctggcctattttacaaaagccaaggtctag

SEQ ID NO: 299176 - DNA, 1119 bp, Artificial Sequence
  derived and/or modified sequence
atgaccttccagttcaacttcaccatcgaggaccacctggagaatgagctgacccccatcagagatggagccctgaccctggacagcagcaaggagctgtctgtgtctgagagccagaagggggaggagcgggacagaaaatgttctgctgagcagtttgacctgccccaggaccacctgtgggagcacaagtccatggagaatgctgcccccagccaggacacagacagccccctgtctgctgccagcagcagcaggaacctggagccccacggcaagcagcccagcctgcgggccgccaaggagcacgccatgcccaaggacctgaagaagatgctggagaacaaggtgattgagaccctgcccggcttccagcacgtgaagctgtctgtggtgaagaccatcctgctgaaggagaacttccctggagagaacatcgtgtccaagagcttcagcagccacagcgacctgatcactggagtgtatgagggcggcctgaagatctgggagtgcacctttgacctgctggcctacttcaccaaggccaaggtgaagtttgctgggaagaaggtgctggacctgggctgcggcagcggcctgctgggcatcacagccttcaagggcggcagcaaggagatccacttccaggactacaacagcatggtgattgatgaggtgaccctgcccaacgtggtggccaacagcaccctggaggatgaagaaaatgatgtgaatgaaccagatgtgaagcgctgcaggaagcccaaggtgacccagctgtacaagtgccgcttcttctctggagagtggagcgagttctgcaagctggtgctgagcagcgagaagctgtttgtgaagtatgacctgatcctgaccagcgagaccatctacaacccagactactacagcaacctgcaccagaccttcctgcggctgctgagcaagaatggccgggtgctgctggccagcaaggcccactactttggagtgggcggcggcgtgcacctgttccagaagtttgtggaggagagagatgtgttcaagacccgcatcctgaagatcattgatgagggcctgaagcgcttcatcatcgagatcaccttcaagtttcctggatag

SEQ ID NO: 299177 - DNA, 555 bp, Artificial Sequence
  derived and/or modified sequence
atgaccttccagttcaacttcaccatcgaggaccacctggagaatgagctgacccccatcagagatggagccctgaccctggacagcagcaaggagctgtctgtgtctgagagccagaagggggaggagcgggacagaaaatgttctgctgagcagtttgacctgccccaggaccacctgtgggagcacaagtccatggagaatgctgcccccagccaggacacagacagccccctgtctgctgccagcagcagcaggaacctggagccccacggcaagcagcccagcctgcgggccgccaaggagcacgccatgcccaaggacctgaagaagatgctggagaacaaggtgattgagaccctgcccggcttccagcacgtgaagctgtctgtggtgaagaccatcctgctgaaggagaacttccctggagagaacatcgtgtccaagagcttcagcagccacagcgacctgatcactggagtgtatgagggcggcctgaagatctgggagtgcacctttgacctgctggcctacttcaccaaggccaaggtgtag

SEQ ID NO: 299178 - DNA, 1119 bp, Artificial Sequence
  derived and/or modified sequence
atgaccttccagttcaacttcaccatcgaggaccacctggagaacgagctgactcccatccgtgatggagccctgactctggactcatctaaagaactgtcagtctccgagtcccagaagggagaggagcgggatcggaaatgcagtgccgaacagttcgatctaccacaggatcacctgtgggagcataagagcatggaaaacgcagcacccagccaggataccgactctcccctttcggctgcttctagctcacgcaacctcgagccccatggaaagcagccgagtttaagagctgctaaagaacacgcgatgccaaaggacctgaaaaagatgctcgagaataaagtgattgagaccctgcctggattccagcacgttaagcttagtgttgtgaaaacaatcttattgaaggaaaacttcccaggtgaaaacattgtatccaagagcttctcatctcactcggacctgatcaccggggtgtacgaaggggggctaaaaatttgggaatgcaccttcgaccttctggcctattttactaaggcgaaggtgaagttcgccggaaagaaggtccttgacttaggctgtggaagcggactcctaggcattacggctttcaagggcggctccaaggagatccactttcaggattacaattctatggtgatcgacgaagtcaccctgcctaatgtggttgcaaattcaacactggaggatgaggagaacgacgttaacgagccagacgtgaaacgttgtcgcaagccaaaagtgacccaattgtacaagtgccgattcttttctggagagtggtcagagttctgtaagctagttctctcaagcgagaagctgtttgtgaaatacgatctgatcttaacctcggaaacgatctataatcccgattactactcaaaccttcatcagacattcctgagactgttgtcaaaaaacggtcgcgttcttttagcaagcaaagctcattatttcggcgtgggaggaggggtacacctattccagaagtttgtggaagagcgcgacgtgtttaagacccgcatcctgaagattattgatgaagggttgaaacggttcattatcgagataacctttaagttcccagggtag

SEQ ID NO: 299179 - DNA, 1119 bp, Artificial Sequence
  derived and/or modified sequence
atgaccttccagttcaacttcaccatcgaggaccacctggagaacgaactgactcctatacgggatggtgctctgacactagacagttctaaagaattatccgtgagcgagtctcagaagggggaggagcgggaccgcaaatgttcggcagaacaatttgatctgcctcaggatcacctttgggagcacaaatctatggagaacgctgctccctcacaggacactgatagcccactgagcgcagcctcctcatcccgaaacttagagccccacggcaagcagcctagtctgcgggccgctaaggaacatgccatgccaaaagacctgaaaaaaatgctcgagaacaaggtgatcgagacactgccaggattccagcacgtgaagttaagtgtggtgaagacgatcttactgaaggagaatttccccggtgagaatattgtcagtaaaagttttagcagtcatagcgacctgattacaggcgtctatgagggcggcctgaagatctgggagtgtacctttgatcttctggcatacttcactaaggcaaaggtgaagtttgcaggcaaaaaagtgctcgacctgggatgtggatccgggctgctgggcatcacagccttcaagggagggtcaaaagaaatacattttcaggactataactctatggtgatagacgaagtgacgctgcctaatgtggtggccaactcaaccctcgaggatgaggaaaacgacgtgaacgagccggatgtgaaaagatgccgcaaacctaaggtaactcagctttacaaatgcaggttcttcagcggagaatggtcagaattttgcaagctggtactgagctccgaaaagttatttgtgaaatacgatttaattcttacctcagagacaatttacaatccagattattactccaacttacaccagacctttttgcgccttctcagcaaaaatgggcgtgtcctgctggcgtcgaaggcgcactactttggcgtcggggggggagtgcatctgttccagaagttcgttgaggagagggatgtctttaagactcgcatcctgaaaattatagacgaaggactgaagcgatttattattgaaataacctttaagttccccggctag

SEQ ID NO: 299180 - DNA, 555 bp, Artificial Sequence
  derived and/or modified sequence
atgaccttccagttcaacttcaccatcgaggaccacctggagaacgaattaacccccatcagggacggggccctgacgctggactcttcaaaggagctttcggtgagcgaatcacaaaaaggagaggagcgagaccgcaaatgttccgcagaacagttcgacctgcctcaggaccacctgtgggagcataagtccatggagaatgctgcaccatcccaggatactgattcacctctttcggccgctagttcctctagaaacctcgagccacacggaaaacaaccatctttgagagccgcaaaggagcacgccatgcctaaggatcttaagaagatgctcgaaaacaaggtcattgaaaccttgcctggcttccagcacgtgaagctttcagtagtgaaaacaatcttactaaaggaaaacttccccggcgagaatatcgtcagcaaaagtttctcttcccatagtgatctgataaccggtgtgtatgaaggaggtctaaagatttgggaatgtacattcgatttgttggcctacttcactaaagctaaagtgtag

SEQ ID NO: 299181 - DNA, 1119 bp, Artificial Sequence
  derived and/or modified sequence
atgactttccaatttaacttcacgattgaagaccatctggaaaacgagcttacaccaataagagatggtgctctgactttggacagtagtaaggagctctcagtgtccgaatcccagaagggagaggagcgtgataggaagtgcagcgctgagcaattcgacctcccccaggaccacttgtgggagcataagtccatggaaaacgctgccccatcgcaggacaccgactctcctctgagcgcagcttcctcatctagaaacctagagccccacggaaaacaaccatccctgcgggcagccaaggagcacgccatgcctaaggacttgaagaagatgcttgaaaataaagtgattgagacgctccccggtttccagcatgtgaagttgtccgtcgtaaaaaccattttattgaaggagaacttccctggagagaacattgtgagcaagtccttttcctcacacagcgaccttattacaggagtctatgagggcggactgaagatctgggaatgtaccttcgacctgctcgcatacttcacaaaggcgaaggtcaagttcgccggtaagaaggtgctcgatctcggatgtggatccgggttgctcgggatcacagcttttaagggcggaagcaaggagattcactttcaagattacaacagtatggttattgacgaggtcacactgccaaacgttgtggccaatagcacactcgaggacgaagagaacgacgtgaacgaaccggatgttaagcgctgccgcaagcctaaagtcacgcagctgtacaaatgtcgttttttctctggagaatggtcggagttctgcaagctggtcttgtcttcggaaaagcttttcgttaagtatgacctcatactaaccagcgagacgatttacaatcctgactattactctaacctgcatcagaccttcctaaggctgcttagcaaaaacggacgggttctactcgcctcaaaggcccactacttcggggtgggcggaggcgtccacctgttccaaaaatttgtggaagagagagatgttttcaagacaagaattttaaagatcatcgacgaggggctaaaacgattcataattgagatcaccttcaaatttccaggctag

SEQ ID NO: 299182 - DNA, 1119 bp, Artificial Sequence
  derived and/or modified sequence
atgaccttccagtttaacttcactatagaggatcatctcgagaacgaacttactcctatacgagacggggctctgactctagactcctccaaggaactctctgttagcgaatcacagaagggagaggagcgcgataggaagtgcagcgccgaacagtttgacctcccccaagaccacttatgggagcacaagtcaatggagaatgccgctccaagccaagataccgacagtcctctctcagcagctagcagttcgcgaaatctcgagcctcacgggaagcagccctctctacgcgctgcaaaagagcacgcgatgcccaaagatctgaagaaaatgctcgagaacaaggttatagagaccctgcccggattccagcatgtgaaactgtccgttgtgaaaactatcctgcttaaggaaaatttcccgggagagaacatcgtgagcaagtctttttcatctcattccgatctcattaccggggtatacgaaggcggtctgaaaatttgggagtgtacattcgaccttttggcctactttacaaaagcaaaagtgaagttcgccggtaagaaagtcctcgatctgggctgcggctccggactgcttgggattaccgcttttaagggaggcagcaaggagatacacttccaggattacaactcgatggtcattgacgaagtcacactccccaatgtagtggccaattccactctggaggacgaggaaaacgatgtgaatgaacctgatgtcaaacgctgtagaaagcccaaagttacccaattgtataagtgtagatttttttctggcgagtggtcagagttttgtaagctggtgttgtctagcgagaagctgttcgtgaaatacgatctcatcctgacctccgaaactatctataacccagactattactccaacctgcaccagacatttctccgccttctgtccaagaatggacgcgtgctgttggcaagtaaggctcactactttggtgtgggcggtggtgtacacttattccagaagttcgtggaggaaagggacgtcttcaagaccagaatcctgaagattatcgacgagggactgaagagatttatcatcgagattaccttcaagtttcccggatag

SEQ ID NO: 299183 - DNA, 555 bp, Artificial Sequence
  derived and/or modified sequence
atgacctttcaatttaatttcacaattgaagatcacctggagaacgagttgactcctattcgcgacggcgcactgaccctggatagcagtaaagaactgtccgtttcggaaagtcaaaagggagaggagcgggatcgcaaatgcagcgcagagcaattcgacctaccccaggatcatctgtgggagcataaaagcatggaaaatgctgctcctagtcaagacacggacagtcctctgtcagccgcttcgagcagtagaaatctggaaccccacggcaaacaaccctcactgcgcgctgccaaggaacatgccatgccgaaagaccttaaaaagatgttggaaaacaaggttatagagacgcttcctgggttccagcatgtgaaacttagcgtagtgaagaccatactcctgaaggaaaatttcccaggggagaatattgtatctaagtccttctcatcacactctgacctgatcaccggggtttacgaggggggtctgaagatttgggaatgtacattcgatttgctcgcctactttaccaaagcaaaagtgtag

SEQ ID NO: 299184 - DNA, 850 bp, Artificial Sequence
  derived and/or modified sequence
gtccctcaaggccggaaagaaagtcgggcttctctagcccctggaggactcgactcactggtgcgcgatttaggtccggaggaggcgttgtgagagctgcttggaaagaggaccaaagacgtctaaaaagtcatttggaaatatctctaaatatttgttaccatgtataagctgctaaagagaaattgggcccaacaaaactaattgaataattgaggcagatttgtgtgtatcatcaaattctatccagaagttgaagaatctgaatttaaagattgtgtgcatttaataagaggatgacctttcagtttaatttcactatagaagaccatctggaaaatgaattaacacccattagagatggagctttgaccctggattcctcaaaagagctgtcagtctcagaaagtcaaaaaggagaagagagggacagaaaatgttctgcagaacaatttgacttgcctcaggatcacttgtgggaacataagtcaatggaaaatgcagctccctctcaagacacagacagtccactcagtgcagccagcagttcaaggaacttggagccacatggaaaacagccctccttgagagctgccaaagagcatgctatgcctaaagatttaaagaagatgttagaaaataaagtcatagaaacattaccaggtttccagcatgttaagttatcagtagtgaaaaccatcttgttgaaagagaacttccctggagaaaacatagtttcaaaaagcttttcttctcactctgatctgattacaggtgtttatgagggaggcttaaaaatctgggaatgtacctttgacctcctggcttatttcacaaaggccaaagtgaa

SEQ ID NO: 299185 - DNA, 1426 bp, Artificial Sequence
  derived and/or modified sequence
gaggaaagaggcgcgttcctagccgcgggactgggtgacccgcctctcccccaaattagctgcttggaaagaggaccaaagacgtctaaaaagtcatttggaaatatctctaaatatttgttaccatgtataagctgctaaagagaaattgggcccaacaaaactaattgaataattgaggcagatttgtgtgtatcatcaaattctatccagaagttgaagaatctgaatttaaagattgtgtgcatttaataagaggatgacctttcagtttaatttcactatagaagaccatctggaaaatgaattaacacccattagagatggagctttgaccctggattcctcaaaagagctgtcagtctcagaaagtcaaaaaggagaagagagggacagaaaatgttctgcagaacaatttgacttgcctcaggatcacttgtgggaacataagtcaatggaaaatgcagctccctctcaagacacagacagtccactcagtgcagccagcagttcaaggaacttggagccacatggaaaacagccctccttgagagctgccaaagagcatgctatgcctaaagatttaaagaagatgttagaaaataaagtcatagaaacattaccaggtttccagcatgttaagttatcagtagtgaaaaccatcttgttgaaagagaacttccctggagaaaacatagtttcaaaaagcttttcttctcactctgatctgattacaggtgtttatgagggaggcttaaaaatctgggaatgtacctttgacctcctggcttatttcacaaaggccaaagtgaaatttgctgggaaaaaagtcttggatcttggttgtggatcaggtttactaggtataactgcattcaagggagggtccaaagaaattcactttcaagattataacagtatggtgattgatgaagtaaccttacctaatgtagtagctaactccactttggaagatgaagaaaatgatgtaaatgagccagatgtgaaaagatgcaggaaaccaaaagtaacacaactatataaatgccgatttttttctggtgagtggtctgagttttgtaagcttgtactaagtagtgaaaaactttttgtaaaatatgatctcattctcacctcagaaaccatttacaacccagattattatagtaatttgcaccagactttccttagactgttaagtaaaaatggacgtgtacttttggccagcaaagcacattattttggtgtaggtggaggtgttcatctctttcagaagtttgtagaagaaagagatgtttttaagaccagaatactcaaaataattgatgaaggattgaagaggttcataattgaaataacttttaagtttcctggttaattaacattcactgagtatccaaaatgaaataaacagaaggaccaaaaa

SEQ ID NO: 299186 - DNA, 1521 bp, Artificial Sequence
  derived and/or modified sequence
cgggtccctcaaggccggaaagaaagtcgggcttctctagcccctggaggactcgactcactggtgcgcgatttaggtccggaggaggcgttgtgaggtgagctttttcagaagcgcgatcccaggacacgtcgggaagcaagcatccccagagctgcttggaaagaggaccaaagacgtctaaaaagtcatttggaaatatctctaaatatttgttaccatgtataagctgctaaagagaaattgggcccaacaaaactaattgaataattgaggcagatttgtgtgtatcatcaaattctatccagaagttgaagaatctgaatttaaagattgtgtgcatttaataagaggatgacctttcagtttaatttcactatagaagaccatctggaaaatgaattaacacccattagagatggagctttgaccctggattcctcaaaagagctgtcagtctcagaaagtcaaaaaggagaagagagggacagaaaatgttctgcagaacaatttgacttgcctcaggatcacttgtgggaacataagtcaatggaaaatgcagctccctctcaagacacagacagtccactcagtgcagccagcagttcaaggaacttggagccacatggaaaacagccctccttgagagctgccaaagagcatgctatgcctaaagatttaaagaagatgttagaaaataaagtcatagaaacattaccaggtttccagcatgttaagttatcagtagtgaaaaccatcttgttgaaagagaacttccctggagaaaacatagtttcaaaaagcttttcttctcactctgatctgattacaggtgtttatgagggaggcttaaaaatctgggaatgtacctttgacctcctggcttatttcacaaaggccaaagtgaaatttgctgggaaaaaagtcttggatcttggttgtggatcaggtttactaggtataactgcattcaagggagggtccaaagaaattcactttcaagattataacagtatggtgattgatgaagtaaccttacctaatgtagtagctaactccactttggaagatgaagaaaatgatgtaaatgagccagatgtgaaaagatgcaggaaaccaaaagtaacacaactatataaatgccgatttttttctggtgagtggtctgagttttgtaagcttgtactaagtagtgaaaaactttttgtaaaatatgatctcattctcacctcagaaaccatttacaacccagattattatagtaatttgcaccagactttccttagactgttaagtaaaaatggacgtgtacttttggccagcaaagcacattattttggtgtaggtggaggtgttcatctctttcagaagtttgtagaagaaagagatgtttttaagaccagaatactcaaaataattgatgaaggattgaagaggttcataattgaaataacttttaagtttcctggttaattaacattcactgagtatccaaaatgaaataaacagaaggaccaaaaa

SEQ ID NO: 299187 - DNA, 1119 bp, Artificial Sequence
  derived and/or modified sequence
atgaccttccagttcaacttcaccatcgaggaccacctggagaacgagctgacccccatcagagacggcgccctgaccctggacagcagcaaggagctgagcgtgagcgagagccagaagggcgaggagagagacagaaagtgcagcgccgagcagttcgacctgccccaggaccacctgtgggagcacaagagcatggagaacgccgcccccagccaggacaccgacagccccctgagcgccgccagcagcagcagaaacctggagccccacggcaagcagcccagcctgagagccgccaaggagcacgccatgcccaaggacctgaagaagatgctggagaacaaggtgatcgagaccctgcccggcttccagcacgtgaagctgagcgtggtgaagaccatcctgctgaaggagaacttccccggcgagaacatcgtgagcaagagcttcagcagccacagcgacctgatcaccggcgtgtacgagggcggcctgaagatctgggagtgcaccttcgacctgctggcctacttcaccaaggccaaggtgaagttcgccggcaagaaggtgctggacctgggctgcggcagcggcctgctgggcatcaccgccttcaagggcggcagcaaggagatccacttccaggactacaacagcatggtgatcgacgaggtgaccctgcccaacgtggtggccaacagcaccctggaggacgaggagaacgacgtgaacgagcccgacgtgaagagatgcagaaagcccaaggtgacccagctgtacaagtgcagattcttcagcggcgagtggagcgagttctgcaagctggtgctgagcagcgagaagctgttcgtgaagtacgacctgatcctgaccagcgagaccatctacaaccccgactactacagcaacctgcaccagaccttcctgagactgctgagcaagaacggcagagtgctgctggccagcaaggcccactacttcggcgtgggcggcggcgtgcacctgttccagaagttcgtggaggagagagacgtgttcaagaccagaatcctgaagatcatcgacgagggcctgaagagattcatcatcgagatcaccttcaagttccccggctag

SEQ ID NO: 299188 - DNA, 258 bp, Artificial Sequence
  derived and/or modified sequence
atggccgtggaggaggagctgaagaaggaccacgccgagatgcaggccgtgatcgacgccaagcagaagatcatcgacgcccaggtgatcaacggcgacgagatcatccagaccggcaagaccgacagagtgcccggcttcagccagcaccagaccgacgagagagccgaccccagcgagggcgccgtgcagcacgccggcccccagtggcacctgccccaccagccccaccaggccttccaccacggcgagtggtag

SEQ ID NO: 299189 - DNA, 258 bp, Artificial Sequence
  derived and/or modified sequence
atggccgtggaggaagaactcaagaaggaccacgctgagatgcaagcagtgatagacgccaaacaaaagattatcgatgcccaagtgatcaatggtgacgaaatcattcaaaccggcaagaccgatagagtacctggcttttcccagcatcagactgacgaacgagcggatccctctgaaggggctgttcaacatgctggccctcagtggcacctgccccatcagccacatcaggcgtttcatcacggcgagtggtag

SEQ ID NO: 299190 - DNA, 258 bp, Artificial Sequence
  derived and/or modified sequence
atggctgtggaggaggagctgaagaaggaccacgccgagatgcaggccgtgattgatgccaagcagaagatcattgatgcccaggtgatcaatggagatgagatcatccagacaggcaagacagacagagtgcccggcttcagccagcaccagacagatgaaagagctgaccccagcgagggcgctgtgcagcacgccggcccccagtggcacctgccccaccagccccaccaggccttccaccacggggagtggtag

SEQ ID NO: 299191 - DNA, 258 bp, Artificial Sequence
  derived and/or modified sequence
atggccgtggaggaggagctgaagaaggaccacgccgagatgcaggctgtcattgacgccaagcaaaaaatcatcgatgctcaggtaattaatggggacgagatcatccagactggaaaaacagatcgggtacctggcttttctcagcatcagacagacgaaagggcagaccccagtgagggtgccgtccaacatgcaggaccacaatggcacctgccgcatcagccccatcaggcatttcaccatggcgaatggtag

SEQ ID NO: 299192 - DNA, 258 bp, Artificial Sequence
  derived and/or modified sequence
atggccgtggaggaagaactgaaaaaggatcatgctgaaatgcaagctgtgatagatgcaaaacagaagataatcgatgcccaggtgatcaatggtgacgagatcattcagacaggcaaaactgaccgagtccccggatttagccaacatcagactgatgagcgagcggatccatccgaaggggcagttcaacacgcaggccctcagtggcacttgccccatcaaccccaccaggcttttcatcacggtgagtggtag

SEQ ID NO: 299193 - protein, 1269 aa, Artificial Sequence [sequence omitted]

SEQ ID NO: 299194 - DNA, 3810 bp, Artificial Sequence
  derived and/or modified sequence
atgttccccgccctggagagcgacagccccctgccccccgaggacctggacgccgtggtgcccgtgagcggcgccgtggccggcggcatgctggacagaatcctgctggagagcgtgtgccagcagcagagctgggtgagagtgtacgacgtgaagggcccccccacccacagactgagctgcggccagagcccctacaccgagaccaccacctgggagagaaagtactgcatcctgaccgacagccagctggtgctgctgaacaaggagaaggagatccccgtggagggcggccaggagcagcagaccgacagcaccaagggcagatgcctgagaagaaccgtgagcgtgcccagcgagggccagttccccgagtacccccccgagggcgccaccaagctggaggtgcccgccgagagaagccccagaagaagaagcatcagcggcaccagcaccagcgagaagcccaacagcatggacaccgccaacaccagccccttcaaggtgcccggcttcttcagcaagagactgaagggcagcatcaagagaaccaagagccagagcaagctggacagaaacaccagcttcagactgcccagcctgagaagcaccgacgacagaagcagaggcctgcccaagctgaaggagagcagaagccacgagagcctgctgagcccctgcagcaccgtggagtgcctggacctgggcagaggcgagcccgtgagcgtgaagcccctgcacagcagcatcctgggccaggacttctgcttcgaggtgacctacctgagcggcagcaagtgcttcagctgcaacagcgccagcgagagagacaagtggatggagaacctgagaagaaccgtgcagcccaacaaggacaactgcagaagagccgagaacgtgctgagactgtggatcatcgaggccaaggacctggcccccaagaagaagtacttctgcgagctgtgcctggacgacaccctgttcgccagaaccaccagcaagaccaaggccgacaacatcttctggggcgagcacttcgagttcttcagcctgccccccctgcacagcatcaccgtgcacatctacaaggacgtggagaagaagaagaagaaggacaagaacaactacgtgggcctggtgaacatccccaccgccagcgtgaccggcagacagttcgtggagaagtggtaccccgtgagcacccccacccccaacaagggcaagaccggcggccccagcatcagaatcaagagcagattccagaccatcaccatcctgcccatggagcagtacaaggagttcgccgagttcgtgaccagcaactacaccatgctgtgcagcgtgctggagcccgtgatcagcgtgagaaacaaggaggagctggcctgcgccctggtgcacatcctgcagagcaccggcagagccaaggacttcctgaccgacctggtgatgagcgaggtggacagatgcggcgagcacgacgtgctgatcttcagagagaacaccatcgccaccaagagcatcgaggagtacctgaagctggtgggccagcagtacctgcacgacgccctgggcgagttcatcaaggccctgtacgagagcgacgagaactgcgaggtggaccccagcaagtgcagcagcagcgagctgatcgaccaccagagcaacctgaagatgtgctgcgagctggccttctgcaagatcatcaacagctactgcgtgttccccagagagctgaaggaggtgttcgccagctggaagcagcagtgcctgaacagaggcaagcaggacatcagcgagagactgatcagcgccagcctgttcctgagattcctgtgccccgccatcatgagccccagcctgttcaacctgatgcaggagtaccccgacgacagaaccagcagaaccctgaccctgatcgccaaggtgatccagaacctggccaacttcgccaagttcggcaacaaggaggagtacatggccttcatgaacgacttcctggagcacgagtggggcggcatgaagagattcctgctggagatcagcaaccccgacaccatcagcaacacccccggcttcgacggctacatcgacctgggcagagagctgagcgtgctgcacagcctgctgtgggaggtggtgagccagctggacaagggcgagaacagcttcctgcaggccaccgtggccaagctgggccccctgcccagagtgctggccgacatcaccaagagcctgaccaaccccacccccatccagcagcagctgagaagattcaccgagcacaacagcagccccaacgtgagcggcagcctgagcagcggcctgcagaagatcttcgaggaccccaccgacagcgacctgcacaagctgaagagccccagccaggacaacaccgacagctacttcagaggcaagaccctgctgctggtgcagcaggccagcagccagagcatgacctacagcgagaaggacgagagagagagcagcctgcccaacggcagaagcgtgagcctgatggacctgcaggacacccacgccgcccaggtggagcacgccagcgtgatgctggacgtgcccatcagactgaccggcagccagctgagcatcacccaggtggccagcatcaagcagctgagagagacccagagcaccccccagagcgccccccaggtgagaagacccctgcaccccgccctgaaccagcccggcggcctgcagcccctgagcttccagaaccccgtgtaccacctgaacaaccccatccccgccatgcccaaggccagcatcgacagcagcctggagaacctgagcaccgccagcagcagaagccagagcaacagcgaggacttcaagctgagcggccccagcaacagcagcatggaggacttcaccaagagaagcacccagagcgaggacttcagcagaagacacaccgtgcccgacagacacatccccctggccctgcccagacagaacagcaccggccaggcccagatcagaaaggtggaccagggcggcctgggcgccagagccaaggccccccccagcctgccccacagcgccagcctgagaagcaccggcagcatgagcgtggtgagcgccgccctggtggccgagcccgtgcagaacggcagcagaagcagacagcagagcagcagcagcagagagagccccgtgcccaaggtgagagccatccagagacagcagacccagcaggtgcagagccccgtggacagcgccaccatgagccccgtggagagaaccgccgcctgggtgctgaacaacggccagtacgaggaggacgtggaggagaccgagcagaacctggacgaggccaagcacgccgagaagtacgagcaggagatcaccaagctgaaggagagactgagagtgagcagcagaagactggaggagtacgagagaagactgctggtgcaggagcagcagatgcagaagctgctgctggagtacaaggccagactggaggacagcgaggagagactgagaagacagcaggaggagaaggacagccagatgaagagcatcatcagcagactgatggccgtggaggaggagctgaagaaggaccacgccgagatgcaggccgtgatcgacgccaagcagaagatcatcgacgcccaggagaagagaatcgtgagcctggacagcgccaacaccagactgatgagcgccctgacccaggtgaaggagagatacagcatgcaggtgagaaacggcatcagccccaccaaccccaccaagctgagcatcaccgagaacggcgagttcaagaacagcagctgctag

SEQ ID NO: 299195 - DNA, 3810 bp, Artificial Sequence
  derived and/or modified sequence
atgttcccagcactggaatcagactcacccctcccacccgaggatctggatgccgtcgtgccggtatccggcgcagtggccggtggtatgctggacagaattttgctggagtctgtttgtcagcaacagtcgtgggtgagagtatatgacgtcaagggaccgccaacgcatcggctgagttgtggacaatcgccatacacagaaactactacctgggagagaaaatattgtatcctgaccgactcacagttggtgctgctcaacaaggagaaggagataccagtggagggaggacaggaacagcaaaccgattctaccaagggtagatgtttgagacgcactgtgtccgtcccatcagaaggacagttccccgaataccctcctgagggagccaccaaattagaagtccctgctgagcgctcccccaggcgtagaagtatatcgggcactagtacgtcagagaagcctaactctatggacactgcaaacacgtcacctttcaaagtccccggatttttttccaaaaggttgaaggggtcaatcaagaggactaaatcacagagcaaactggatagaaatacgagcttcagactcccatccctcaggtctacggatgatagatctcggggcctgccgaaactgaaagagagccgcagccacgagtctctgctgtcaccctgctctacggtggagtgcctggatcttggaaggggagagccagtttcggtcaaacccctgcactcaagcatcttggggcaagacttttgttttgaggtgacatacttgagtggctctaaatgcttttcgtgtaattctgcttccgagcgagataagtggatggagaatctcaggcgcacagtccagcccaacaaggacaattgccggagggcggagaacgtgctgcggctgtggatcatagaagccaaggacctggcgccgaagaaaaagtacttctgtgagctgtgtctggatgacaccctcttcgcgcgcacaacctcaaagacgaaggctgacaatatcttttggggagaacatttcgagttcttcagcctccccccgttacattcgattactgttcacatatataaagatgtcgagaagaaaaaaaaaaaggataagaataattatgtgggacttgtgaatatcccaactgcgagtgtcaccggtagacaattcgtggaaaaatggtacccggtttccactccaacgccaaacaaaggcaaaaccggcggtccgagcattcgaattaagtctagattccaaaccataaccattcttccaatggaacaatacaaggagtttgcagagttcgtaactagtaattacaccatgctgtgctccgtgttggaacctgtaatctccgtccggaataaggaggagttagcctgtgccttggtccacattcttcagtccaccggcagagctaaggactttctgaccgacttggtcatgtctgaagtagaccgctgcggcgaacatgacgtgctgatattccgggaaaataccatcgccactaaatctatagaagaatatctcaaactagtcggccaacagtatctccacgacgcacttggcgagttcataaaggccttatacgagtccgacgagaactgtgaagtcgacccatcaaagtgctcctcgagtgagcttatagatcaccaaagcaatttaaaaatgtgttgtgagctcgccttctgcaagattataaactcctattgtgtcttccccagggagctcaaagaggtgttcgcatcatggaagcagcagtgccttaacaggggtaaacaggatatcagcgagcgtctcattagtgcaagcctatttctgagattcttgtgccccgcaatcatgtcgccaagcttgttcaacctcatgcaggagtatcctgacgacagaacatccaggacactgacactaatcgcgaaagtaattcaaaatctggctaacttcgctaaattcggcaacaaagaagagtatatggccttcatgaacgacttcctcgagcatgagtggggcggtatgaagcgcttcctgctggagatctctaatccggacaccatctctaacacacccggttttgacgggtatatcgatctgggtcgggagctgtcagtgttgcattcccttttgtgggaggtggtttctcaactggacaagggggaaaattcctttctgcaagcaacagtggccaagctcggacctctgcctcgcgtgttggccgacatcacaaagtccctcacgaacccaactcccatccagcagcagctgaggagattcaccgaacacaacagctctccaaatgtatccggctctctaagctccggcctgcagaagatttttgaggaccctaccgactccgacttgcacaagctgaaaagtccgtcgcaggacaataccgacagctatttccgagggaagactctgcttctggtgcaacaggcctcaagtcagagtatgacttacagtgagaaagatgagcgggaatctagcttgcccaacggaaggagtgttagcctgatggatctccaggatactcacgctgctcaagtagaacacgctagtgtcatgcttgacgtaccaattaggctgacaggctcccaactctccatcacccaggtggcatccattaaacagctgagagagacacagagcacaccgcagagcgcaccccaggtgcgaaggcccctgcatcctgctctgaaccagcccgggggcttgcaaccgttgagtttccagaacccagtctaccacctgaataatcccatacctgccatgcctaaggctagcatagatagtagtctggagaacttatcaactgcttctagtcggagtcaatctaatagcgaagacttcaagctgtcaggaccctccaactcctccatggaggattttactaaaaggagtacacagtccgaagatttttcccgacgacacactgtgccggatcggcacatccccctggcccttcctcggcaaaactctaccggacaggcccaaatacgaaaggtcgaccagggcggccttggtgctagggcaaaggcccctccttccttaccccactctgcctcgctgagaagcacgggcagcatgtctgttgtgagcgcagctcttgttgcagaaccggttcagaacggctctcgatctaggcagcagagcagttcttcccgggagtcaccggtgccaaaggtgcgcgctatacaaagacagcagacccagcaggtccagagccctgtggattccgccaccatgtcacctgtggaaaggaccgcggcttgggtgctgaacaatggacagtacgaagaggatgtagaggagaccgagcagaacctcgacgaggccaaacatgcggaaaaatatgaacaagagatcaccaagctgaaagaacgcttacgggtgtcatccaggagactggaggagtatgaaagacggctcctggtgcaggagcagcagatgcaaaagctgctacttgagtataaagctagacttgaagatagtgaagagagactgaggaggcagcaggaagaaaaggacagccaaatgaagtccatcatcagtcggctcatggcagtggaggaggagcttaagaaggaccacgctgaaatgcaagccgtgattgacgctaaacagaagatcatcgacgcccaagagaagcgcatcgtcagtctggatagcgctaacacacggctcatgtctgccttaacccaagtcaaggagagatactcaatgcaggttcgaaatgggataagtcccaccaacccaacgaaactgagcattaccgaaaacggggaattcaaaaacagcagttgttag

SEQ ID NO: 299196 - DNA, 3810 bp, Artificial Sequence
  derived and/or modified sequence
atgtttcctgccctggagagtgacagccccctgcccccagaggacctggatgctgtggtgcctgtgtctggagctgtggccggcggcatgctggaccgcatcctgctggagagcgtgtgccagcagcagagctgggtgcgggtgtatgatgtgaagggcccccccacccaccggctgagctgtggccagagcccctacacagagaccaccacctgggagaggaagtactgcatcctgacagacagccagctggtgctgctgaacaaggagaaggagatccctgtggagggcggccaggagcagcagacagacagcaccaagggccgctgcctgcggaggacagtgtctgtgcccagcgagggccagtttcctgagtacccacctgagggcgccaccaagctggaggtgcctgctgagaggagcccccggcggcgcagcatcagcggcaccagcaccagcgagaagcccaacagcatggacacagccaacaccagccccttcaaggtgcccggcttcttcagcaagaggctgaagggcagcatcaagaggaccaagagccagagcaagctggacaggaacaccagcttccggctgcccagcctgcggagcacagatgacaggagccggggcctgcccaagctgaaggagagccgcagccatgagagcctgctgagcccctgcagcacagtggagtgcctggacctgggccgcggggagcctgtgtctgtgaagcccctgcacagcagcatcctgggccaggacttctgctttgaggtgacctacctgagcggcagcaagtgcttcagctgcaacagcgccagcgagcgggacaagtggatggagaacctgcggaggacagtgcagcccaacaaggacaactgcagaagagcagaaaatgtgctgcggctgtggatcatcgaggccaaggacctggcccccaagaagaagtacttctgtgagctgtgcctggatgacaccctgtttgcccggaccaccagcaagaccaaggctgacaacatcttctggggcgagcactttgagttcttcagcctgccccccctgcacagcatcaccgtgcacatctacaaggatgtggagaagaagaagaagaaggacaagaacaactacgtgggcctggtgaacatccccacagcctctgtgacaggccggcagtttgtggagaagtggtaccctgtgtccacccccacccccaacaagggcaagacaggaggccccagcatccgcatcaagagccgcttccagaccatcaccatcctgcccatggagcagtacaaggagtttgctgagtttgtgaccagcaactacaccatgctgtgcagcgtgctggagcctgtgatctctgtgaggaacaaggaggagctggcctgtgccctggtgcacatcctgcagagcacaggccgggccaaggacttcctgacagacctggtgatgtctgaggtggacagatgtggggagcatgatgtgctgatcttccgggagaacaccatcgccaccaagagcattgaggagtacctgaagctggtgggccagcagtacctgcatgatgccctgggggagttcatcaaggccctgtatgaaagtgatgagaactgtgaggtggaccccagcaagtgcagcagcagcgagctgattgaccaccagagcaacctgaagatgtgctgtgagctggccttctgcaagatcatcaacagctactgtgtgttcccccgggagctgaaggaggtgtttgcctcctggaagcagcagtgcctgaacagaggcaagcaggacatcagcgagcggctcatcagcgccagcctcttcctgcgcttcctgtgcccagccatcatgagccccagcctcttcaacctgatgcaggagtacccagatgacaggaccagcaggaccctgaccctcatcgccaaggtgatccagaacctggccaactttgccaagtttggaaacaaggaggagtacatggccttcatgaatgacttcctggagcacgagtggggcggcatgaagcgcttcctgctggagatcagcaacccagacaccatcagcaacaccccaggctttgatggctacatcgacctgggccgggagctgtctgtgctgcacagcctgctgtgggaggtggtgtcccagctggacaagggagaaaattccttcctgcaggccaccgtggccaagctgggccccctgccccgggtgctggccgacatcaccaagagcctgaccaaccccacccccatccagcagcagctgcggcgcttcacagagcacaacagcagccccaacgtgtctggcagcctgagcagcggcctgcagaagatctttgaggaccccacagacagcgacctgcacaagctgaagagccccagccaggacaacacagacagctacttccggggcaagaccctgctgctggtgcagcaggccagcagccagagcatgacctacagcgagaaggatgagcgggagagcagcctgcccaacggccgctctgtgtccctgatggacctgcaggacacccatgctgcccaggtggagcacgcctctgtgatgctggatgtgcccatccggctgaccggcagccagctgagcatcacccaggtggccagcatcaagcagctgcgggagacccagagcaccccccagagcgccccccaggtgagaagacccctgcacccagccctgaaccagcccggcggcctgcagcccctgtccttccagaaccctgtgtaccacctgaacaaccccatcccagccatgcccaaggccagcattgacagcagcctggagaacctgagcacagccagcagccgcagccagagcaacagcgaggacttcaagctgagcggccccagcaacagctccatggaggacttcaccaagaggagcacccagagcgaggacttcagccgccgccacacagtgcctgacagacacatccccctggccctgccccggcagaacagcacaggccaggcccagatcaggaaggtggaccagggcggcctgggcgcccgggccaaggccccacccagcctgccccacagcgccagcctgcggagcacaggctccatgtctgtggtgtctgctgccctggtggccgagcctgtgcagaatggcagccgcagccggcagcagagcagcagcagccgggagagccctgtgcccaaggtgcgggccatccagaggcagcagacccagcaggtgcagagccctgtggacagcgccaccatgagccctgtggagaggacagctgcctgggtgctgaacaacggccagtatgaagaagatgtggaggagacagagcagaacctggatgaggccaagcacgccgagaagtatgagcaggagatcaccaagctgaaggagcggctgcgggtgagcagccggcggctggaggagtatgaaagaaggctgctggtgcaggagcagcagatgcagaagctgctgctggagtacaaggcccggctggaggacagcgaggagcggctgcggcggcagcaggaggagaaggacagccagatgaagagcatcatcagccggctgatggctgtggaggaggagctgaagaaggaccatgctgagatgcaggccgtgattgatgccaagcagaagatcattgatgcccaggagaagagaattgtgtccctggacagcgccaacacccggctgatgtctgccctgacccaggtgaaggagcgctacagcatgcaggtgagaaatggcatcagccccaccaaccccaccaagctgagcatcacagaaaatggagagttcaagaacagcagctgctag

SEQ ID NO: 299197 - DNA, 3810 bp, Artificial Sequence
  derived and/or modified sequence
atgttccccgccctggagagcgacagccccctgccccccgaggacctagatgctgtggtgcctgttagcggcgctgttgcaggaggtatgctagataggatcttgttagagtcagtttgccagcagcagtcttgggtgagggtgtatgatgtaaaggggcccccaactcaccgcctgtcatgcggacagagtccatacactgagacaaccacttgggagaggaaatattgcatcttgacagatagccagcttgtcctgctgaataaagagaaggagatccctgtagagggcggacaggagcaacagacagactccaccaaaggacgctgcctgagacgcactgtcagcgttcctagtgagggacaatttcctgagtaccctccagagggggcaaccaagctagaggtgccagcagaacggtcccctaggaggagaagtatcagtggcaccagtacgtcagagaagcctaactctatggacaccgccaacacatctccgtttaaagtcccgggattcttcagtaagaggctgaagggatctatcaagcgaactaaaagccagtccaaactcgatcgcaataccagtttccgcctgccgtccctccggtccaccgacgacagatctaggggcctccctaagctgaaggaaagcagatcgcacgaatctctgttgtcaccatgctccactgtggagtgcctcgatttaggcaggggagagccggttagtgtgaaaccactgcactcgtctatcttaggccaggatttctgtttcgaggtgacctatctgtctgggtctaaatgcttttcttgtaactcagcctctgagcgggataagtggatggagaatctgcggagaactgtccagcctaataaggacaattgcaggcgggccgagaatgtgttgcgtctatggattatcgaggccaaagacctggcacccaaaaaaaaatacttttgcgagctgtgcctggatgataccctgttcgcccgaaccacctcaaaaacgaaagctgacaacattttttggggtgagcattttgaattcttctccttgccacctcttcattccattacagttcatatctacaaggatgtggaaaagaaaaagaaaaaggataaaaataactacgtggggctggtgaacatccccacggccagcgttacgggtaggcagtttgtggagaagtggtatcctgtgtcaaccccaacccccaacaaaggaaagactggtggtcctagtatacggatcaagtccaggttccaaactattaccattctgccgatggaacagtataaggagttcgccgaatttgtcacaagtaactacaccatgctgtgtagcgtccttgaaccagtgatctctgtccgcaataaggaggagctggcgtgcgctctggtgcacatcctacaatcaacaggtagagctaaggattttctgacagacctggtcatgtccgaagtcgatcggtgcggagagcatgacgtgctgatctttcgggagaacaccattgctacaaagtctatagaggagtacttaaaacttgtggggcagcagtatctccacgacgcgctcggagaattcattaaggccctgtacgagtccgatgagaattgcgaggtggacccctctaagtgtagctcctcggaactgatagatcaccagagcaacctgaaaatgtgctgcgaactggctttctgcaagatcattaactcatattgcgtttttccgagggagcttaaagaagtattcgcctcgtggaagcagcagtgtcttaacaggggaaaacaagacatttccgaacggctaatcagcgcctctctgtttctgcgcttcctgtgcccagccatcatgtccccttctctctttaaccttatgcaggaatacccagatgacaggacctcccggacgctgacacttatcgccaaggtgattcagaatctagcaaacttcgcgaaattcggcaacaaagaagagtatatggcattcatgaatgatttcttggagcacgagtggggcggaatgaagaggtttctgctggaaattagtaatcccgacactatctccaataccccaggatttgatgggtatatcgatttaggtcgagaattgtcagtccttcacagtctgctatgggaagttgtctcgcaattggataagggagagaatagcttcttgcaggccacggtagcaaaactcgggcctttaccgcgagtcctcgccgacataaccaaatccctgaccaatcccacacccattcagcagcagctccgaaggtttacagaacacaactcttctccaaacgtgagcggatcactgtcaagcggcctgcaaaagattttcgaggatccaactgacagtgatttgcataaattgaagagtccctctcaggataacacagactcctatttcaggggtaaaactcttctgctggtgcaacaggcatctagtcagtcaatgacttactccgagaaagacgaacgcgagtcttccttacccaacggaaggtcagtgtctctgatggacttgcaggacacacacgcagcccaggtagagcatgcaagtgtcatgctggacgttcctatcagattgacaggttctcagctctcgatcacacaggtcgcatctatcaagcagctcagagaaactcagtctacaccccagagtgcccctcaggtcaggcggcctttacacccggcgctgaaccagcccggaggtctgcagccactgtcctttcagaacccagtgtaccatctcaacaatccaatacccgcaatgccaaaggcaagtatagacagttctctggagaatctttcaaccgcttcaagtcggagtcagagcaatagcgaagatttcaagctcagcggcccctcgaactccagcatggaggacttcaccaagcgctcaacgcagagcgaagatttctcacgacggcacactgtcccagacaggcatattccactcgcgttaccccgtcagaatagcaccggccaggcacagattcggaaagtcgatcaaggagggctgggcgcgcgcgccaaagctcctccgtccctccctcacagcgcaagtcttagaagcaccggcagcatgtcggtcgtcagtgctgctctggtggctgaaccagtccagaatggatccagaagtcggcagcagtccagctccagccgggagagccccgtaccaaaggtcagagccatccaacggcagcagactcaacaagtgcagtctcccgtcgactcagccactatgagtccggttgagagaactgcagcgtgggtcctgaacaacgggcagtacgaagaagacgttgaagaaacagagcagaatctcgatgaagctaaacatgctgagaagtacgagcaggagatcacaaagctgaaggaaaggcttagggtgtcctcaaggcgcctagaagaatatgagcgcaggttgctggtgcaagagcagcaaatgcaaaagctgctcctagagtataaggcacgactcgaggacagtgaagagagactgcggcggcaacaagaggagaaggacagccaaatgaaaagtattattagcaggcttatggcggtggaagaggaactgaagaaggatcatgccgagatgcaggctgttattgacgcaaaacagaagataattgacgctcaggagaaaagaatagtctcgctagattccgcgaatacccggctgatgtccgccctgacccaggtgaaggagcggtacagtatgcaggtccgcaatggcatttcccccaccaatcccacaaagctgtcgatcacagagaatggggagtttaagaattcttcgtgctag

SEQ ID NO: 299198 - DNA, 3810 bp, Artificial Sequence
  derived and/or modified sequence
atgttcccagccctggagagtgatagtccactccccccagaagatctggatgcagtggtgcctgtttctggcgctgtcgcaggaggaatgctggaccgcatactacttgagagtgtgtgtcagcagcagagctgggtcagggtgtatgacgtaaagggtccccctacccatcgactcagttgcggacaatcaccatacaccgaaaccacgacgtgggagaggaaatattgcatcctgacagactctcagctagttctcctgaataaggaaaaagaaatccccgtagaaggtggacaggaacagcagacagattctaccaaaggccgttgccttaggaggaccgtcagcgtcccatcggaagggcaatttcccgaatatcctcctgagggagccaccaaactggaagtcccagccgagcggtctccacgacggcgttcgatttctggcacctcgacctcggaaaaaccaaattccatggacacggctaacacgtcgccattcaaggtgccaggattctttagtaaaagactcaaggggtctattaagagaacgaaatctcaatccaagttggaccgaaacacctctttcagacttccaagtttacgtagcacagacgacaggtcccggggtttgcccaagctgaaagagtctcgctcccacgagagccttctgagcccctgctccacggttgaatgcctcgatcttggaagaggtgaacccgtcagcgttaaacccttgcattcctcaattcttggacaggacttttgcttcgaggttacctatttgtcgggttccaaatgcttctcatgcaatagtgccagcgagagggacaaatggatggagaatctccggagaaccgttcaaccgaacaaagacaattgtcggagggcggagaacgttttgcggctgtggatcattgaggccaaagacctggcccctaaaaagaagtacttctgtgaactctgcctggacgatacactgtttgccagaaccacatcaaaaactaaagccgacaacattttttggggcgaacactttgagtttttctctttgcctccattgcatagtattacagtgcatatttataaggacgtagagaaaaagaaaaagaaggataaaaataactatgtcggtctggtgaatattcccacagcatccgtaaccggcagacagtttgtagaaaagtggtatcctgtttccaccccaacaccgaacaagggaaagacggggggacctagcatccggatcaaatcccgcttccagacgatcactattctccctatggaacagtataaagagttcgcagaatttgttaccagtaactataccatgctttgctccgtactagaaccggtaatttccgttcgcaataaagaagagctagcatgcgctctggtgcacatcctgcagagcactggtcgggctaaggactttctgactgatctcgtaatgtctgaagtggatagatgcggcgagcatgatgtcctcatattccgtgagaacacaatcgcgactaaatctatcgaagagtatctgaagctagtagggcagcagtaccttcatgacgccctgggggagtttataaaagccttgtacgagagcgatgagaattgcgaggtggaccctagcaaatgctcatcaagtgagctcatagatcaccagtccaacctgaagatgtgttgcgaattggccttctgcaagataataaactcatattgtgtgtttcctcgcgaactgaaggaggtgttcgccagctggaagcagcagtgcctgaatcggggtaaacaagatatctcagaaaggctgatttccgcaagcctgtttctgcggtttttatgtcctgccataatgtccccatctctgtttaatctcatgcaggagtaccctgacgatcgtacgtccagaactttgacactgatagcaaaagtgatccagaacctcgccaactttgcgaagttcggcaacaaggaagaatacatggcgtttatgaacgatttcctggagcacgagtggggcggaatgaagagatttctcctggagatcagtaaccctgacacaatctctaacacgcccggttttgacgggtacatcgacctcggacgcgaactctctgttctccactccctgctctgggaggtggtgtcacagctcgataagggagaaaattcatttttacaagcgacagtggccaagctggggccactgccacgggtgctggcagacatcactaaatcactcaccaatcctacacccattcagcaacaactgaggcggtttactgagcataattcgagcccaaatgtgtctgggagtctgagctccgggttgcaaaagatctttgaagatcccacagacagcgatctgcacaaactgaaaagtccctcacaggataacaccgatagctacttcagagggaagactctgttgctggtgcagcaggcctcatctcaatctatgacgtattccgaaaaggacgagagagaatctagcctccctaacggccgatccgttagtctgatggacctgcaggatacccatgccgctcaggttgagcatgcttcagtgatgctcgacgtccccatccgccttaccggatcacagctgtccatcactcaggttgcatccataaaacagctccgcgagacccagagtaccccacagagcgcccctcaagtcaggcgcccattgcatcccgctttaaaccagcctgggggactgcagcctctctcattccagaaccccgtctaccacctgaacaatcccattcccgctatgcccaaagcatcaatagactcaagcttggagaacttgagcacggcctccagtagaagtcagtctaattctgaggacttcaaattatcaggcccatctaattcatctatggaagacttcactaaacgctcaacccagtcagaggacttctcgcgccgtcacactgtccccgatcggcacatccccctggctctgccccgacaaaatagcactgggcaagctcagatcaggaaggtagaccaaggcggactcggggctcgcgcaaaagccccaccctcactcccacactccgcttccctccggtcaacgggcagcatgtctgtcgtgtcagcggcactcgttgccgagccagtccagaacggttcgaggtcgcgtcagcaatcgtccagcagtcgggagagccccgtgccaaaagtgcgggctatccagcgacagcagacccagcaggtccaaagccctgtggactccgcaacaatgagtccagtggagcggactgccgcatgggttttaaacaacggccagtacgaggaggatgtggaagaaactgagcaaaacttggacgaggcaaaacatgctgagaaatacgaacaggagataaccaagttgaaagaaaggttaagggtgtcctcacgacgactggaagagtacgaaagaaggctcctggtgcaggagcagcagatgcagaaactgcttctagagtataaagcacgcctagaggatagcgaggagcgcttaagaagacagcaggaagagaaagacagccagatgaagtccattataagcaggctcatggccgtggaggaggagctaaagaaggatcatgcggaaatgcaagctgtgattgatgccaagcaaaagatcattgatgctcaagagaaaagaattgtgtcattagactctgccaatactaggctgatgtccgctctaacgcaagtcaaagaaaggtatagtatgcaggttcggaatggaatcagccccacaaacccaacaaagctcagcattactgaaaacggcgaatttaagaacagcagctgctag

SEQ ID NO: 299199 - DNA, 10898 bp, Artificial Sequence
  derived and/or modified sequence
ccctcgattgcttcagcctatcaccctgggatgccgcctgccgctgccgccgccgccgccgccgccaccgccaccgccaccgccaccgccaccgccgtggctgccgggtttgtgggatccgccgcggagcaggagccagagctgtggccggagctgtggcctgagagtcagggggcgggcaggctcattccagaagtgggggccgaggacaggcgggctagaacccggggccaccgccccctacccctcctcaggctgagggaacgggcactcggagcttctgaggcggcggcggcgggagccggtcagagggggcggcccctggcggcgacgcccccaagcccagccctgcccggccccgctccatccccagccagagcctggtctgaccgcgagagacgccggcggggctgaagaaggcggctccgaggaggtgggagggcgagcctcccctcccgggttcttctgcgtcctctcccgggagggacccacacacacctgagcccggacccacccttggtcggggccacgctggatcctcctcccggcctgggtcccgcccgccgactgcaggtgggctgcatcgcccgagcctcgggcagtgggcgacggggaaggaggtgagaggtgtccgcgccggctgccgctcgggtccctgccctcgctgcgcgctctcctcctccccttaccgcaggcagggcgcggagccgcgcgccagcccgccccgaagccgccgcctcgtccccctcccgcctcggggcaccatggagctctctccgtcgtccggaggagccgcggaggcgctgtcctggccggagatgttcccggcgctggagtccgactcgccgctgcccccggaggacctggacgcggttgtcccagtcagtggagccgtcgccggtggcatgttggatcggatccttctggagtccgtgtgccagcaacagagctgggtccgggtgtacgatgtgaaaggaccacccacccaccgtctgtcttgtggtcagtcaccctacaccgagacaacaacgtgggagcggaagtattgcatcctcacagacagccagttggtattgctcaacaaggagaaggagatacctgtggaagggggacaggagcagcagacagattccaccaaagggcgatgcctgaggagaactgtcagtgtcccttccgagggtcagtttcccgagtacccaccagagggcgccactaaactggaggtaccagcagaaaggtcccctcgtagacggagtatctcagggaccagtacatcagagaaacccaactccatggacactgcaaatacctcacccttcaaagtaccaggattcttcagcaagcgcctgaaaggctccatcaagaggaccaaaagccagtcaaagcttgacagaaacacgagctttcggcttccatcccttcgcagtacagatgacaggtctcgtgggctgcctaaactaaaagagtcacgttcccatgaatccttgctgagcccatgcagcacagtggaatgtctggatcttggtagaggggaacctgtatcagtgaaaccacttcatagtagcatccttggacaagacttctgctttgaggttacctacttaagtggaagtaaatgcttcagctgtaattctgcttctgagagagacaagtggatggaaaaccttcgcaggacagttcaacctaataaggacaattgcaggcgagctgaaaatgttcttcgtttatggatcattgaagccaaggaccttgcccctaaaaagaaatatttctgcgaactgtgccttgatgataccctctttgctcgtacaaccagcaagaccaaagcagacaatattttctggggcgaacattttgaattcttcagccttccacctcttcatagtatcacagttcacatttacaaggatgtggaaaaaaagaaaaaaaaggacaagaataattatgtagggctagtcaacatccccactgccagtgtgactggtcgccaatttgtagaaaagtggtatccagtgagtacacctacacccaacaaaggaaagacaggaggaccttctattcggattaaatcacgtttccaaactatcaccattctgcctatggagcaatacaaagaatttgcagaatttgtcaccagcaactacaccatgctgtgttctgtccttgagccagtaattagtgtgagaaataaagaggagttggcttgtgccttagtgcacattcttcaaagtactggcagagccaaggattttctgactgacttggtgatgtctgaggtggatcgttgtggagagcatgatgtcttgatcttcagagagaacactattgccaccaaatccattgaggaatacctcaagttggtgggacaacagtatcttcatgacgcactgggggagtttatcaaagctttgtatgagtccgatgagaactgtgaagtggatcccagcaaatgttcatctagtgaactgatagaccatcagagcaacctgaaaatgtgctgtgagctggctttctgcaagatcatcaactcttactgtgttttccctcgtgagttgaaagaagtgtttgcatcatggaagcagcagtgcctgaaccgtggcaagcaagacatcagcgagaggctcatcagtgcctcattatttctccgttttctgtgtccagccattatgtctcccagtcttttcaaccttatgcaggagtatcctgatgaccgcacatctcggactctaactcttattgccaaggtcattcagaacctggccaactttgccaagtttggtaacaaagaggaatacatggcattcatgaatgattttttagaacatgaatggggtggaatgaagcgctttcttttggagatctctaatccagacaccatctcaaacaccccaggctttgatggttacattgatctgggccgagagctttcagttttgcattccttactgtgggaagtagtttcccaacttgataagggtgaaaattccttcctacaggcgaccgtggcaaaattggggcctctccctcgtgttcttgctgatattaccaagtcattgactaatcctacgccaatacaacagcaactgagacgcttcactgaacataactccagtccaaatgtcagtggaagcctctcctctgggctgcagaaaatatttgaagaccccactgacagtgatttgcataaactaaaatctccaagccaggacaacacagacagctacttcagagggaaaacattattgctggttcagcaagcctcctctcagagcatgacttattctgaaaaggatgaaagggaaagtagccttcctaatggtcggagcgtctccctcatggacctccaggacactcatgctgctcaagtggagcatgcatctgtcatgcttgatgtgcctatacgcttgaccggaagccagctttccataacccaggtggccagcatcaaacagctgcgggaaacccagagcactccccaaagtgcaccccaagtgagaaggcccctgcacccagccttgaaccagccaggtggccttcagcccttgtcgttccagaaccctgtctatcacctcaataacccaattccagcaatgccaaaggcctctatagattccagtttggagaacctaagcactgccagttccagaagccaaagtaacagtgaagacttcaagctcagtggacccagcaatagcagcatggaagatttcactaaacgtagcactcagagtgaggacttctccaggcggcacacggtgccagatagacacatacctcttgctttgccacgacaaaatagtactgggcaggcccagatccgaaaagtggaccagggtgggttaggtgcccgagccaaagccccaccatccctgccacacagtgcttctttacgtagcaccgggagcatgtcagtggtgtccgcagccctggtggccgaacctgtgcagaatgggagccggtcccggcagcagtcctcttcctccagagagagccctgttcccaaagttagagcaatccagagacaacagacacagcaggttcagtcacctgtggactctgccacaatgtccccagtagagaggacagcagcctgggttctgaacaatgggcagtatgaagaggatgtggaagaaactgagcaaaatctagatgaagccaagcatgctgagaagtatgaacaagaaattactaaactgaaggagcgcctgagagtttccagccggcgactggaggaatatgaacgccgcttgctggtgcaggagcagcagatgcagaagctgctgctggaatacaaggcccgactggaggacagcgaggagcggctccgaagacagcaggaagaaaaagatagccagatgaaaagcatcatcagcaggctaatggctgtggaagaggaactgaagaaggatcatgctgagatgcaagcagttattgatgcaaagcagaaaataattgatgcacaggaaaaacggatcgtgtccctggattcagccaacaccagactgatgagcgcgctgacccaagtgaaggagcggtacagcatgcaggtccgcaatggcatctcccccaccaaccccaccaagctttccatcacggagaatggtgaattcaaaaacagcagctgctgacgggctttgtctgtggaaggagacagaaggaaattgacccactctcctatctccagacctttacctagcccctccaggtttacagaatgttgctacttcacaatggcgatgtggtgagaaactcctgaatgaagaaaggaaccttgtctttcagggcataaggcggcgacttccaaggtcaatgcttttcccccacatctctatgtacatagggaacttagttctgggccatgtacagaaaatatcactgtaatataccaaaaggaagttaataatgtagattacctttttgattattgctatttttattattgttttcctcttgttgaaagcactgcagttgttacaggaagtaaagtaggaactgttgtgtgagcgagacatgagcctgtaggttcagtaggtagagaccaagcatctatctgatagaagcacatggagtgcaataggacattgtgagaaggaatttttcagggattcatctactagtttaaaaaccccactctggccctcttgtcctttcagaaaacatgcaaataccaagatccatacaaaacaataatttattccactgatcaaccaagactggttctggttggacagctaatctgatttggggattcactgtttcagaggacacagacaaaagctgttgcatcaaaactggactttaggagtaatttctattgaactcctgtcaatatgtttatttcctctgtctacagcagatgggagtcttctcttttagacaggggctttttgtttttaaccccaattgtaataaagggtgttctttttcctctttagagtttacaaaactataaatatttgtgtctccacataccatcttcatcttcacacattcactgtgctttcctccccatagtgggagctgtcatcaccaacagggtttactctcccctggagaggttatttaaatagctgtccataagccatccagatcaacaccctttcttccatacagaaaagggctaaccataccacagctggaatctctgaatatttcctattaaaaattttttctatgtgttgttataatttttgtttgggataaagactctatccattgtactagcaaatctatggggggtaattttatctccatctttaacttttaaagtacttcttccccttatcccctcaataaagaaaggaaatccaaatttgaagcatcactctcttaaaagaaaaagaaaataatggaaagtgtcaggatggcacattccagttattattccaatgctcgtagatctgacaataatgacccaatttcaacacttgtcatccatagccttattattatagaacagaaaaagtcatggaaacgaattcatttccttttttccagaggtgtgcaatgtcatcttgaatgcaaccttgattaccagaagtatggaaggttacatgttaaacagacattatatatacaaatatatatataatatatattcacacatatgtacatataactgcacaaataggaaaagttcatgccttctatgctgttcagatataatgttaaaagggtctcaaacctctttaagcaagatctaagtagttgttttatattgagaaagcaacaatgtttctcgaataagttgatgttgattttaaattataagctttaaagaattttttttctagaaaaaggggatggaaaaaaaaggacctgagggagccatatgcatcaagtgagtgtttctccataacagaatatttataagagaacatgtatagtgccctcttttgagtgatgccgacagacaccaagccctccttttcaccaagtcccaggcttgcattccagcctcttgagctctgccctctctcaggtggatctttgtgttggaccttacgtttcagcaacctcaccatggccacataacccacaaccttttaaaacagtttctttcatagcaatccctgtttctgccagacagatctaaaatgggagtttctcactgtgtttatctgatctgcacactttatatccagctgttttggcacttttacgttttcttcacctttggttttggtttgcaaattcttacaccttctctccaagcggagggcacactgtggtcaaaatcacttattttattaggaaaaagaggtaactgttccaaagtgtagtgtcctttgttgaaggaggagggatgtaagcatagatttgttcttgtttctggctattctcagctcaagccatgtttaattcattctttgtaaaagccttcaattgtgccacagaaaacctggtaagagaattgtcagtttcattggccataagtatgtaatgtgggtgatgtcttgccattgaggtttggaagctcttaagtgccgattatggattacagagggctgataaaattacttatattgggaattgagagaagccccaaaaaatcaaatgtgcttttgatggatagagtgtatcttattagcattatgggagctccttagagggctgtcttcactgaaagatttaatgcccaaaacatttggacagattatgcagccttctactaccaggttatcttgaatgaagaagaaatagtaaaaaataataataatagagcattaccaataagctaaaagttcagagttgctgatagatgttaaatgttaagttatcctgtgagcctactcctgtccaaccttttttctcagtatttctttagagaatgctgcaatctgtataagttactctgaaggattttttaagaagagaagccaccaacaggtgataatttttatggagatgtttcttaattggctttccctcagttcaagtaggtaaataactttgtttgctgggaggaggtacatggctgaagagaggcaaatagattaagatagcaatgtcttgcacttcctgtttccctcaaaacaacaccacattgtggggcgcaggatagatcagggttgagtggaatttggaattcaggtgaagtgcttgtaaagtgcatgtctagctgacaacagacttgaccattaatgaggacagtgttggtaggagtcagaaaagagcttcatattccccttttatattactgaagcaataagcaatctgagctgaagcagcaaaaagagtcacatttccatcaggtcatcatattccctgagtctctgcagcaaaagccatgtcagaggggagattataactaggtaactataacaagcacttgagcacttaccatgttccaagcactatcaccaaggtactgttggggtttatggcagtctaacggtaagaaaaatgtggtaaaatgaggtaatcatgctgctatagctttttgctttttttcatatagtatcaagttggtcagaattagctttctctgactggtctgcttccgtgtttctctgtgatggtgttaagattatgaaagaaaaagaagattacctaagactgctacaagtgttaactatatgcccttaagaatgagcttgactttggaagtaaagcttttcagatcttagtctacccggggcctttgttgatgggtctgtggttctgtagacccctggctttcactgtgttctcagaggtacaccagattgagagcagagttcttctttggaagtcccagagcaaaataactgccatcaagtgagtttgcattcgtatttgtttccccttccatagagggttagttttagttacctctagcttggagttcctgagaaggctggttataggactgagcgtgggaaaggaaccctcttcaggattacctcagtcccatcagtctaccccattgtgacattgagcccaacacacacgcttgacaccagactagacttgtcacagggccaaacccaacagccacatgccatagcttcactgcattttcagctacacctttggaggccaccttctcctatcaactgtggaaagccagaagggctcccttctccattctccttccctttttcaagtctaatagtgaaatctcctgcttaccccagcagtaaatagttgccttcctaccccttacctgggggccgataatttgagatactttgttttttcaatgcgtcagttgaaggatttagtttcttaaaagcaagaaatgttggagtgttgaatttttaaatagaatctcttttcatgtttgaatgattgttattagttctagaagcattctctttgtcatgacccgattatgtatactcttgggtttaggaaggacaaaagtgatgaaatttgcatgagatagaataaatatcttaggaggagtgaaagaacctgaggaagagacacgaccctaagggaatgaatgcataagcagtcttctcagtagcccagagtttccaggaaacaggaatatttatatcccttgcccactcttaaaatacatagatacataaaaaggcagtctctgtagacaacacatgcacacacccacacaaaacataattcctggggcttcctttttctgaatgttaatccattttatcgagcagtgattcccaaactttgagattttcagattttatgctctcgtctgttagattttatgacattctatcatcctaaaaaatgtactatatgtgttatatgtatatataagttaaagcaacttgaaattgacttggtttggcattgtctcaagaaccctagatatcattattgataccatggggaatcatagaaataaagttgaatatcattgatctgagagtaggatccagaaataagtagtttcagttcctgatcagttaagcctcaagtgtttgagtaaccaacacagcaagacttgggaaatgcagtgagcacccgaggaaaggaaagtggtagtctttgcctgcatttcagcatgcattttcctttcctactcagttgctatcttccacttaaataccctcatttgaccctaggaagttttttgtttttttttttagtttgagacttaaaaccagatttatttgttgttgtagagagatttccacagaagttgtgttttagggacctccatcatctttgtgggggtacagatatttatgtgtaaatatcattttatgtgatttccaaattttcgagggaaacatttcaattcccagttcaacaaaaggttaaatactaattgactcaatgaccaccttcaggaaagttaaatagtaaattaggttaaattttgactggtgcttagacatttcctagttatattaacttaagcagacagcagcacattaacctgagttacacctgtgaggaaatgaccttctaaatttgattttgtttttcatctccagggccttaataagagtgtgttaacacacgactattttacaatgatagctctaaataatttattttttatttcaagaaagagaaatacaccttagaaaaacaaaacccaagattttattttatttttaaagccatatttttgtgctagtagcatttagattattccgtatgtgagatccgtatcagcatttcattacctgggtttgttctaaagaagatttatttttgttctgtgaataatttttgacagttcttgtacatgtacagatatagatacgtttgaggtcttttattgatattcctacaaagaatacaaataaactttaactttaaacatttcagactaaagttgctactatatttgacatattgctgtcttctagcatgcacctgggtgactaggacacttgaagagaaacaagaaaggaaatgtatgccggaatattcttctaaaaatatattttaacattaagaacagtctgtcctagaatttcccaacttccatgtaataagatttcaatttaggaaaaataactagcattagcatgtattgtgataaaactgttactttcgaattctgcagaatttgaaatctctttaataacttgtgacaggtaaagaaagtttcatctggtttattaggaaatgtagccccacttagcttcctagaccactaccatcctcttgtaattttccagttagattaatggggtttgttttcaggatttttgatgtttggttcaggttttttattttaatttcttaatagaagttcatttgtcattcccaacatgattgttcccaaatacacccatcttctcctgcatccctgtttcattctgtaaaatccagggatgcaggtttcatgtgtagtcttgttttgtgttagttgtaggtctgtgctttttggcacatgtcgagttcttcctaatcttgttctactagggattaaaaaattaaaatttactcaaaatccagagaagattgcatgaaac

SEQ ID NO: 299200 - protein, 85 aa, Artificial Sequence
  derived and/or modified sequence
MAVEEELKKDHAEMQAVIDAKQKIIDAQVINGDEIIQTGKTDRVPGFSQHQTDERADPSEGAVQHAGPQWHLPHQPHQAFHHGEW

SEQ ID NO: 299201 - protein, 153 aa, Artificial Sequence
  derived and/or modified sequence
MHYVHVHRVTTQPRNKPQTKCPSGGQSQGPRGQFLDTVLAAMCPIAMLLTADPGMPPTCLWHTPHAKHKEHLSIHLNMVPKCVHMHVTHTHTNSGSRYVGKYILLIKWSLAMYFVQGSTLSTVTKMSHGKALPDSDTYIQFPNQQGPHTPSIP

SEQ ID NO: 299202 - DNA, 4564 bp, Artificial Sequence
  derived and/or modified sequence
ccggggccctacacgccagacctggctcggggtgggagtgcagaggcaaccaaaaaggaacccacacctccctccagggcccggggcgctgtcagacggggcagcaaccaggagattccctgggcctgcaggaagcccttccgcggaccgaaagattgttccccattttggagatgaagaaactgagactcaaagcagctgagtgaccttcccaaggacacacactgaactgggcggtgatcaggatctgaatgcacagggcgggtgttcagcgattgtttactacgttgaacgtgacctccaggaaagcagttctggccgagatcccctgacaacgcaaagcaagaagtaacgtggaaggaggctccccaagctggctggccattttgctgctgtgtgtggaggtgctgccagtggcatgcccaaacccaaagctggaagaggaataaattacaagtggtcaaggttgcatccttttgagcccaggacctgcttgtaagccgagagggttctctggccctaatctagccaagcaccatggagagaatcagtgccttcttcagctctatctgggacaccatcttgaccaaacaccaagaaggcatctacaacaccatctgcctgggagtcctcctgggcctgccactcttggtgatcatcacactcctcttcatctgttgccattgctgctggagcccaccaggcaagaggggccagcagccagagaagaacaagaagaagaagaagaagaagaagaagaaggatgaagaagacctctggatctctgctcaacccaagcttctccagatggagaagagaccatcactgcctgtttagttaggcaggaagcagaggtgtttcctttctggggctaagcctccttctgaccacacacagacatttcaggaacccctgaaataatgcactatgtccatgtccacagagtaactactcaaccaaggaacaaacctcagactaagtgtcccagtggagggcagtcccagggaccacgtggacaattcttggatactgtcttggcagctatgtgtccaatagcaatgctccttactgcagacccaggcatgcctcccacctgtctctggcataccccacatgcaaagcacaaagaacatttatccatacatctcaatatggttcccaagtgtgtgcacatgcacgtaacacacacacacacaaattcaggtagcaggtacgtgggcaagtatattctgctcatcaaatggtcattggctatgtactttgtgcagggaagtacattatctacagtcacaaaaatgtctcatgggaaagccttgccagattcagacacatatatacaatttcctaaccagcaaggcccccatacaccatctattccataaaccactcaggttacagatgcatgctttcctatttctaactctacacataaacttttactggaagtactcataattggacattccagcaacctgctacagtccccacccttgtgtgtcttgatacagacacaccaagtttctgtgcctctgacccctcacctgtgccaagatgtttaaagtgtgatggttcaaaattcattgaaagctcttttcttgtaactcatgacaaagtccgtcctcattgccactgagaggtgtttaatgtgatccaagacctctctgtgaaacattacccccgcaaaccactcagcaaagtgcctttctccaagcaagaacaaagagctcttggtggtgactgctagaaaattatggaagcccactcatttatgtcagtggactgcaactgtgtacctgtgcaatgtttacagatggaaagggtgaggagatgctacacctgagctaggtatctcctatataaccaaagtttccagcagggaaggaactagacaatcatcagtgcagtctcacagaaggcaacactggaagtgatgtcataaggttgtgatgtgtgcacggtatggcacaggtgggatgcagaggtaacagagtttaaatgaaagtaggatgaagctataaagaggtttatttatatttatattgaagctcaggcaagtgccttgcacacagtaggtacttataactaactgtggttactgttggatatgtgatgttgttaagggtaagcttgtaatacctcaccagttctccccgagtgatcttctcttctaagtgagcccactaattgctgcaatggatgaaattgggtgtttaatgctggagagcacatgtaggtgacacatgtgccttgaggtatgtgaggacatgtaaattagatccacagtgagctgaggagggctttccccgccagagtgaggttgggaagcagagttaatccacttataggatgaactgcttggtatttttattgtattgtgactgtattacaaagatggacaattcactccttgggagcaagttatgctctagaagtttatttacaaatatgctgggcagctctcttgaaatattttcccaaggaagctattctacacagtggcaaaattgctatctaattaataatgtagctaaactatgatatttatagtagcaaaaaactaaattctataagattgcattaaaggaaagatatattctatttgctcacttgggctgcttggtactcacctgccctccaggtgtactttaggcctgtggagggtgggcatttagtggtgacccttgcaccagggttttctaacagatgaccctgtgaatcataatttaaacctgcatatattttatagccagtcacatttgccctctcaccctatatggccataaactgcctaagcactcaggcctcccactcatcaacccctttgaccagagaaagaagcactctggttctctatccccttgtcacatagagagtttgtcatggggcctctggctgtgcccttcacataacagaatgacttgccatctgcctgcaccaaacccagggatgtggaagacatctccccacaactgccactgctcaccaggacaagctgcccttcctgtctccacctctcagtccccctagaatggatggctggggagaggtggaggctgacagctgagacgtagtgtcagatatgatctaggagggcggatcaccgggatccgggaccatacaagtaacatggtttccatggcaactgcttgctcctttgaattaagacagcagtcagttgtcattgccatgacaaggcctctatctccaggcacaatgtccctgctgtctcctaatccaatggacttgctctcaccccagggatgaaacacccagaaactcacttctcagtcacttccacagccgatgactcagaagagccaaacccagaatggggcctctcttttccccatcacagactcccctgacaacctttcctggcgtaactagaggagtcccagtgcaggataggccctaaacgttttgttaaataaacaggtgcatgaaaggagcctaaggccattgttgatatccactctcttctttccacttccttctcatctttttctccatgttttatgcttctctgattccctcttctgcctgcaccagaccagccccagccctttattcctctccattttcactccttccagcctctgtccctgaactgccactggcaacccatgggacctcaggaccagagactgcttgactcatctggggagggtaagttcacgggggacaaaaaaatgattcctaaagaagaggcttcctagaccagcacaggctcgagaaagacatcccctaggcctggacttctgagcagctttagccaggctccggacggcagccagaggaggcctttccccattgctcctttccccattgctcaatggattccatgtttctttttcttggggggagcagggagggagaaaggtagaaaaatggcagccacctttccaagaaaaatataaagggtccaagctgtatagtatttgtcagtatttttttctgtaaaattcaaacacacacaaaagaaaaatttatttaaataaaatactttgaaaatgaaaagtcttgatgtagtcagatggttactctcttaacattaggtattacccccactcagacatcactcagaaatgatcaatgcagggactctttctgtgacacaaatgtcccagccctccctggtcaccgccttcgccatggtagagtcataggtctgaggatgaggaatgtggctgtctcacccttgcttgcaaaacagatggccttggagaccagactccctcaaaggtgccagctacaggaaaaatatactgatgttccttggcaacacttacagaactttccatcaatgaggtccatcaatggcttcttaaaggaaaaggggggaaatagcaaaaacctaaggaagaatggacctttgagttaaatccagtgtttgttgggaaaggagggatcaaaaacctctatagtagccactagggcaaaaactgtgtgtatgtgtgtgtgtaagtgtgtgtacactgttcaatatggttcaatatggtaccaatagccacatgtgactatttaaattcattgcaatgaaataaaattaaaggtatactagctc

SEQ ID NO: 299203 - DNA, 4494 bp, Artificial Sequence
  derived and/or modified sequence
tggagcgaaacctcaactatgccaggcgtcggcccgtaggaaggcagggaacacagagggcgctgccctcggcggcagcggcagattgttccccattttggagatgaagaaactgagactcaaagcagctgagtgaccttcccaaggacacacactgaactgggcggtgatcaggatctgaatgcacagggcgggtgttcagcgattgtttactacgttgaacgtgacctccaggaaagcagttctggccgagatcccctgacaacgcaaagcaagaagtaacgtggaaggaggctccccaagctggctggccattttgctgctgtgtgtggaggtgctgccagtggcatgcccaaacccaaagctggaagaggaataaattacaagtggtcaaggttgcatccttttgagcccaggacctgcttgtaagccgagagggttctctggccctaatctagccaagcaccatggagagaatcagtgccttcttcagctctatctgggacaccatcttgaccaaacaccaagaaggcatctacaacaccatctgcctgggagtcctcctgggcctgccactcttggtgatcatcacactcctcttcatctgttgccattgctgctggagcccaccaggcaagaggggccagcagccagagaagaacaagaagaagaagaagaagaagaagaagaaggatgaagaagacctctggatctctgctcaacccaagcttctccagatggagaagagaccatcactgcctgtttagttaggcaggaagcagaggtgtttcctttctggggctaagcctccttctgaccacacacagacatttcaggaacccctgaaataatgcactatgtccatgtccacagagtaactactcaaccaaggaacaaacctcagactaagtgtcccagtggagggcagtcccagggaccacgtggacaattcttggatactgtcttggcagctatgtgtccaatagcaatgctccttactgcagacccaggcatgcctcccacctgtctctggcataccccacatgcaaagcacaaagaacatttatccatacatctcaatatggttcccaagtgtgtgcacatgcacgtaacacacacacacacaaattcaggtagcaggtacgtgggcaagtatattctgctcatcaaatggtcattggctatgtactttgtgcagggaagtacattatctacagtcacaaaaatgtctcatgggaaagccttgccagattcagacacatatatacaatttcctaaccagcaaggcccccatacaccatctattccataaaccactcaggttacagatgcatgctttcctatttctaactctacacataaacttttactggaagtactcataattggacattccagcaacctgctacagtccccacccttgtgtgtcttgatacagacacaccaagtttctgtgcctctgacccctcacctgtgccaagatgtttaaagtgtgatggttcaaaattcattgaaagctcttttcttgtaactcatgacaaagtccgtcctcattgccactgagaggtgtttaatgtgatccaagacctctctgtgaaacattacccccgcaaaccactcagcaaagtgcctttctccaagcaagaacaaagagctcttggtggtgactgctagaaaattatggaagcccactcatttatgtcagtggactgcaactgtgtacctgtgcaatgtttacagatggaaagggtgaggagatgctacacctgagctaggtatctcctatataaccaaagtttccagcagggaaggaactagacaatcatcagtgcagtctcacagaaggcaacactggaagtgatgtcataaggttgtgatgtgtgcacggtatggcacaggtgggatgcagaggtaacagagtttaaatgaaagtaggatgaagctataaagaggtttatttatatttatattgaagctcaggcaagtgccttgcacacagtaggtacttataactaactgtggttactgttggatatgtgatgttgttaagggtaagcttgtaatacctcaccagttctccccgagtgatcttctcttctaagtgagcccactaattgctgcaatggatgaaattgggtgtttaatgctggagagcacatgtaggtgacacatgtgccttgaggtatgtgaggacatgtaaattagatccacagtgagctgaggagggctttccccgccagagtgaggttgggaagcagagttaatccacttataggatgaactgcttggtatttttattgtattgtgactgtattacaaagatggacaattcactccttgggagcaagttatgctctagaagtttatttacaaatatgctgggcagctctcttgaaatattttcccaaggaagctattctacacagtggcaaaattgctatctaattaataatgtagctaaactatgatatttatagtagcaaaaaactaaattctataagattgcattaaaggaaagatatattctatttgctcacttgggctgcttggtactcacctgccctccaggtgtactttaggcctgtggagggtgggcatttagtggtgacccttgcaccagggttttctaacagatgaccctgtgaatcataatttaaacctgcatatattttatagccagtcacatttgccctctcaccctatatggccataaactgcctaagcactcaggcctcccactcatcaacccctttgaccagagaaagaagcactctggttctctatccccttgtcacatagagagtttgtcatggggcctctggctgtgcccttcacataacagaatgacttgccatctgcctgcaccaaacccagggatgtggaagacatctccccacaactgccactgctcaccaggacaagctgcccttcctgtctccacctctcagtccccctagaatggatggctggggagaggtggaggctgacagctgagacgtagtgtcagatatgatctaggagggcggatcaccgggatccgggaccatacaagtaacatggtttccatggcaactgcttgctcctttgaattaagacagcagtcagttgtcattgccatgacaaggcctctatctccaggcacaatgtccctgctgtctcctaatccaatggacttgctctcaccccagggatgaaacacccagaaactcacttctcagtcacttccacagccgatgactcagaagagccaaacccagaatggggcctctcttttccccatcacagactcccctgacaacctttcctggcgtaactagaggagtcccagtgcaggataggccctaaacgttttgttaaataaacaggtgcatgaaaggagcctaaggccattgttgatatccactctcttctttccacttccttctcatctttttctccatgttttatgcttctctgattccctcttctgcctgcaccagaccagccccagccctttattcctctccattttcactccttccagcctctgtccctgaactgccactggcaacccatgggacctcaggaccagagactgcttgactcatctggggagggtaagttcacgggggacaaaaaaatgattcctaaagaagaggcttcctagaccagcacaggctcgagaaagacatcccctaggcctggacttctgagcagctttagccaggctccggacggcagccagaggaggcctttccccattgctcctttccccattgctcaatggattccatgtttctttttcttggggggagcagggagggagaaaggtagaaaaatggcagccacctttccaagaaaaatataaagggtccaagctgtatagtatttgtcagtatttttttctgtaaaattcaaacacacacaaaagaaaaatttatttaaataaaatactttgaaaatgaaaagtcttgatgtagtcagatggttactctcttaacattaggtattacccccactcagacatcactcagaaatgatcaatgcagggactctttctgtgacacaaatgtcccagccctccctggtcaccgccttcgccatggtagagtcataggtctgaggatgaggaatgtggctgtctcacccttgcttgcaaaacagatggccttggagaccagactccctcaaaggtgccagctacaggaaaaatatactgatgttccttggcaacacttacagaactttccatcaatgaggtccatcaatggcttcttaaaggaaaaggggggaaatagcaaaaacctaaggaagaatggacctttgagttaaatccagtgtttgttgggaaaggagggatcaaaaacctctatagtagccactagggcaaaaactgtgtgtatgtgtgtgtgtaagtgtgtgtacactgttcaatatggttcaatatggtaccaatagccacatgtgactatttaaattcattgcaatgaaataaaattaaaggtatactagctc

SEQ ID NO: 299204 - DNA, 462 bp, Artificial Sequence
  derived and/or modified sequence
atgcactacgtgcacgtgcacagagtgaccacccagcccagaaacaagccccagaccaagtgccccagcggcggccagagccagggccccagaggccagttcctggacaccgtgctggccgccatgtgccccatcgccatgctgctgaccgccgaccccggcatgccccccacctgcctgtggcacaccccccacgccaagcacaaggagcacctgagcatccacctgaacatggtgcccaagtgcgtgcacatgcacgtgacccacacccacaccaacagcggcagcagatacgtgggcaagtacatcctgctgatcaagtggagcctggccatgtacttcgtgcagggcagcaccctgagcaccgtgaccaagatgagccacggcaaggccctgcccgacagcgacacctacatccagttccccaaccagcagggcccccacacccccagcatcccctag

SEQ ID NO: 299205 - DNA, 462 bp, Artificial Sequence
  derived and/or modified sequence
atgcactatgtccacgtacatagggtaacaactcagccccgcaataagccccaaactaaatgccccagcggcgggcagtcacaggggccaagagggcagttcctggacactgttctcgcggcaatgtgcccaatcgcgatgctactgactgctgatccaggcatgccacccacctgtctttggcatacaccacatgcaaaacacaaggagcacctttccattcatctcaatatggtgccaaaatgcgtgcatatgcatgtgacacatactcacacaaactccggtagtcgctatgtaggaaaatatattctgctgataaagtggtcactggcaatgtactttgttcagggaagcactttgagtacagtaaccaaaatgtcacatggcaaagccctcccggacagtgatacttacattcagtttcccaatcagcagggaccacatacaccgtccataccgtag

SEQ ID NO: 299206 - DNA, 1150 bp, Artificial Sequence
  derived and/or modified sequence
gggagtggttaaatgttaaattttacgatgtacgtatttaacccccacacgccccaaacaaatctgacaaaagttaaagaccattccctaggtgtagctctgttcctacatgcaaaattttacatattgttccagggagctcacggtcttctcaggttcatctgtggaaccattcgacaaccaaatgttatggggaagccagtctcatgagctccaacacattcttcagtgcaatcagtggcaatccctgcccacttaggacttttcgaatagtgctcatccctgacttctggataaacttctttgcagaagcccatttgactccaaggacagaaaaaaagagtgcaggttgttattatgcaaagccacagcattaaggagctcaatattcttctagatatctgccctcctgtctgagaatcccatacttagagtatagcaggtcccatctccatttgggatggtggtggtggaaaagggggcgtctctgatgagcagagcatctttaatgcctgctcaggccagagcccctttccaaagacttcgagactgccgtgggcctgctgactcctctcacgctttcaagctacagtgcttcccatcacattgcagaaggccgccttgggtcatatctcgcaaaggaagagctattaacaaatattccatttgtatttcctgcgtggccctccatctggaaatatcttttatctggcaacttttgcaaaatgaaccaaatcttgaaggaggtcttggcaggtttatgctagcctctctatcactccaacaagtcatttccatcctcgccttcacaagggtcaagcaattgtgacttgggttgggagacggggctggcacggaatggtagcaagtcatctaggctctgaggcatctttttaaccctgaaaacgtccacttggagggcaagagccaaatctaaaaaattattatacacactgtctctcagctcaaatatgtatgctctcactccaagttcagatcacaatttacaattccgcattttgtaattgttaagtgcagtctggcttccccaaagacctcaagctcattctgcccaggattaaatccaagagccttcttagcccagtttctggcatgcaggaagcatacaataatggaagaaatgaatgaa

SEQ ID NO: 299207 - DNA, 462 bp, Artificial Sequence
  derived and/or modified sequence
atgcactacgtgcacgtgcaccgggtgaccacccagcccaggaacaagccccagaccaagtgccccagcggcggccagagccagggcccccggggccagttcctggacacagtgctggccgccatgtgccccatcgccatgctgctgacagctgaccccggcatgccacccacctgcctgtggcacacccctcatgccaagcacaaggagcacctgagcatccacctgaacatggtgcccaagtgtgtgcacatgcacgtgacccacacccacaccaacagcggcagccgctacgtgggcaagtacatcctgctgatcaagtggagcctggccatgtactttgtgcagggcagcaccctgagcacagtgaccaagatgagccacggcaaggccctgcctgacagcgacacctacatccagttccccaaccagcagggcccccacacccccagcatcccctag

SEQ ID NO: 299208 - DNA, 462 bp, Artificial Sequence
  derived and/or modified sequence
atgcactacgtgcacgtgcaccgggtgaccacccagccccggaacaaaccgcaaaccaaatgcccctctgggggccagagccagggtcctagaggacagtttctggatactgtattggcggctatgtgtcctatagctatgctgctgactgcggaccccggtatgcctccaacgtgtctgtggcataccccccatgccaagcataaagagcacctatcaatccacctaaacatggtgcctaaatgtgtgcacatgcacgtgacccatactcacacaaactctggatccagatacgtagggaagtacatcctgctaattaagtggtcactcgctatgtactttgtacagggatctactttgagtacggtcactaaaatgtcccatggaaaggctctgccagacagtgacacttacatacagttccccaatcaacaaggcccccacacgccctccatcccctag

SEQ ID NO: 299209 - DNA, 462 bp, Artificial Sequence
  derived and/or modified sequence
atgcactacgtgcacgtgcatcgtgtaactacccagccaaggaataaaccccagacaaaatgtccttccggcggacaatcccagggcccacgcggacagtttctggataccgttctggctgccatgtgcccaattgccatgcttcttactgcagatcccggtatgcccccaacctgcctgtggcacactcctcatgctaaacacaaggagcacctgtcaatccacctcaacatggtgccgaagtgcgtgcatatgcacgtgactcacacacacaccaacagcggtagccggtacgtgggtaagtacatactgctaatcaagtggtctctggctatgtatttcgtgcaggggtctacattgtccaccgtgacaaagatgtcccacggaaaggccctccccgactcagacacgtacatccagttccccaatcagcaaggccctcacactccatccatcccttag

SEQ ID NO: 299210 - DNA, 4340 bp, Artificial Sequence
  derived and/or modified sequence
ctagactgggcggtgatcaggatctgaatgcacagggcgggtgttcagcgattgtttactacgttgaacgtgacctccaggaaagcagttctggccgagatcccctgacaacgcaaagcaagaagtaacgtggaaggaggctccccaagctggctggccattttgctgctgtgtgtggaggtgctgccagtggcatgcccaaacccaaagctggaagaggaataaattacaagtggtcaaggttgcatccttttgagcccaggacctgcttgtaagccgagagggttctctggccctaatctagccaagcaccatggagagaatcagtgccttcttcagctctatctgggacaccatcttgaccaaacaccaagaaggcatctacaacaccatctgcctgggagtcctcctgggcctgccactcttggtgatcatcacactcctcttcatctgttgccattgctgctggagcccaccaggcaagaggggccagcagccagagaagaacaagaagaagaagaagaagaagaagaagaaggatgaagaagacctctggatctctgctcaacccaagcttctccagatggagaagagaccatcactgcctgtttagttaggcaggaagcagaggtgtttcctttctggggctaagcctccttctgaccacacacagacatttcaggaacccctgaaataatgcactatgtccatgtccacagagtaactactcaaccaaggaacaaacctcagactaagtgtcccagtggagggcagtcccagggaccacgtggacaattcttggatactgtcttggcagctatgtgtccaatagcaatgctccttactgcagacccaggcatgcctcccacctgtctctggcataccccacatgcaaagcacaaagaacatttatccatacatctcaatatggttcccaagtgtgtgcacatgcacgtaacacacacacacacaaattcaggtagcaggtacgtgggcaagtatattctgctcatcaaatggtcattggctatgtactttgtgcagggaagtacattatctacagtcacaaaaatgtctcatgggaaagccttgccagattcagacacatatatacaatttcctaaccagcaaggcccccatacaccatctattccataaaccactcaggttacagatgcatgctttcctatttctaactctacacataaacttttactggaagtactcataattggacattccagcaacctgctacagtccccacccttgtgtgtcttgatacagacacaccaagtttctgtgcctctgacccctcacctgtgccaagatgtttaaagtgtgatggttcaaaattcattgaaagctcttttcttgtaactcatgacaaagtccgtcctcattgccactgagaggtgtttaatgtgatccaagacctctctgtgaaacattacccccgcaaaccactcagcaaagtgcctttctccaagcaagaacaaagagctcttggtggtgactgctagaaaattatggaagcccactcatttatgtcagtggactgcaactgtgtacctgtgcaatgtttacagatggaaagggtgaggagatgctacacctgagctaggtatctcctatataaccaaagtttccagcagggaaggaactagacaatcatcagtgcagtctcacagaaggcaacactggaagtgatgtcataaggttgtgatgtgtgcacggtatggcacaggtgggatgcagaggtaacagagtttaaatgaaagtaggatgaagctataaagaggtttatttatatttatattgaagctcaggcaagtgccttgcacacagtaggtacttataactaactgtggttactgttggatatgtgatgttgttaagggtaagcttgtaatacctcaccagttctccccgagtgatcttctcttctaagtgagcccactaattgctgcaatggatgaaattgggtgtttaatgctggagagcacatgtaggtgacacatgtgccttgaggtatgtgaggacatgtaaattagatccacagtgagctgaggagggctttccccgccagagtgaggttgggaagcagagttaatccacttataggatgaactgcttggtatttttattgtattgtgactgtattacaaagatggacaattcactccttgggagcaagttatgctctagaagtttatttacaaatatgctgggcagctctcttgaaatattttcccaaggaagctattctacacagtggcaaaattgctatctaattaataatgtagctaaactatgatatttatagtagcaaaaaactaaattctataagattgcattaaaggaaagatatattctatttgctcacttgggctgcttggtactcacctgccctccaggtgtactttaggcctgtggagggtgggcatttagtggtgacccttgcaccagggttttctaacagatgaccctgtgaatcataatttaaacctgcatatattttatagccagtcacatttgccctctcaccctatatggccataaactgcctaagcactcaggcctcccactcatcaacccctttgaccagagaaagaagcactctggttctctatccccttgtcacatagagagtttgtcatggggcctctggctgtgcccttcacataacagaatgacttgccatctgcctgcaccaaacccagggatgtggaagacatctccccacaactgccactgctcaccaggacaagctgcccttcctgtctccacctctcagtccccctagaatggatggctggggagaggtggaggctgacagctgagacgtagtgtcagatatgatctaggagggcggatcaccgggatccgggaccatacaagtaacatggtttccatggcaactgcttgctcctttgaattaagacagcagtcagttgtcattgccatgacaaggcctctatctccaggcacaatgtccctgctgtctcctaatccaatggacttgctctcaccccagggatgaaacacccagaaactcacttctcagtcacttccacagccgatgactcagaagagccaaacccagaatggggcctctcttttccccatcacagactcccctgacaacctttcctggcgtaactagaggagtcccagtgcaggataggccctaaacgttttgttaaataaacaggtgcatgaaaggagcctaaggccattgttgatatccactctcttctttccacttccttctcatctttttctccatgttttatgcttctctgattccctcttctgcctgcaccagaccagccccagccctttattcctctccattttcactccttccagcctctgtccctgaactgccactggcaacccatgggacctcaggaccagagactgcttgactcatctggggagggtaagttcacgggggacaaaaaaatgattcctaaagaagaggcttcctagaccagcacaggctcgagaaagacatcccctaggcctggacttctgagcagctttagccaggctccggacggcagccagaggaggcctttccccattgctcctttccccattgctcaatggattccatgtttctttttcttggggggagcagggagggagaaaggtagaaaaatggcagccacctttccaagaaaaatataaagggtccaagctgtatagtatttgtcagtatttttttctgtaaaattcaaacacacacaaaagaaaaatttatttaaataaaatactttgaaaatgaaaagtcttgatgtagtcagatggttactctcttaacattaggtattacccccactcagacatcactcagaaatgatcaatgcagggactctttctgtgacacaaatgtcccagccctccctggtcaccgccttcgccatggtagagtcataggtctgaggatgaggaatgtggctgtctcacccttgcttgcaaaacagatggccttggagaccagactccctcaaaggtgccagctacaggaaaaatatactgatgttccttggcaacacttacagaactttccatcaatgaggtccatcaatggcttcttaaaggaaaaggggggaaatagcaaaaacctaaggaagaatggacctttgagttaaatccagtgtttgttgggaaaggagggatcaaaaacctctatagtagccactagggcaaaaactgtgtgtatgtgtgtgtgtaagtgtgtgtacactgttcaatatggttcaatatggtaccaatagccacatgtgactatttaaattcattgcaatgaaataaaattaaaggtatactagctc

SEQ ID NO: 299211 - protein, 938 aa, Artificial Sequence
  derived and/or modified sequence
MFRRRTCGTEASLRWSHSSRSEIRLGRSESLKGREEMKRSRKAENVPRSRSDVDMDAAAEATRLHQSASSSTSSLSTRSLENPTPPFTPKMGRRSIESPSLGFCTDTLLPHLLEDDLGQLSDLEPEPDAQNWQHTVGKDVVAGLTQREIDRQEVINELFVTEASHLRTLRVLDLIFYQRMKKENLMPREELARLFPNLPELIEIHNSWCEAMKKLREEGPIIKEISDLMLARFDGPAREELQQVAAQFCSYQSIALELIKTKQRKESRFQLFMQEAESHPQCRRLQLRDLIISEMQRLTKYPLLLESIIKHTEGGTSEHEKLCRARDQCREILKYVNEAVKQTENRHRLEGYQKRLDATALERASNPLAAEFKSLDLTTRKMIHEGPLTWRISKDKTLDLHVLLLEDLLVLLQKQDEKLLLKCHSKTAVGSSDSKQTFSPVLKLNAVLIRSVATDKRAFFIICTSKLGPPQIYELVALTSSDKNTWMELLEEAVRNATRHPGAAPMPVHPPPPGPREPAQQGPTPSRVELDDSDVFHGEPEPEELPGGTGSQQRVQGKHQVLLEDPEQEGSAEEEELGVLPCPSTSLDGENRGIRTRNPIHLAFPGPLFMEGLADSALEDVENLRHLILWSLLPGHTMETQAAQEPEDDLTPTPSVISVTSHPWDPGSPGQAPPGGEGDNTQLAGLEGERPEQEDMGLCSLEHLPPRTRNSGIWESPELDRNLAEDASSTEAAGGYKVVRKAEVAGSKVVPALPESGQSEPGPPEVEGGTKATGNCFYVSMPSGPPDSSTDHSEAPMSPPQPDSLPAGQTEPQPQLQGGNDDPRRPSRSPPSLALRDVGMIFHTIEQLTLKLNRLKDMELAHRELLKSLGGESSGGTTPVGSFHTEAARWTDGSLSPPAKEPLASDSRNSHELGPCPEDGSDAPLEDSTADAAASPGP

SEQ ID NO: 299212 - DNA, 2817 bp, Artificial Sequence
  derived and/or modified sequence
atgttcagaagaagaacctgcggcaccgaggccagcctgagatggagccacagcagcagaagcgagatcagactgggcagaagcgagagcctgaagggcagagaggagatgaagagaagcagaaaggccgagaacgtgcccagaagcagaagcgacgtggacatggacgccgccgccgaggccaccagactgcaccagagcgccagcagcagcaccagcagcctgagcaccagaagcctggagaaccccaccccccccttcacccccaagatgggcagaagaagcatcgagagccccagcctgggcttctgcaccgacaccctgctgccccacctgctggaggacgacctgggccagctgagcgacctggagcccgagcccgacgcccagaactggcagcacaccgtgggcaaggacgtggtggccggcctgacccagagagagatcgacagacaggaggtgatcaacgagctgttcgtgaccgaggccagccacctgagaaccctgagagtgctggacctgatcttctaccagagaatgaagaaggagaacctgatgcccagagaggagctggccagactgttccccaacctgcccgagctgatcgagatccacaacagctggtgcgaggccatgaagaagctgagagaggagggccccatcatcaaggagatcagcgacctgatgctggccagattcgacggccccgccagagaggagctgcagcaggtggccgcccagttctgcagctaccagagcatcgccctggagctgatcaagaccaagcagagaaaggagagcagattccagctgttcatgcaggaggccgagagccacccccagtgcagaagactgcagctgagagacctgatcatcagcgagatgcagagactgaccaagtaccccctgctgctggagagcatcatcaagcacaccgagggcggcaccagcgagcacgagaagctgtgcagagccagagaccagtgcagagagatcctgaagtacgtgaacgaggccgtgaagcagaccgagaacagacacagactggagggctaccagaagagactggacgccaccgccctggagagagccagcaaccccctggccgccgagttcaagagcctggacctgaccaccagaaagatgatccacgagggccccctgacctggagaatcagcaaggacaagaccctggacctgcacgtgctgctgctggaggacctgctggtgctgctgcagaagcaggacgagaagctgctgctgaagtgccacagcaagaccgccgtgggcagcagcgacagcaagcagaccttcagccccgtgctgaagctgaacgccgtgctgatcagaagcgtggccaccgacaagagagccttcttcatcatctgcaccagcaagctgggccccccccagatctacgagctggtggccctgaccagcagcgacaagaacacctggatggagctgctggaggaggccgtgagaaacgccaccagacaccccggcgccgcccccatgcccgtgcacccccccccccccggccccagagagcccgcccagcagggccccacccccagcagagtggagctggacgacagcgacgtgttccacggcgagcccgagcccgaggagctgcccggcggcaccggcagccagcagagagtgcagggcaagcaccaggtgctgctggaggaccccgagcaggagggcagcgccgaggaggaggagctgggcgtgctgccctgccccagcaccagcctggacggcgagaacagaggcatcagaaccagaaaccccatccacctggccttccccggccccctgttcatggagggcctggccgacagcgccctggaggacgtggagaacctgagacacctgatcctgtggagcctgctgcccggccacaccatggagacccaggccgcccaggagcccgaggacgacctgacccccacccccagcgtgatcagcgtgaccagccacccctgggaccccggcagccccggccaggccccccccggcggcgagggcgacaacacccagctggccggcctggagggcgagagacccgagcaggaggacatgggcctgtgcagcctggagcacctgccccccagaaccagaaacagcggcatctgggagagccccgagctggacagaaacctggccgaggacgccagcagcaccgaggccgccggcggctacaaggtggtgagaaaggccgaggtggccggcagcaaggtggtgcccgccctgcccgagagcggccagagcgagcccggcccccccgaggtggagggcggcaccaaggccaccggcaactgcttctacgtgagcatgcccagcggcccccccgacagcagcaccgaccacagcgaggcccccatgagccccccccagcccgacagcctgcccgccggccagaccgagccccagccccagctgcagggcggcaacgacgaccccagaagacccagcagaagcccccccagcctggccctgagagacgtgggcatgatcttccacaccatcgagcagctgaccctgaagctgaacagactgaaggacatggagctggcccacagagagctgctgaagagcctgggcggcgagagcagcggcggcaccacccccgtgggcagcttccacaccgaggccgccagatggaccgacggcagcctgagcccccccgccaaggagcccctggccagcgacagcagaaacagccacgagctgggcccctgccccgaggacggcagcgacgcccccctggaggacagcaccgccgacgccgccgccagccccggcccctag

SEQ ID NO: 299213 - DNA, 2817 bp, Artificial Sequence
  derived and/or modified sequence
atgttccggcgacgtacctgcgggacagaagcatctctgaggtggagtcatagcagtcgcagcgaaattcggctgggcagatccgagtctctgaaggggcgggaggaaatgaagcggagcaggaaggctgagaacgtgcccaggtcccgatctgacgtagacatggatgcggcggcagaggctactcgtctgcaccaatcagctagttcaagcacctcctccctgtcaaccagatcactcgaaaaccccacacccccatttacccctaagatgggcaggaggtcaatcgaaagtccctcgctgggcttttgcacagacaccctgcttccacaccttttggaggacgatttgggacagctctccgacctggaaccagagcctgacgcacagaattggcagcataccgtcggcaaggacgtggtggctggcctgactcagagggagattgacagacaggaggttatcaatgaacttttcgtaactgaagcgagtcatctgcgcacactccgggtactggatctgatcttctatcagaggatgaaaaaagagaatcttatgcctcgtgaggaacttgcccggctgttccctaatctgcctgagttgattgaaatccacaatagctggtgcgaagccatgaagaaactacgggaggaaggacccattatcaaagagatcagcgatttaatgcttgcccgattcgatgggcctgccagggaagagctccagcaggtcgccgctcaattttgcagttaccaaagtatagcgctcgaactgatcaagaccaagcaacgcaaggagtctcgcttccagctgtttatgcaggaagccgagagccatccccagtgtaggcgtttgcaactgcgggatctgattatatcagaaatgcaacgtttgaccaagtaccctctcttgctggagagcatcatcaaacataccgagggtggcacgtctgagcatgaaaaactgtgcagggcacgggaccaatgccgggaaatcttgaagtacgtaaatgaggccgtaaagcagactgagaacagacaccgcctggagggttaccagaagaggctcgacgctaccgcgctcgagagggcatcaaatccacttgctgcagagttcaagtccttggacctgactacacggaaaatgattcatgagggtcccctgacctggcgtatatccaaggataaaacattggatctccacgtgcttctgttggaggatttattagtccttctccagaaacaggatgaaaaactgctgctgaaatgccattctaagaccgctgtcggcagctctgatagcaaacagaccttttcccctgtgcttaagctcaatgcagtactgatccgatcagtagccacggataaacgtgccttctttattatatgtacaagcaaactgggtccacctcagatatacgaattggtcgcactcaccagcagtgataaaaacacttggatggaacttctagaggaggcggtgcgtaacgccactagacaccccggtgcagcccctatgccagttcaccctccgccccccgggccgagggaacctgcccagcaggggcccaccccttctagagttgagcttgatgatagcgacgtgtttcacggtgaaccagaaccggaggagctgccagggggcaccggctcacagcagcgggtgcaggggaagcatcaggtcctgctcgaggatcccgaacaggaaggatcggctgaagaggaagagctgggagtactgccttgtcccagcacctcccttgatggagaaaatcgcggtatacggaccagaaacccaattcatttagcttttcctggtcccctttttatggagggcctggccgactcagctctggaagatgtggaaaatctcagacatctcatcctctggtctctgttgcccggccacacaatggagacccaagccgcacaggaacctgaggatgacctgactcctactccaagcgtgatctctgttaccagccacccttgggatcctggcagccccggtcaggcgccgcctgggggtgagggcgacaatacccagctggcaggactggagggcgagagacccgagcaggaggacatgggactgtgttctctggagcacctcccaccaagaactcgtaactctggaatctgggaatctcctgagcttgataggaacctagccgaggatgctagcagtacggaagcagctggaggctacaaggttgtgcgcaaagccgaggtggcagggtcgaaggttgtccctgccctgccggaaagtggacagtcagagcctgggccgccagaggtcgaaggtggtactaaagcaaccggtaattgcttttacgtttctatgccaagcggtccaccggattcctcaacagatcattccgaggcccccatgtcaccccctcagcctgatagcctccccgctggtcagacagagccacagccacagctgcagggcggcaacgatgacccaaggcggccctcacgatctccacctagcctcgccctgcgcgacgtgggaatgattttccataccattgaacagctcactttaaaactgaatcgactcaaggacatggagctggcccacagggaactcctaaagagtctgggcggggagtcctctggcggaaccacaccagtgggatcattccacacggaggcagcacgttggaccgatggctctctctccccacccgccaaagaaccgctggcttccgattcgcgtaacagtcatgagctgggcccctgccccgaagacgggagcgacgctcccttggaagacagcacagccgatgccgcagcatcccccggcccctag

SEQ ID NO: 299214 - DNA, 2817 bp, Artificial Sequence
  derived and/or modified sequence
atgttcagaagaaggacctgtggcacagaggccagcctgcgctggagccacagcagccgctctgagatccggctgggccgctctgagagcctgaagggccgggaggagatgaagaggagcaggaaggccgagaatgtgcccaggagcagaagtgatgtggacatggatgctgctgctgaggccacccggctgcaccagagcgccagcagcagcaccagcagcctgagcaccaggagcctggagaaccccaccccacccttcacccccaagatgggcagaagaagcattgagagccccagcctgggcttctgcacagacaccctgctgccccacctgctggaggatgacctgggccagctgagtgacctggagcctgagccagatgcccagaactggcagcacacagtgggcaaggatgtggtggccggcctgacccagcgggagattgaccggcaggaggtgatcaatgagctgtttgtgacagaggccagccacctgcggaccctgcgggtgctggacctgatcttctaccagaggatgaagaaggagaacctgatgccccgggaggagctggcccggctcttccccaacctgcctgagctgattgagatccacaacagctggtgtgaggccatgaagaagctgcgggaggagggccccatcatcaaggagatcagtgacctgatgctggccaggtttgatggccctgcccgggaggagctgcagcaggtggccgcccagttctgcagctaccagagcatcgccctggagctgatcaagaccaagcagaggaaggagagccgcttccagctgttcatgcaggaggccgagagccacccccagtgccggcggctgcagctgcgggacctgatcatcagcgagatgcagaggctgaccaagtaccccctgctgctggagagcatcatcaagcacacagagggcggcaccagcgagcacgagaagctgtgccgggcccgggaccagtgccgggagatcctgaagtatgtgaatgaagctgtgaagcagacagagaacagacaccggctggagggctaccagaagaggctggatgccacagccctggagcgggccagcaaccccctggccgctgagttcaagagcctggacctgaccaccaggaagatgatccacgagggccccctgacctggaggatcagcaaggacaagaccctggacctgcacgtgctgctgctggaggacctgctggtgctgctgcagaagcaggatgagaagctgctgctgaagtgccacagcaagacagctgtgggcagcagtgacagcaagcagaccttcagccctgtgctgaagctgaatgctgtgctgatccgctctgtggccacagacaagagggccttcttcatcatctgcaccagcaagctgggccccccccagatctatgagctggtggccctgaccagcagtgacaagaacacctggatggagctgctggaggaggccgtgagaaatgccaccaggcaccctggagctgcccccatgcctgtgcaccccccacctcctggcccccgggagcccgcccagcagggccccacccccagccgggtggagctggatgacagtgatgtgttccatggagagcctgagcctgaggagctgcccggcggcaccggcagccagcagagggtgcagggcaagcaccaggtgctgctggaggaccctgagcaggagggcagcgctgaggaggaggagctgggcgtgctgccctgccccagcaccagcctggatggagagaacagaggcatccgcaccaggaaccccatccacctggccttccctggccccctcttcatggagggcctggccgacagcgccctggaggatgtggagaacctgcggcacctgatcctgtggagcctgctgcccggccacaccatggagacccaggccgcccaggagccagaagatgacctgacccccaccccatctgtcatctctgtgaccagccacccctgggaccccggcagccctggccaggcccctcctggaggagagggggacaacacccagctggccggcctggagggggagaggcctgagcaggaggacatgggcctgtgcagcctggagcacctgccccccaggaccagaaattctggcatctgggagagccctgagctggacaggaacctggctgaagatgccagcagcacagaggccgccggcggctacaaggtggtgaggaaggccgaggtggccggcagcaaggtggtgcctgccctgcctgagagcggccagagcgagcccggccccccagaggtggagggcggcaccaaggccactggaaactgcttctacgtgtccatgcccagcggccccccagacagcagcacagaccacagcgaggcccccatgagccccccccagcctgacagcctgcctgctggccagacagagccccagccccagctgcagggcggcaatgatgacccccggcggcccagccgcagcccccccagcctggccctgagagatgtgggcatgatcttccacaccatcgagcagctgaccctgaagctgaaccggctgaaggacatggagctggcccaccgggagctgctgaagagcctgggcggggagagcagcggcggcaccacccctgtgggcagcttccacacagaagctgcccgctggacagatggcagcctgagccccccagccaaggagcccctggccagtgacagcaggaacagccatgagctgggcccctgcccagaagatggcagtgatgcccccctggaggacagcacagcagatgctgctgccagccctggcccctag

SEQ ID NO: 299215 - DNA, 2817 bp, Artificial Sequence
  derived and/or modified sequence
atgttccggcggcggacctgcggcaccgaggccagcctgcggtggtcccattctagccgatctgaaattcgccttggtcggagtgagtccctgaagggacgggaagagatgaagcgctcacggaaagccgaaaacgtcccccggtcgcggtccgacgtggacatggacgctgccgccgaggccaccagactgcaccagtctgcttctagctcaacatcttccctctcaacccggtcgctcgaaaatccaactcccccatttacccccaaaatgggtcgtcgctccattgagagtccatccctaggcttctgtacagacacattactgccacatcttctagaagacgacctgggccagctgtccgatttggagcctgagcccgacgcccagaactggcaacacactgtcggaaaagatgttgtggcaggtctcactcagcgggaaatcgatagacaggaggtgataaacgaacttttcgtgaccgaagcttcccacctgaggacactgagggtgctagaccttatattctatcaacgcatgaaaaaggagaacttgatgcctagggaagagctcgccagactgttccctaatctgccagagcttattgaaatacacaactcatggtgtgaggccatgaagaaactgcgcgaggagggtcccatcattaaggagattagtgacttgatgctggcacgatttgacgggcctgcccgcgaagaattacagcaggtcgctgctcagttctgctcttaccagagcattgcgctggagctgataaagacaaagcaaaggaaggaaagtcgattccaactctttatgcaggaggcagaaagtcacccccaatgccgtaggctgcaactgcgcgatctcatcatttcggaaatgcagaggctcacaaaatacccgctcctgctggagtccattataaaacatacggagggcggaacctcagaacatgaaaagctttgtcgggccagagatcagtgccgcgagatactcaagtacgtgaatgaggctgtgaagcagacagagaatcgccataggttggagggctaccagaaacgcctcgacgctacagctttggagagggctagtaatcccctggcagccgaattcaagtctctggacctcaccacaaggaagatgatacacgagggacctctgacctggagaatcagtaaggataagacattagatttacatgtgctcctgttagaagacttgctggtcttactccagaaacaggacgagaagctgcttctaaaatgccactccaagacggccgtggggtctagcgactccaagcaaacttttagtccagtgctgaagctgaacgcggttttgataaggagtgtagcaactgataagagagcctttttcatcatctgcacaagcaaactggggccacctcaaatctatgagctggtggctcttacctcttctgacaagaatacatggatggagcttcttgaagaagccgtgcggaacgcaactaggcatcctggagctgcccccatgcctgtccatccgccacccccaggaccaagagaaccagcgcagcagggcccaacgcctagccgtgtggaactggatgatagtgatgtgttccacggggaacccgaaccagaagaactccccggcggtaccggttcccagcagcgtgtccaagggaagcatcaggtgcttctagaggacccagaacaggaaggatcagccgaagaagaggaactgggagtccttccatgtccatcgacatctctggacggggagaatcgcggaattaggactaggaatcccatacatctggcttttcctggccctttgtttatggaggggctggctgattccgccctggaggatgtcgaaaatctccggcacttgatcttatggtccctgctcccaggccacacaatggagacccaagccgcgcaggaaccagaggacgaccttactcccacaccgtccgtcatttccgttacttcccacccatgggacccagggtcccctggccaggcgccccccgggggtgagggagacaatacacagcttgcaggtcttgagggcgagagacccgagcaagaggacatgggcctgtgttctctggagcacctgccaccacggacccgtaattccggcatctgggaatccccagagctggacagaaacctggccgaggacgcttcaagtaccgaagccgcgggagggtataaggtggtgagaaaagccgaagtggctggtagcaaggtggtccctgcacttcccgaatcgggacaaagcgagcccgggccaccagaggtggaaggcggtaccaaggccactgggaattgcttctatgtttcaatgccatctggcccccccgactcatccaccgatcactcagaagcgccgatgtcccctccgcagcctgactcccttccagcaggccagacagagccgcaacctcagctgcagggaggaaatgacgatccccggcgcccatctaggtctccgcctagcttggccctacgggatgtaggcatgatattccacactatcgagcagctgacgttgaaactgaatcgcctgaaagacatggagctggctcacagagagctgctcaaatccctggggggagaatcttcaggtggcaccacacccgtgggcagtttccatacggaggcagcccggtggactgatggaagcctgtccccccccgcgaaggagcctcttgcttccgattctaggaatagccatgaactgggaccctgccccgaggatggcagcgacgccccactggaggactccacagcagacgctgctgcctcacccggtccctag

SEQ ID NO: 299216 - DNA, 2817 bp, Artificial Sequence
  derived and/or modified sequence
atgttccgcaggagaacatgtgggaccgaagcttccctgcggtggtcccatagttcccggtctgaaatccggctgggaagatctgaatccctcaagggacgggaggagatgaaacgctctcgaaaagccgagaacgtgccacggtcacgcagcgatgttgatatggacgcagcagctgaggcaactcgcctccaccagtcagcatcctcctcaacttcctccctgagcacaagatccctcgagaatccaactccacccttcacaccaaagatgggcaggagaagcatcgagtctccctctctggggttttgtactgatactctgcttccacacttgctcgaagatgatctgggccaattgtctgacctggagcccgagcccgatgcacaaaactggcaacataccgtgggtaaagatgtggtggccggactgacacagagggaaattgatcgccaagaggtgattaatgagttatttgttactgaagcatcacatctgcgcactctgcgcgtgctcgatctgatcttttaccagcggatgaagaaagagaatctgatgcccagggaagagctcgccaggctatttcccaatctgcctgagctgatcgagatacataattcctggtgcgaggccatgaaaaaactcagggaggaggggccaataataaaggagattagtgacctgatgctggcgcgttttgatggcccagccagggaggagctacagcaggtggccgctcaattttgttcctaccaaagcattgccctagaattgattaagaccaaacagcgtaaggaatcccgcttccaattgttcatgcaggaggctgaaagccacccccagtgcagaaggctccaattacgggacctcattatcagtgagatgcagcggctgactaaatatcccctcctgctagagtccataattaaacatactgagggaggcacgagcgaacatgagaagctgtgtagagcacgggaccaatgtcgtgagattctgaagtatgtgaatgaggcggtgaagcagaccgagaatcggcacagacttgaaggctaccagaagaggctggacgctaccgccctggaaagggccagcaatccattggccgctgagttcaagtcgctggatctaacaacgaggaaaatgatccatgagggtcctttgacatggagaatctcgaaggacaaaacactggacctacatgtgttgctgcttgaagaccttctggtcctactgcagaagcaggacgagaagctactgctaaagtgtcatagtaaaactgccgttggctcgagcgacagcaaacagacgttttccccagtgctcaaactgaacgccgtactgattcgaagcgtggcaacggataaaagggctttttttataatctgcaccagcaagctagggcctcctcagatttatgagcttgtggccctcaccagcagcgataaaaatacttggatggagctgcttgaggaggcagtcaggaacgctaccagacacccaggggctgcaccaatgccagtgcatcccccaccaccaggcccacgggagcctgcacagcagggccctaccccctctagggtcgagctggacgactcagatgtattccatggagaaccagaaccagaggagcttccaggcggtacgggaagccagcaaagggtacaagggaagcaccaggttttactcgaagaccccgaacaagaaggatctgcggaggaggaggaattaggtgtgctgccatgtcctagcacctcactcgatggggagaatcgcggaattaggaccaggaatcctatccatctggccttccctggaccactgttcatggaaggactcgccgacagcgctcttgaagatgtcgaaaatttaagacatctgatcctctggagcctgctccctggacatactatggaaacacaggccgctcaagagccagaggatgatctgacaccaaccccttcagtcatcagtgtcacttctcatccttgggatcccggtagccctggccaggcccctcccggaggagaaggagacaacacccaattagccggactggagggagagcgtccagagcaagaagatatgggattgtgcagtcttgagcatttgccaccccgaactcgcaactcagggatttgggaatccccagagctcgaccggaacttggcagaggacgcgagttccaccgaggccgcaggcggatacaaagtcgtcagaaaggcagaggtcgcaggttctaaagtggtgcctgcccttcctgaatctggacagagcgagcctgggcctccagaggtagaggggggtactaaagctactggcaattgtttctacgtatctatgcctagcgggcctcccgactcgagcactgatcactcagaggctccgatgtctcctccccaacctgattccctgcctgccggacagaccgagccccaaccccagctacagggtggaaacgacgacccgaggcggccttccagaagcccccctagtctggccttgagagacgttgggatgattttccatacaattgagcagctcacactgaagctgaaccgcctcaaagatatggagctcgcccaccgggaactattaaagtccctgggcggagagagttcggggggtacaactcctgttggcagctttcatactgaagcagctcggtggaccgacggttccctgtccccgccagccaaggagcctctggcgagtgatagtcgaaactcccacgaactggggccatgccccgaagacgggagcgacgcacctttggaagattccacagccgatgcggcagcttcaccaggcccatag

SEQ ID NO: 299217 - DNA, 3560 bp, Artificial Sequence
  derived and/or modified sequence
gaatatagtgactccactttcctcttaagacctcttaaaagaggttcgcctcaggcagagttaaaggtgggagctgacccgttccaaagcagaggcaacgtgaactggccactaggggcagggagctgggaccttgtgttccctgttgagggacgatgatgtctaccaccttcttgacagaagcatggtgtctcaggcctctggacacactacaactcagagtctgttagccccagatttcatcttcctgttaggatcccttcctaatagctccagaggaagatgactgtccatccatcaggctaggctggggagagaggaggagtttgtagagcagcaaaaatagtctgtcattgagaagcttccactgccatccagctgctttggccatgttcaggaggagaacctgtggcacggaggcatctttgagatggagccacagttcacgctcagagattcgcctgggccgctctgaaagcctcaagggccgggaagagatgaaacggtctcgaaaggcagagaacgtgccccgctctcgcagtgatgttgacatggatgctgctgcggaggctactcgcctgcaccagtcagcctcgtcctctacctccagcctctccaccaggtctcttgagaacccaacccctccattcactcccaaaatgggccgcaggagcattgagtcccccagtttggggttctgcacagataccctccttccccacctcctagaggatgatctgggccagctgtctgacctggagccagagccagatgcccaaaattggcagcatacagtgggcaaggatgtggtggctgggctaacccagcgggagattgaccggcaagaggtcatcaatgagctgtttgtgactgaagcttcccacctgcgcacactccgggtcctggacctgatcttctaccagcgaatgaagaaggagaacctgatgccccgggaggagctggcccggctcttcccgaacctgcctgaactcatagagattcacaattcctggtgtgaagccatgaagaagctccgggaggaaggccccatcatcaaagagatcagtgacctcatgctggcccggtttgatggccctgcccgagaggaactccagcaagtggctgcacagttctgttcctatcagtcaatagccctagagctaatcaagaccaagcaacgcaaggagagtcgattccagctcttcatgcaggaggctgagagccaccctcagtgtcggcggctgcagctgagagacctcatcatctctgagatgcagcggctcaccaagtacccgctgctgctggagagcatcatcaagcacacagagggtggcacctctgagcatgagaagctgtgccgggcccgggaccagtgccgggagattctcaagtatgtgaatgaagcggtaaaacaaacagagaaccgccaccgtttagagggctaccagaaacgcctggatgccaccgccctggagagggccagcaaccccctggcagcagagttcaagagcctggatcttacaaccagaaaaatgatccatgagggacccctgacctggaggatcagcaaggataagaccttggacctccacgtgctgctgctggaggacctcctagtgctgctacagaaacaggatgagaagctattgctgaagtgccacagcaagactgctgtgggctcctcagacagcaagcagaccttcagccccgtgctcaagctcaatgctgtgctcatccgctctgtggccacagataaacgggccttcttcatcatctgcacctccaagctgggcccaccccagatctatgagctggttgcattgacgtcatcagacaagaacacatggatggagctcttagaagaggccgtgcggaatgccaccaggcaccccggagctgccccaatgcccgtccatcctccacccccaggtccccgggagccagcccagcagggccccacacccagcagggtagaactggatgactcagacgtgttccatggtgaacctgaacctgaggagctgcctggaggcactgggtcccagcagagggtccaagggaagcaccaggtcctgctagaggaccctgagcaggagggcagtgcagaggaagaggaactgggtgtcctgccttgcccttccacatccctggatggagagaacaggggcatcaggacaaggaaccccatccacttggccttcccaggccctctgttcatggaagggctcgctgactccgctctggaagatgtggagaacctgcgacatctgatcctgtggagcctgctgccaggtcacaccatggaaactcaggctgcccaggagcccgaggacgacctgacacccacaccttctgtcatcagcgtcacctctcacccctgggacccaggctccccagggcaagcaccccctgggggtgaaggggacaacacccagcttgcagggctggagggggaacggccagagcaggaagacatgggtctctgttctctggaacacctacccccaaggaccagaaattctgggatatgggagtctccagaactggacaggaatctggctgaagatgcttcaagcacagaggcagcaggaggttacaaagttgtgagaaaagctgaggtggcaggcagcaaggttgtccctgcactaccagagagtggccagtcagagcctgggccacctgaagtggaaggcggaacaaaggctacggggaactgcttttatgtcagcatgccatcaggacccccggactcaagcaccgaccactcagaggcacccatgagcccccctcagcctgacagcctccctgcagggcagacagagcctcagcctcagctgcagggaggcaacgatgatccaagacgccccagccgctctcctccaagcctggccctcagggacgtgggcatgatcttccataccattgagcagctcactctcaagctcaacaggctcaaggatatggagctggcccacagagagctgctcaagtcccttgggggagagtcatctggtggcaccacgcctgtgggcagtttccacacagaagcagctagatggacagatggctccctctcacctcccgctaaggagcccctagcttctgactccaggaacagccatgaactggggccctgccctgaggatggctctgacgcccccctggaagacagcacagcagacgcagccgcgtcaccaggaccataaccgtacaaaccaccaaatcctctgcgtccccactcctccttcagggactggcctgagaccggggcacagggtaggggggatcccaacactcctccctgtggaggaggcagttagggaaactaggatccagccaaggcccggggggagacccgcatgttgcttggtctgctcaagtcggagtcaggtttcagtgtcttttccctcccttagcccaaccctccaaggcctcatgtctcctaagcatgctgactgcatccgaaaggcccccactcaccatggtctgccctcaccccacatatgtgtgtacacgcgcacgcctgtatgtgcgctgccctcagacatgcaagtgaaagg

SEQ ID NO: 299218 - protein, 515 aa, Artificial Sequence
  derived and/or modified sequence
MPNQGEDCYFFFYSTCTKGDSCPFRHCEAAIGNETVCTLWQEGRCFRQVCRFRHMEIDKKRSEIPCYWENQPTGCQKLNCAFHHNRGRYVDGLFLPPSKTVLPTVPESPEEEVKASQLSVQQNKLSVQSNPSPQLRSVMKVESSENVPSPTHPPVVINAADDDEDDDDQFSEEGDETKTPTLQPTPEVHNGLRVTSVRKPAVNIKQGECLNFGIKTLEEIKSKKMKEKSKKQGEGSSGVSSLLLHPEPVPGPEKENVRTVVRTVTLSTKQGEEPLVRLSLTERLGKRKFSAGGDSDPPLKRSLAQRLGKKVEAPETNIDKTPKKAQVSKSLKERLGMSADPDNEDATDKVNKVGEIHVKTLEEILLERASQKRGELQTKLKTEGPSKTDDSTSGARSSSTIRIKTFSEVLAEKKHRQQEAERQKSKKDTTCIKLKIDSEIKKTVVLPPIVASRGQSEEPAGKTKSMQEVHIKTLEEIKLEKALRVQQSSESSTSSPSQHEATPGARRLLRITKRT

SEQ ID NO: 299219 - DNA, 153 bp, Artificial Sequence
  derived and/or modified sequence
atgcccaaccagggcgaggactgctacttcttcttctacagcacctgcaccaagggcgacagctgccccttcagacactgcgaggccgccatcggcaacgagaccgtgtgcaccctgtggcaggagggcagatgcttcagacaggtgtgctag

SEQ ID NO: 299220 - DNA, 153 bp, Artificial Sequence
  derived and/or modified sequence
atgcccaatcaaggcgaagactgttatttcttcttttattccacttgtactaagggtgatagctgcccttttcggcactgcgaagcagctattggcaatgagaccgtgtgcacgctttggcaggagggacggtgctttaggcaggtgtgctag

SEQ ID NO: 299221 - DNA, 153 bp, Artificial Sequence
  derived and/or modified sequence
atgcccaaccagggcgaggactgctacttcttcttctacagcacctgcaccaagggggacagctgccccttccgccactgtgaggccgccatcggaaatgaaacagtgtgcaccctgtggcaggagggccgctgcttccggcaggtgtgctag

SEQ ID NO: 299222 - DNA, 153 bp, Artificial Sequence
  derived and/or modified sequence
atgcccaaccagggcgaggactgctacttcttcttctacagcacctgcacaaagggcgactcctgccctttcaggcactgcgaggccgctataggaaatgaaactgtctgcaccctatggcaagaagggcgttgcttccgccaggtttgttag

SEQ ID NO: 299223 - DNA, 153 bp, Artificial Sequence
  derived and/or modified sequence
atgcccaatcagggagaagattgctatttctttttctattctacttgcacaaagggggattcctgtccgttccggcactgtgaagcagcaattggcaatgaaacggtgtgcaccctgtggcaggaaggcaggtgtttccgtcaggtttgttag

SEQ ID NO: 299224 - DNA, 682 bp, Artificial Sequence
  derived and/or modified sequence
gacgctggcagtcttggttttctgctagtgctgctgctgctgggaggacgacggacggcagcggccaagcaagaagaaagacgtggcagcaagcgggagtcggggatagtgtcatcggttcggactggtgaaaccgtaatgaagaacacccctaaactcccataatcggtgcggattcctatggggaaggcctatattgttgacatcttccaggccttggttctggaccttgagaaagaggctgtggaactagagatagcgatgctttttaggatttggggatattccctgcccaaaaaattcctggaaaattgactagtattaagtgcgtaatagattggaactcagtgaagacacagatgttcctgttcagagcaaccagctaatgattacagtttaaagacaatttctgtgatcaagttgtcatttggaagattaaacccatttcacgaggacttggagcctggtccttgctttgaggaagcagtggcttgtttcaagaagccacttctgatctaagaatctacccagcatgcctaatcaaggagaagactgctatttttttttctattccacatgtaccaaaggtgacagctgcccattccgtcactgtgaagctgcaataggaaatgaaactgtttgcacattatggcaagaagggcgctgttttcgacaggtgtgc

SEQ ID NO: 299225 - DNA, 1892 bp, Artificial Sequence
  derived and/or modified sequence
gacgctggcagtcttggttttctgctagtgctgctgctgctgggaggacgacggacggcagcggccaagcaagaagaaagacgtggcagcaagcgggagtcggggatagtgtcatcggttcggtaaagtttctgttctctggcgtaatagattggaactcagtgaagacacagatgttcctgttcagagcaaccagctaatgattacagtttaaagacaatttctgtgatcaagttgtcatttggaagattaaacccatttcacgaggacttggagcctggtccttgctttgaggaagcagtggcttgtttcaagaagccacttctgatctaagaatctacccagcatgcctaatcaaggagaagactgctatttttttttctattccacatgtaccaaaggtgacagctgcccattccgtcactgtgaagctgcaataggaaatgaaactgtttgcacattatggcaagaagggcgctgttttcgacaggtgtgcaggtttcggcacatggagattgataaaaaacgcagtgaaattccttgttattgggaaaatcagccaacaggatgtcaaaaattaaactgcgctttccatcacaatagaggacgatatgttgatggccttttcctacctccgagcaaaactgtgttgcccactgtgcctgagtcaccagaagaggaagtgaaggctagccaactttcagttcagcagaacaaattgtctgtccagtccaatccttcccctcagctgcggagcgttatgaaagtagaaagttccgaaaatgttcctagccccacgcatccaccagttgtaattaatgctgcagatgatgatgaagatgatgatgatcagttttctgaggaaggtgatgaaaccaaaacacctaccctgcaaccaactcctgaagttcacaatggattacgagtgacttctgtccggaaacctgcagtcaatataaagcaaggtgaatgtttgaattttggaataaaaactcttgaggaaattaagtcaaagaaaatgaaggaaaaatctaagaagcaaggtgagggttcttcaggagtttccagtcttttactccaccctgagcccgttccaggtcctgaaaaagaaaatgtcaggactgtggtgaggacagtaactctctccaccaaacaaggagaagaacccttggttagattgagtcttactgagagactggggaaacgaaaattttcagcaggcggtgacagtgatcctccattaaagcgtagcctggcacagaggctagggaagaaagttgaagctccagaaactaacattgacaaaacaccaaagaaagctcaagtttccaagtctcttaaggagcgattaggcatgtcagctgatccagataatgaggatgcaacagataaagttaataaagttggtgagatccatgtgaagacattagaagaaattcttcttgaaagagccagtcagaaacgtggagaattgcaaactaaactcaagacagaaggaccttcaaaaactgatgattctacttcaggagcaagaagctcctccactatccgtatcaaaaccttctctgaggtcctggctgaaaaaaaacatcggcagcaggaagcagagagacaaaaaagcaaaaaggatacaacttgcatcaagctaaagattgatagtgaaattaaaaaaacagtagttttgccacccattgttgccagcagaggacaatcagaggagcctgcaggtaaaacaaagtctatgcaggaggtgcacatcaagacgctggaagaaattaaactggagaaggcactgagggtgcagcagagctctgagagcagcaccagctccccgtctcaacacgaggccactccaggggcaaggcggctgctgcgaatcaccaaaagaacag

SEQ ID NO: 299226 - protein, 815 aa, Artificial Sequence
  derived and/or modified sequence
MEVRASLQKVSGSSDSVATMNSEEFVLVPQYADDNSTKHEEKPQLKIVSNGDEQLEKAMEEILRDSEKRPSSLLVDCQSSSEISDHSFGDIPASQTNKPSLQLILDPSNTEISTPRPSSPGGLPEEDSVLFNKLTYLGCMKVSSPRNEVEALRAMATMKSSSQYPFPVTLYVPNVPEGSVRIIDQSSNVEIASFPIYKVLFCARGHDGTTESNCFAFTESSHGSEEFQIHVFSCEIKEAVSRILYSFCTAFKRSSRQVSDVKDSVIPTPDSDVFTFSVSLEVKEDDGKGNFSPVPKDRDKFYFKLKQGIEKKVVITVQQLSNKELAIERCFGMLLSPGRNVKNSDMHLLDMESMGKSYDGRAYVITGMWNPNAPVFLALNEETPKDKQVYMTVAVDMVVTEVVEPVRFLLETVVRVYPANERFWYFSRKTFTETFFMRLKQSEGKGHTNAGDAIYEVVSLQRESDKEEPVTPTSGGGPMSPQDDEAEEESDNELSSGTGDVSKDCPEKILYSWGELLGKWHSNLGARPKGLSTLVKSGVPEALRAEVWQLLAGCHDNQAMLDRYRILITKDSAQESVITRDIHRTFPAHDYFKDTGGDGQESLYKICKAYSVYDEDIGYCQGQSFLAAVLLLHMPEEQAFCVLVKIMYDYGLRDLYRNNFEDLHCKFYQLERLMQEQLPDLHSHFSDLNLEAHMYASQWFLTLFTAKFPLCMVFHIIDLLLCEGLNIIFHVALALLKTSKEDLLQADFEGALKFFRVQLPKRYRAEENARRLMEQACNIKVPTKKLKKYEKEYQTMRESQLQQEDPMDRYKFVYL

SEQ ID NO: 299227 - protein, 358 aa, Artificial Sequence
  derived and/or modified sequence
MYASQWFLTLFTAKFPLCMVFHIIDLLLCEGLNIIFHVALALLKTSKEDLLQADFEGALKFFRVQLPKRYRAEENARRLMEQACNIKVPTKKLKKYEKEYQTMRESQLQQEDPMDRYKRENRRLQEASMRLEQENDDLAHELVTSKIALRNDLDQAEDKADVLNKELLLTKQRLVETEEEKRKQEEETAQLKEVFRKQLEKAEYEIKKTTAIIAEYKQICSQLSTRLEKQQAASKEELEVVKGKMMACKHCSDIFSKEGALKLAATGREDQGIETDDEKDSLKKQLREMELELAQTKLQLVEAKCKIQELEHQRGALMNEIQAAKNSWFSKTLNSIKTATGTQPLQPAPVTQPPKEST

SEQ ID NO: 299228 - protein, 378 aa, Artificial Sequence
  derived and/or modified sequence
MKEQLPDLHSHFSDLNLEAHMYASQWFLTLFTAKFPLCMVFHIIDLLLCEGLNIIFHVALALLKTSKEDLLQADFEGALKFFRVQLPKRYRAEENARRLMEQACNIKVPTKKLKKYEKEYQTMRESQLQQEDPMDRYKRENRRLQEASMRLEQENDDLAHELVTSKIALRNDLDQAEDKADVLNKELLLTKQRLVETEEEKRKQEEETAQLKEVFRKQLEKAEYEIKKTTAIIAEYKQICSQLSTRLEKQQAASKEELEVVKGKMMACKHCSDIFSKEGALKLAATGREDQGIETDDEKDSLKKQLREMELELAQTKLQLVEAKCKIQELEHQRGALMNEIQAAKNSWFSKTLNSIKTATGTQPLQPAPVTQPPKEST

SEQ ID NO: 299229 - protein, 377 aa, Artificial Sequence
  derived and/or modified sequence
MEQLPDLHSHFSDLNLEAHMYASQWFLTLFTAKFPLCMVFHIIDLLLCEGLNIIFHVALALLKTSKEDLLQADFEGALKFFRVQLPKRYRAEENARRLMEQACNIKVPTKKLKKYEKEYQTMRESQLQQEDPMDRYKRENRRLQEASMRLEQENDDLAHELVTSKIALRNDLDQAEDKADVLNKELLLTKQRLVETEEEKRKQEEETAQLKEVFRKQLEKAEYEIKKTTAIIAEYKQICSQLSTRLEKQQAASKEELEVVKGKMMACKHCSDIFSKEGALKLAATGREDQGIETDDEKDSLKKQLREMELELAQTKLQLVEAKCKIQELEHQRGALMNEIQAAKNSWFSKTLNSIKTATGTQPLQPAPVTQPPKEST

SEQ ID NO: 299230 - protein, 252 aa, Artificial Sequence
  derived and/or modified sequence
MGKSYDGRAYVITGMWNPNAPVFLALNEETPKDKQVYMTVAVDMVVTEVVEPVRFLLETVVRVYPANERFWYFSRKTFTETFFMRLKQSEGKGHTNAGDAIYEVVSLQRESDKEEPVTPTSGGGPMSPQDDEAEEESDNELSSGTGDVSKDCPEKILYSWGELLGKWHSNLGARPKGLSTLVKSGVPEALRAEVWQLLAGCHDNQAMLDRYRILITKVCWSLLEVHSRPCLPGYHQWKLQNSKYCRMANVAA

SEQ ID NO: 299231 - protein, 827 aa, Artificial Sequence
  derived and/or modified sequence
MEVRASLQKVSGSSDSVATMNSEEFVLVPQYADDNSTKHEEKPQLKIVSNGDEQLEKAMEEILRDSEKRPSSLLVDCQSSSEISDHSFGDIPASQTNKPSLQLILDPSNTEISTPRPSSPGGLPEEDSVLFNKLTYLGCMKVSSPRNEVEALRAMATMKSSSQYPFPVTLYVPNVPEGSVRIIDQSSNVEIASFPIYKVLFCARGHDGTTESNCFAFTESSHGSEEFQIHVFSCEIKEAVSRILYSFCTAFKRSSRQVSDVKDSVIPTPDSDVFTFSVSLEVKEDDGKGNFRLLVIPIPFEYFSPVPKDRDKFYFKLKQGIEKKVVITVQQLSNKELAIERCFGMLLSPGRNVKNSDMHLLDMESMGKSYDGRAYVITGMWNPNAPVFLALNEETPKDKQVYMTVAVDMVVTEVVEPVRFLLETVVRVYPANERFWYFSRKTFTETFFMRLKQSEGKGHTNAGDAIYEVVSLQRESDKEEPVTPTSGGGPMSPQDDEAEEESDNELSSGTGDVSKDCPEKILYSWGELLGKWHSNLGARPKGLSTLVKSGVPEALRAEVWQLLAGCHDNQAMLDRYRILITKDSAQESVITRDIHRTFPAHDYFKDTGGDGQESLYKICKAYSVYDEDIGYCQGQSFLAAVLLLHMPEEQAFCVLVKIMYDYGLRDLYRNNFEDLHCKFYQLERLMQEQLPDLHSHFSDLNLEAHMYASQWFLTLFTAKFPLCMVFHIIDLLLCEGLNIIFHVALALLKTSKEDLLQADFEGALKFFRVQLPKRYRAEENARRLMEQACNIKVPTKKLKKYEKEYQTMRESQLQQEDPMDRYKFFFL

SEQ ID NO: 299232 - protein, 308 aa, Artificial Sequence
  derived and/or modified sequence
MMEEISIMVAYDAHVFSQLHDEDFLTSLVAISKPRSMVPTKKLKKYEKEYQTMRESQLQQEDPMDRYKRENRRLQEASMRLEQENDDLAHELVTSKIALRNDLDQAEDKADVLNKELLLTKQRLVETEEEKRKQEEETAQLKEVFRKQLEKAEYEIKKTTAIIAEYKQICSQLSTRLEKQQAASKEELEVVKGKMMACKHCSDIFSKEGALKLAATGREDQGIETDDEKDSLKKQLREMELELAQTKLQLVEAKCKIQELEHQRGALMNEIQAAKNSWFSKTLNSIKTATGTQPLQPAPVTQPPKEST

SEQ ID NO: 299233 - protein, 582 aa, Artificial Sequence
  derived and/or modified sequence
MEVRASLQKVSGSSDSVATMNSEEFVLVPQYADDNSTKHEEKPQLKIVSNGDEQLEKAMEEILRDSEKRPSSLLVDCQSSSEISDHSFGDIPASQTNKPSLQLILDPSNTEISTPRPSSPGGLPEEDSVLFNKLTYLGCMKVSSPRNEVEALRAMATMKSSSQYPFPVTLYVPNVPEGSVRIIDQSSNVEIASFPIYKVLFCARGHDGTTESNCFAFTESSHGSEEFQIHVFSCEIKEAVSRILYSFCTAFKRSSRQVSDVKDSVIPTPDSDVFTFSVSLEVKEDDGKGNFRLLVIPIPFEYFSPVPKDRDKFYFKLKQGIEKKVVITVQQLSNKELAIERCFGMLLSPGRNVKNSDMHLLDMESMGKSYDGRAYVITGMWNPNAPVFLALNEETPKDKQVYMTVAVDMVVTEVVEPVRFLLETVVRVYPANERFWYFSRKTFTETFFMRLKQSEGKGHTNAGDAIYEVVSLQRESDKEEPVTPTSGGGPMSPQDDEAEEESDNELSSGTGDVSKDCPEKILYSWGELLGKWHSNLGARPKGLSTLVKSGVPEALRAEVWQLLAGCHDNQAMLDRYRILITK

SEQ ID NO: 299234 - DNA, 81 bp, Artificial Sequence
  derived and/or modified sequence
ttcctaatggataagtcgagcctgaccggggcactctgctccatcaccctggcttctccctgtggcactccaggcatatag

SEQ ID NO: 299235 - DNA, 914 bp, Artificial Sequence
  derived and/or modified sequence
ggagaggcattccataccagattctgtggcctgcaggtgacatgctgcctaagagaagcaggagtctgtgacagccaccccaacacgtgacgtcatggccagtagggaagatgagctgaggaactgtgtggtatgtggggaccaagccacaggctaccactttaatgcgctgacttgtgagggctgcaagggtttcttcaggagaacagtcagcaaaagcattggtcccacctgcccctttgctggaagctgtgaagtcagcaagactcagaggcgccactgcccagcctgcaggttgcagaagtgcttagatgctggcatgaggaaagacacctccagctcatctgttcatccatcaccagcccttgcccaccctggcccctgtgctgcctctggtcacacacttcgcagacatcaacactttcatggtactgcaagtcatcaagtttactaaggacctgcccgtcttccgttccctgcccattgaagaccagatctcccttctcaagggagcagctgtggaaatctgtcacatcgtactcaataccactttctgtctccaaacacaaaacttcctctgcgggcctcttcgctacacaattgaagatggagcccgtgaccgacctggagttacccagagagatgagattgatcagctgcaagaggagatggcactgactctgcaaagctacatcaagggccagcagcgaaggccccgggatcggtttctgtatgcgaagttgctaggcctgctggctgagctccggagcattaatgaggcctacgggtaccaaatccagcacatccagggcctgtctgccatgatgccgctgctccaggagatctgcagctgaggccatgctcacttccttccccagctcacctggaacaccctggatacactggagtgggaa

SEQ ID NO: 299236 - DNA, 944 bp, Artificial Sequence
  derived and/or modified sequence
ggagaggcattccataccagattctgtggcctgcaggtgacatgctgcctaagagaagcaggagaacagtcagcaaaagcattggtcccacctgcccctttgctggaagctgtgaagtcagcaagactcagaggcgccactgcccagcctgcaggttgcagaagtgcttagatgctggcatgaggaaagacatgatactgtcggcagaagccctggcattgcggcgagcaaagcaggcccagcggcgggcacagcaaacacctgtgcaactgagtaaggagcaagaagagctgatccggacactcctgggggcccacacccgccacatgggcaccatgtttgaacagtttgtgcagtttaggcctccagctcatctgttcatccatcaccagcccttgcccaccctggcccctgtgctgcctctggtcacacacttcgcagacatcaacactttcatggtactgcaagtcatcaagtttactaaggacctgcccgtcttccgttccctgcccattgaagaccagatctcccttctcaagggagcagctgtggaaatctgtcacatcgtactcaataccactttctgtctccaaacacaaaacttcctctgcgggcctcttcgctacacaattgaagatggagcccgtgaccgacctggagttacccagagagatgagattgatcagctgcaagaggagatggcactgactctgcaaagctacatcaagggccagcagcgaaggccccgggatcggtttctgtatgcgaagttgctaggcctgctggctgagctccggagcattaatgaggcctacgggtaccaaatccagcacatccagggcctgtctgccatgatgccgctgctccaggagatctgcagctgaggccatgctcacttccttccccagctcacctggaacaccctggatacactggagtgggaa

SEQ ID NO: 299237 - DNA, 402 bp, Artificial Sequence
  derived and/or modified sequence
atgagtcagcaacgaccagcccgaaagctaccgagcctgttgcttgaccccacagaggagactgttcgacggcggtgcagagatccaatcaatgttgaggggctgttgccctcaaagatacgcatcaacctcgaagataacgttcaatacgttagcatgcgcaaagctctgaaggtgaagagacctcgttttgacgtaagcctggtgtacctgactagaaagtttatggacctcgtgcggtcggccccgggggggattctggacctgaataaagtcgccactaagctgggagtccggaagcgtcgtgtgtatgatatcactaacgtgctggatgggattgacctagtagagaagaagagcaagaatcacatacgctggatgaccctatctcagtgtacctag

SEQ ID NO: 299238 - DNA, 402 bp, Artificial Sequence
  derived and/or modified sequence
atgagccagcagaggcctgccaggaagctgcccagcctgctgctggaccccacagaggagaccgtgagaagacgctgccgggaccccatcaacgtggagggcctgctgcccagcaagatccgcatcaacctggaggacaacgtgcagtatgtgtccatgaggaaggccctgaaggtgaagaggcccaggtttgatgtgtccctggtgtacctgaccaggaagttcatggacctggtgcgcagcgcccctgggggcatcctggacctgaacaaggtggccaccaagctgggcgtgaggaagagaagagtgtatgacatcaccaacgtgctggatggcatcgacctggtggagaagaagagcaagaaccacatccgctggatgaccctgagccagtgcacctag

SEQ ID NO: 299239 - DNA, 402 bp, Artificial Sequence
  derived and/or modified sequence
atgagccagcagcggcccgcccggaagctgcccagcctgctgctggaccccacagaagagacggtgagaaggcggtgccgggacccgattaacgtagagggccttctgccttcaaagattcgcattaacctggaagacaacgtgcagtacgtgagcatgagaaaagcactaaaggtgaagagacctcggtttgacgttagtctggtttacctcacccgaaagtttatggacctggtgcgctcagctcctggcggcattttggacctgaacaaggtggccactaagctgggcgtcaggaaaaggcgggtatacgacattactaacgtcctggatggcattgaccttgtggagaagaagagcaaaaaccatattcgctggatgacactgtcccagtgcacgtag

SEQ ID NO: 299240 - DNA, 402 bp, Artificial Sequence
  derived and/or modified sequence
atgagccagcagcggcctgcacgtaagctacctagcctgttacttgatcctacagaggagactgtgagacggaggtgtagggacccaattaatgttgaaggactgctgcctagtaaaattagaattaatttagaggataacgtgcagtatgtctctatgcgcaaggccctgaaagtgaaaaggccaagatttgatgtgtccctcgtctacctgacacggaagtttatggatttggtcagaagcgctcctggaggaattttagacctgaataaagtcgctactaagctgggcgttaggaagaggagagtgtacgatatcaccaatgtgctggacggaattgatctcgtggagaaaaagagtaaaaaccacatcagatggatgacgctgtcacagtgtacatag

SEQ ID NO: 299241 - DNA, 1078 bp, Artificial Sequence
  derived and/or modified sequence
atgcgggaagatggcgggccgggcgacttgagatccgcgggtctccctcctctttttccgtctgcgtcgggagctcccgggcacgtgaggccgtgccgcgtttactggcgggcgggacggcctagccgggcggcgcctcggaggaagccgcggaccccttaggtgctgggcccttggaaatcggcgcgtggggggcggtgctcgagctgagcgcgagagggcgggagagctcgtggggtgcgaggggagcaggacgcccggccgggcagcatgagtcagcagcggccggcgaggaagttacccagtctcctcctggacccgacggaggagacggttcgccgtcggtgccgagaccccatcaacgtggagggcctgctgccatcaaaaataaggattaatttagaagataatgtacaatatgtgtccatgagaaaagctctaaaagtgaagagacctcgttttgatgtatcgctggtttatttaactcgaaaatttatggatcttgtcagatctgctcccgggggtattcttgacttaaacaaggttgcaacgaaactgggagtccgaaagcggagagtgtatgacatcaccaatgtcttagatggaatcgacctcgttgaaaagaaatccaagaaccatattagatggatgactctatcacagtgcacataaggagcaccaacggacctatcgatgtctatttgtgtgaagtggagcagggtcagaccagtaacaaaaggtctgaaggtgtcgggacctcttcatctgagagcactcatccagaaggccctgaggaagaagaaaatcctcagcaaagtgaagaattgcttgaagtaagcaactgatggcatttgagaatttatgtatcactgagttttttgggaatatcttcgtggagaattacgcatcaaatttgattctcagagcaataaattatccatgaagtgctctcgttctcagtagcggcatcatggccagtagtgtctttgaggagttcaccacttagattactgagtaattgtggtttccacatttgaaaacaactccttttataattattcactgctttttgtcagtg

SEQ ID NO: 299242 - DNA, 402 bp, Artificial Sequence
  derived and/or modified sequence
atgagccagcagagacccgccagaaagctgcccagcctgctgctggaccccaccgaggagaccgtgagaagaagatgcagagaccccatcaacgtggagggcctgctgcccagcaagatcagaatcaacctggaggacaacgtgcagtacgtgagcatgagaaaggccctgaaggtgaagagacccagattcgacgtgagcctggtgtacctgaccagaaagttcatggacctggtgagaagcgcccccggcggcatcctggacctgaacaaggtggccaccaagctgggcgtgagaaagagaagagtgtacgacatcaccaacgtgctggacggcatcgacctggtggagaagaagagcaagaaccacatcagatggatgaccctgagccagtgcacctag

SEQ ID NO: 299243 - protein, 184 aa, Artificial Sequence
  derived and/or modified sequence
MSCPTPGCDGSGHVSGSFLTHRSLSGCPRATSAMKKAKLSGEQMLTIKQRASNGIENDEEIKQLDEEIKELNESNSQMEADMIKLRTQVTITTMESNLKTIEEENKVIEQQNESLLHELANLSQSLIHSLANIQLPHMDPINEQNFDAYVTTLTEMYTNQDRYQSPENKALLENIKQAVRGIQV

SEQ ID NO: 299244 - DNA, 555 bp, Artificial Sequence
  derived and/or modified sequence
atgtcatgtccaacccccgggtgcgatggctccggtcacgtaagcggctctttccttacccaccgttccctaagcggatgtcccagagccacctcagccatgaaaaaggctaagttaagcggggagcagatgcttactataaagcagagggcttcgaacggtatcgaaaatgatgaagaaatcaaacagctggacgaggaaattaaggaactgaacgagtctaactctcagatggaagctgatatgataaagctgagaacacaagtcacaataaccacgatggagagcaatcttaagacaatcgaggaagagaataaggtgatcgaacaacagaatgagagcctgttgcacgagttggcgaatctgagtcaatcacttatacacagcctggcaaatattcagttgccacatatggaccctattaatgagcagaactttgacgcctatgttactacactgacggaaatgtacacaaaccaggatcgatatcagagcccagagaacaaggccctcctcgagaacattaaacaagctgtgaggggcatccaagtgtag

SEQ ID NO: 299245 - DNA, 555 bp, Artificial Sequence
  derived and/or modified sequence
atgagctgccccaccccaggctgtgatggcagcggccacgtgtctggcagcttcctgacccacaggagcctgagcggctgcccccgggccaccagcgccatgaagaaggccaagctgagcggggagcagatgctgaccatcaagcagagggccagcaatggaattgaaaatgatgaggagatcaagcagctggatgaggagatcaaggagctgaatgaaagcaacagccagatggaggccgacatgatcaagctgcggacccaggtgaccatcaccaccatggagagcaacctgaagaccatcgaggaggagaacaaggtgattgagcagcagaatgaaagcctgctgcacgagctggccaacctgagccagagcctcatccacagcctggccaacatccagctgccccacatggaccccatcaatgagcagaactttgatgcctacgtgaccaccctgacagagatgtacaccaaccaggaccgctaccagagccctgagaacaaggccctgctggagaacatcaagcaggccgtgcggggcatccaggtgtag

SEQ ID NO: 299246 - DNA, 3642 bp, Artificial Sequence
  derived and/or modified sequence
aagcgcctggaagcggaagctggacagacgaggagaggccttgggtgtgacatcaacggaacctgagggaagcaaaactcagcaaggacgcacccggtctgctggactggggctttggcctttcaggttgcccaagagcaaagaaaagtggtatcaggatagcacagagcaaagaagataaagaagatcaagaacccatcaggtgtccggtccccgggtgcgacggccagggccacatcactgggaagtacgcgtcccatcgcagcgcctccgggtgccccttggcggccaagaggcagaaagacgggtacctgaatggctcccagttctcctggaagtcggtcaagacggaaggcatgtcctgccccacgccaggatgcgacggctcaggccacgtcagcggcagcttcctcacacaccgcagcttgtcaggatgcccgagagccacgtcagcgatgaagaaggcaaagctttctggagagcagatgctgaccatcaaacagcgggccagcaacggtatagaaaatgatgaagaaatcaaacagttagatgaagaaatcaaggagctaaatgaatccaattcccagatggaagccgatatgattaaactcagaactcaggtaacaattaccacgatggagagcaacctgaagaccatcgaagaggagaacaaagtgattgagcagcagaacgagtctctcctccacgagctggcgaacctgagccagtctctgatccacagcctggctaacatccagctgccgcacatggatccaatcaatgaacaaaattttgatgcttacgtgactactttgacggaaatgtatacaaatcaagatcgttatcagagtccagaaaataaagccctactggaaaatataaagcaggctgtgagaggaattcaggtctgaacagctgctgtagtgatgaaactcttgcttaaaaaggatgcctcttgttttttgctgctgtaacttaccagaaagtgttctatatttatttctgtttgaatttgaaacagtgttatgcttacaagacttcataatgattttatgtcttgctttaaagatagtacctgcagaatagtttttgaatacacccacattttgtacgtttccatgtaagctgacatagtgttctgccatgtaatgtttatagctgctgatgtatgcacatttgggggtatatctatttctgaagaggtaagctgatcaaaataaatagagtgtaaattctttttaatgctttagtgattaaatgttttagtattttgaactgaaatggacacacaaacacacacacgcacacacagacccacagctttgaatgatcatgttgtggctgagcagccgctttttagacgttatcattttgcctcatgttggaggactttatggaatttaagaaatacattttgtgtgcatattgtttcatagcaagaattcgttgcaaaaatgctttatttttgaacaatgcttggaaatattatgtgacttttttgtttgtttgttttaggaggatggtgtatggtgggggcaataaatgaggttttttgcattccaaggaaatggcatatggattaactgtaagaaatgaaataagtaatttattgtaagacaacatcaagccatggaaacttggcagaagattcaaagcagcttaaacagcacttttaaattaactcctaagcgttacatggttgtgactatggaaactccagttaagacaggatcttatcagaggtggacaacgtgaagatttccttttccattttcaataaactttggaacaaccttctcgtatctcccctagagtttcgtgcccctctgaactgtctgttattgcaatgtagtttatcaacagaatttgtgtgttttcgatttaagctaaaagataatttaagaacatttatttccccttttcactttaaaaaattatgattattcctattattgttatgaaccttcttattttacatttgagggataaaggcaaatgatttgtgagtcttctagttactggaccgagttttctgctggatctggtgggaaggcagctcggtaaagtttccctcctgctccccccgcccgactttgactctgaatcagcatttggtcctattcagaggactcttaccacgacgtttctgttctacacttgggtggagaccagttgaccatagagcatttgcagagcctcattgtttgatttcttgtgactattctaagaatgaatgcaatcagattttaaaagtaactaaatatacttcagcacttttttgctttaaactagatcatcttagacttgtttataccttccagatttgattgttttactcccaatgactgcactatatgtatgcataagaccacttttgagcgctgtgttcccccttctgagtagtcctttgacgacgtgttgtgttttctgatgttgacttgagttccatttagtagcatctcttccttccatgtcttgatgttatgcaggaagtacagacgtactttaaatttttgttatgaaataaaaaaaagatgggttttgtaaaaataaaaaaaaaatatttttagcagaacaggacttacagggtcattgtccccacaatgtgccagtcgactatttgcacttaccttgtcctatatatccgtacggaggtgtgcaattcctcgtgtcagtagccttgtgacactgaacctggatggattatagaggagccctcacggctgatcaataatgttgcaaagggagactacagggatctcacgacgaatattctgatacaatactcaacctcggtatatatatatgtgtataaatatatgtatatcccagcggcactttatactgttcactgtacaaaagcttacagttttccacaaggactttaataactagctgggaaaagacgatgtaattatttcggggctctgcggaaccttctctgtacagcgccccctttctgttgtgctattggttgcagctgccatgctcagaatgcgttttgagagctgaagcaaggtgcttgcagtcacctgaggccgtccgtgtggcccagggccccagctgcctttagggcccccattgttcataacagcatatgcatttccccaccgcgttgtgtctgcagcttctttgccaatatagtaatgcttttagtagagtactagatagtatcagttttggattcttattgttatcacctatgtacaatggaaagggattttaagcacaaacctgctgctcatctaacgttggtacataatctcaaatcaaaagttatctgtgactattatatagggatcacaaaagtgtcacatattagaatgctgacctttcatatggattattgtgagtcatcagagtttattataacttattgttcatattcatttctaagttaatttaagtaatcatttattaagacagaattttgtataaactatttattgtgctctctgtggaactgaagtttgatttatttttgtactacacggcatgggtttgttgacactttaattttgctataaatgtgtggaatcacaagttgctgtgatacttcatttttaaattgtgaactttgtacaaattttgtcatgctggatgttaacacatcttactctaaataaacaaggtgttgccaca

SEQ ID NO: 299247 - DNA, 555 bp, Artificial Sequence
  derived and/or modified sequence
atgagctgccccacccccggctgcgacggcagcggccacgtgagcgggagtttcctgacccataggagtctgtctggatgcccccgggctactagcgctatgaaaaaagctaagctctcaggcgaacagatgcttaccattaagcaaagggctagtaacggcatagagaacgacgaggagattaaacagcttgacgaggagattaaagagctcaacgagagcaattctcagatggaagccgatatgattaaactaagaacgcaggtgaccattaccaccatggagtcgaatctgaaaactattgaagaggaaaacaaggtcatcgagcagcagaatgaatcgctactgcatgagttggcaaatctgtcccagagcttgatacactcccttgctaatatccagttgcctcacatggaccccatcaatgagcaaaatttcgacgcatatgttactactctgaccgagatgtacacgaaccaggaccgataccagtcgccggaaaataaggcccttcttgaaaacattaaacaagctgtaaggggcatacaagtctag

SEQ ID NO: 299248 - DNA, 555 bp, Artificial Sequence
  derived and/or modified sequence
atgtcatgccctactcctgggtgtgacggctcaggccatgtttctggctcatttttgacccataggtcactctcaggatgccctagggctactagtgctatgaagaaggccaagctgagtggagagcaaatgctgaccattaagcagcgggcaagcaacggaattgaaaacgacgaagaaataaagcagttagacgaagaaataaaggagcttaatgagtctaacagtcagatggaagcagacatgatcaaactgcgaacacaggtcactatcactaccatggagagtaacctcaaaacgatagaggaagaaaataaagtcatcgaacagcagaatgagagtttactccatgagctcgccaatctgtcgcagtcactgatccactctttggctaacatccagctaccccatatggaccctattaatgaacaaaattttgatgcctatgtcactacacttacggagatgtacacaaaccaggataggtaccaatcccccgagaacaaagctttacttgagaacatcaagcaagccgttcgcggtatccaggtgtag

SEQ ID NO: 299249 - DNA, 555 bp, Artificial Sequence
  derived and/or modified sequence
atgagctgccccacccccggctgcgacggcagcggccacgtgagcggcagcttcctgacccacagaagcctgagcggctgccccagagccaccagcgccatgaagaaggccaagctgagcggcgagcagatgctgaccatcaagcagagagccagcaacggcatcgagaacgacgaggagatcaagcagctggacgaggagatcaaggagctgaacgagagcaacagccagatggaggccgacatgatcaagctgagaacccaggtgaccatcaccaccatggagagcaacctgaagaccatcgaggaggagaacaaggtgatcgagcagcagaacgagagcctgctgcacgagctggccaacctgagccagagcctgatccacagcctggccaacatccagctgccccacatggaccccatcaacgagcagaacttcgacgcctacgtgaccaccctgaccgagatgtacaccaaccaggacagataccagagccccgagaacaaggccctgctggagaacatcaagcaggccgtgagaggcatccaggtgtag

SEQ ID NO: 299250 - protein, 620 aa, Artificial Sequence
  derived and/or modified sequence
MLWLWGELPQAAKSSSPHKMKESSPLSSRKICDKSHFQAIHSESSDTFSDQSPTLVGGALLDQNKPQTEMQFVNEEDLETLGAAAPLLPMIEELKPPSASVVQTANKTDSPSRKRDKRSRHLGADGVYLDDLTDMDPEVAALYFPKNGDPSGLAKHASDNGARSANQSPQSVGSSGVDSGVESTSDGLRDLPSIAISLCGGLSDHREITKDAFLEQAVSYQQFVDNPAIIDDPNLVVKIGSKYYNWTTAAPLLLAMQAFQKPLPKATVESIMRDKMPKKGGRWWFSWRGRNTTIKEESKPEQCLAGKAHSTGEQPPQLSLATRVKHESSSSDEERAAAKPSNAGHLPLLPNVSYKKTLRLTSEQLKSLKLKNGPNDVVFSVTTQYQGTCRCEGTIYLWNWDDKVIISDIDGTITRSDTLGHILPTLGKDWTHQGIAKLYHKVSQNGYKFLYCSARAIGMADMTRGYLHWVNERGTVLPQGPLLLSPSSLFSALHREVIEKKPEKFKVQCLTDIKNLFFPNTEPFYAAFGNRPADVYSYKQVGVSLNRIFTVNPKGELVQEHAKTNISSYVRLCEVVDHVFPLLKRSHSSDFPCSDTFSNFTFWREPLPPFENQDIHSASA

SEQ ID NO: 299251 - protein, 932 aa, Artificial Sequence
  derived and/or modified sequence
MSRVQTMNYVGQLAGQVFVTVKELYKGLNPATLSGCIDIIVIRQPNGNLQCSPFHVRFGKMGVLRSREKVVDIEINGESVDLHMKLGDNGEAFFVQETDNDQEVIPMHLATSPILSEGASRMECQLKRGSVDRMRGLDPSTPAQVIAPSETPSSSSVVKKRRKRRRKSQLDSLKRDDNMNTSEDEDMFPIEMSSDEAMELLESSRTLPNDIPPFQDDIPEENLSLAVIYPQSASYPNSDREWSPTPSSLVDCKRTAPHLAVAAEGGLSSSCPPQSSLFHPSESPSGSRPSTPKSDSELVSKSTERTGQKNPEMLWLWGELPQAAKSSSPHKMKESSPLSSRKICDKSHFQAIHSESSDTFSDQSPTLVGGALLDQNKPQTEMQFVNEEDLETLGAAAPLLPMIEELKPPSASVVQTANKTDSPSRKRDKRSRHLGADGVYLDDLTDMDPEVAALYFPKNGDPSGLAKHASDNGARSANQSPQSVGSSGVDSGVESTSDGLRDLPSIAISLCGGLSDHREITKDAFLEQAVSYQQFVDNPAIIDDPNLVVKIGSKYYNWTTAAPLLLAMQAFQKPLPKATVESIMRDKMPKKGGRWWFSWRGRNTTIKEESKPEQCLAGKAHSTGEQPPQLSLATRVKHESSSSDEERAAAKPSNAGHLPLLPNVSYKKTLRLTSEQLKSLKLKNGPNDVVFSVTTQYQGTCRCEGTIYLWNWDDKVIISDIDGTITRSDTLGHILPTLGKDWTHQGIAKLYHKVSQNGYKFLYCSARAIGMADMTRGYLHWVNERGTVLPQGPLLLSPSSLFSALHREVIEKKPEKFKVQCLTDIKNLFFPNTEPFYAAFGNRPADVYSYKQVGVSLNRIFTVNPKGELVQEHAKTNISSYVRLCEVVDHVFPLLKRSHSSDFPCSDTFSNFTFWREPLPPFENQDIHSASA

SEQ ID NO: 299252 - DNA, 2799 bp, Artificial Sequence
  derived and/or modified sequence
atgtctagggtgcagactatgaactacgttggacaactggctggccaagtctttgtgactgtcaaggagttatataaggggctgaaccccgcgaccctgagtgggtgtatcgacatcatcgttatacgacagccaaacggcaacttgcagtgctcacctttccatgttcgattcggcaagatgggagtcctacggagccgcgagaaagtcgttgatatagaaatcaatggagaaagtgtcgatttgcatatgaaactgggagataacggcgaagccttttttgtgcaggagacagacaatgaccaggaggttataccaatgcacctcgctacaagtccaatccttagcgagggcgccagtcggatggaatgccagctgaaacgagggtcggtcgatcgaatgcgcggcctggatccgtctacacccgcacaagtgattgccccttcggaaacaccatccagttcttccgtcgttaagaaacgccggaaacgccggaggaagtcccagctggactccctgaagagggacgataatatgaacaccagtgaagatgaagatatgtttcccattgagatgtcctcagatgaggccatggaactactggagtcgagccgcacgctgcctaatgacatcccgccgtttcaggatgatatacccgaggagaatctatcactagccgtgatttacccacagagcgcaagctaccctaattccgacagagagtggagccccactccttcttccctagtggactgtaaacgtactgccccacacctggccgttgcggcggagggcggcctgtcctcttcatgccctccccaatcatcactgttccacccatcagaatcacctagcggcagtcgtccttccactccaaagtcagacagtgaactggtcagcaagtcgactgagcgtaccggacagaaaaatccagagatgctgtggttgtggggtgaactaccccaagccgccaagagttcatccccacataagatgaaagagagttctccactgtcatctaggaagatatgcgataagtctcatttccaagccattcattccgaaagctcggataccttctctgaccaatctcctaccctcgtgggtggagctctgttagatcagaataagccccagacagaaatgcaatttgtcaacgaagaggatctggaaactttgggtgctgctgcacccctcttgccaatgatcgaggaactgaagccccctagcgctagcgtcgtgcagacagcgaacaaaaccgatagcccttcccggaaacgagacaaaaggtcaagacacctgggggctgacggcgtataccttgacgacttaactgacatggacccagaagtggctgccctctactttccaaagaatggagatcctagtggcctggctaaacacgctagcgacaacggcgcgcgaagcgccaatcagtccccccaatctgtcggttccagcggtgtcgacagtggcgtagaaagtacaagtgacgggctgcgcgatctgccgtctatcgccatttctctctgcggcggactgagcgaccaccgcgaaattacgaaggatgcgtttctcgaacaggccgtgtcataccaacaatttgtcgacaatcctgcaataattgacgatcctaatctcgtggttaagattggtagcaagtactataactggaccacagcggcccctctgctgttggccatgcaagcctttcagaagcccctgcccaaggccactgtggagtcaataatgagggacaaaatgcctaagaaagggggaaggtggtggttctcctggagagggagaaacaccacaatcaaagaggagtccaagcccgaacagtgtctcgcaggcaaggcacactcaactggcgaacagcccccccaactcagtctggccactcgtgtgaagcacgagtccagttcaagtgacgaggaaagagccgctgctaaaccttcaaacgccgggcacctccccttacttccgaacgtgtcctacaagaaaactctgcggcttacgtctgaacagctcaagtccttgaagctgaaaaacgggcccaatgacgtcgtttttagcgtgactacacagtaccagggaacatgcagatgcgaaggaactatttacctctggaattgggacgacaaggttatcatttcagacatcgatggcacaatcactcgtagcgacaccctaggccacattctgcccacattaggcaaggactggactcaccagggaatagctaagctgtaccacaaagtgtctcaaaatgggtacaaattcctgtattgctctgcgagggctatcggtatggccgatatgaccagaggatacctgcattgggtcaacgaacgggggacagtgctgccccagggtcctctgctcctgagtcctagcagtctgttcagcgctctgcacagagaagtgattgagaagaagcctgaaaagtttaaagtccaatgcctcactgatattaaaaacttattctttccgaacacggagcccttttacgctgcattcggcaataggcccgctgacgtctatagttacaaacaggtgggggtctccttgaacaggattttcacggtcaatcccaaaggggagcttgtccaagaacatgccaaaactaacatctcttcttacgtcaggctctgtgaggtagtggaccatgtgtttcctctgctgaaacgttcgcactcttcagattttccctgctcggacaccttttcgaacttcacattctggcgggaacctctgcctccttttgaaaatcaagatatccactcggcatccgcctag

SEQ ID NO: 299253 - DNA, 2799 bp, Artificial Sequence
  derived and/or modified sequence
atgagccgggtgcagaccatgaactacgtgggccagctggccggccaggtgtttgtgacagtgaaggagctgtacaagggcctgaacccagccaccctgagcggctgcatcgacatcatcgtcatccggcagcccaacggcaacctgcagtgcagccccttccacgtgcgctttgggaagatgggcgtgctgcggagccgggagaaggtggtggacatcgagatcaacggggagagcgtggacctgcacatgaagctgggggacaatggagaggccttctttgtgcaggagacagacaatgaccaggaggtgatccccatgcacctggccaccagccccatcctgtctgagggcgccagcaggatggagtgccagctgaagaggggctctgtggacaggatgaggggcctggaccccagcaccccagcccaggtgattgcccccagcgagacccccagcagcagctctgtggtgaagaagaggaggaagagaagaaggaagagccagctggacagcctgaagagagatgacaacatgaacaccagtgaagatgaggacatgttccccatcgagatgagcagtgatgaggccatggagctgctggagagcagcaggaccctgcccaatgacatcccccccttccaggatgacatccctgaggagaacctgagcctggccgtcatctacccccagagcgccagctaccccaacagcgaccgggagtggagccccacccccagcagcctggtggactgcaagaggacagccccccacctggccgtggccgctgagggcggcctgagcagcagctgccccccccagagcagcctcttccaccccagcgagagccccagcggcagccggcccagcacccccaagagtgacagcgagctggtgtccaagagcacagagaggacaggccagaagaaccctgagatgctgtggctgtggggcgagctgccccaggccgccaagagcagcagcccccacaagatgaaggagagcagccccctgagcagcaggaagatctgtgacaagagccacttccaggccatccacagcgagagcagtgacaccttcagtgaccagagccccaccctggtgggcggggccctgctggaccagaacaagccccagacagagatgcagtttgtgaatgaggaggacctggagaccctgggcgccgccgcccccctgctgcccatgattgaggagctgaagccacccagcgcctctgtggtgcagacagccaacaagacagacagccccagcaggaagagggacaagaggagccgccacctgggcgcagatggagtgtacctggatgacctgacagacatggaccctgaggtggccgccctgtacttccccaagaatggagaccccagcggcctggccaagcacgccagtgacaacggggcccggagcgccaaccagagcccccagagcgtgggcagcagtggagtggacagcggcgtggagagcaccagtgatggcctgcgggacctgcccagcatcgccatcagcctgtgtggcggcctgagtgaccaccgggagatcaccaaggatgccttcctggagcaggccgtgtcctaccagcagtttgtggacaacccagccatcattgatgaccccaacctggtggtgaagattggcagcaagtactacaactggaccacagctgcccccctgctgctggccatgcaggccttccagaagcccctgcccaaggccaccgtggagagcatcatgagggacaagatgcccaagaagggcggccgctggtggttctcctggaggggcaggaacaccaccatcaaggaggagagcaagccagagcagtgcctggccggcaaggcccacagcactggagagcagcccccccagctgagcctggccaccagggtgaagcatgagagcagcagcagtgatgaggagagagctgctgccaagcccagcaatgccggccacctgcccctgctgcccaacgtgtcctacaagaagaccctgcggctgaccagcgagcagctgaagagcctgaagctgaagaatggccccaatgatgtggtgttttctgtgaccacccagtaccagggcacctgccgctgtgagggcaccatctacctgtggaactgggatgacaaggtgatcatcagtgacattgatggcaccatcaccaggagtgacaccctgggccacatcctgcccaccctgggcaaggactggacccaccagggcatcgccaagctgtaccacaaggtgtcccagaatggctacaagttcctgtactgcagcgcccgggccatcggcatggctgacatgacccggggctacctgcactgggtgaatgaaagaggaacagtgctgccccagggccccctgctgctgagccccagcagcctcttcagcgccctgcaccgggaggtgattgagaagaagccagagaagttcaaggtgcagtgcctgacagacatcaagaacctcttcttccccaacacagagcccttctacgccgccttcggcaacagaccagcagatgtgtacagctacaagcaggtgggcgtgtccctgaaccgcatcttcaccgtgaaccccaagggggagctggtgcaggagcacgccaagaccaacatcagcagctatgtgcggctgtgtgaggtggtggaccacgtgttccccctgctgaagaggagccacagcagtgacttcccctgcagcgacaccttcagcaacttcaccttctggagggagcccctgcccccatttgagaaccaggacatccacagcgccagcgcctag

SEQ ID NO: 299254 - DNA, 3233 bp, Artificial Sequence
  derived and/or modified sequence
agcaagctggagagggagagaggatgggaggcgaggaggcagcctgagggaaggaacaggagggaagagagatgaagggcaagaccggggccagccatgcctgtcctaacagcagccacccagcagtggcccagcctgctgagaactagaaaatcagaagaaaaaggagaatccaccaggagacccaggttcgcatgagcaggggcctttatctgaagttaatggaagctgagccaggtcctgacaatgtgccttctgatggggagatgagactttcctctgaaagctaaggtaactctgaagcgtgagctgccagaattcaaggccacctgcttaacagaagacaactagaaacctcatccatgagcagagtgcagaccatgaattacgtggggcagttagccggccaggtgtttgtcaccgtgaaggagctctacaaggggctgaatcccgccacactctcagggtgcattgacatcattgtcatccgccagcccaatggaaacctccaatgctcccctttccacgtccgctttgggaagatgggggtcctgcgctcccgagagaaagtggttgacatagaaatcaatggggaatctgtggatttgcatatgaaattgggagataatggagaagcattttttgttcaagaaacagataatgatcaggaagttatccctatgcacctggccacctcccccatcctgtcagaaggagcttcgagaatggaatgccagctgaaaaggggctctgtggacaggatgagaggcctggaccccagcacgccagcccaagtgatcgctcccagcgagacgccgtcaagcagctctgtagtaaagaagagaagaaaaaggaggagaaagtcacagctggacagcctgaagagagatgacaacatgaacacatctgaggatgaggacatgttccccatcgagatgagctcggatgaggccatggagctgctggagagcagcagaactcttcctaatgatatacctccattccaagatgatattcctgaggaaaacctctccctggctgtgatttaccctcagtcagcctcataccctaattcggatagagagtggtcacccactcccagtagcctggtagattgcaaaaggactgcccctcatcttgcagttgcggccgagggaggtctgtctagttcttgccctccacagtcttccctgttccatccttcggaaagtccttccggttcccgaccttcaacacctaaaagtgattcagaattggtcagcaagtccacggaaaggacagggcagaagaacccagaaatgctttggctgtggggagagctgccgcaggctgctaagtcttcttctccacacaagatgaaagagtccagcccattgagcagtagaaaaatttgtgataaaagtcactttcaggccattcacagcgaatcttcagacacttttagtgaccaatcgccaactctggtcggtggggcacttttggaccagaacaagcctcagacagaaatgcagtttgtgaatgaagaagacctggagaccttaggagcagcagcgccactcttgcccatgatcgaggagctcaaacccccctctgccagtgtagtccagacagcaaacaagacggattctccttccaggaaaagagataaacgaagccgacatcttggtgctgacggcgtctacttggatgacctcacagacatggatcctgaagtggcggccctgtattttcccaaaaacggagatccttccggactcgcaaaacatgcaagcgacaacggagcccggtcagccaaccagtccccgcagtcggtgggcagctcgggcgtggacagtggcgtggagagcacctcggacgggctgagggacctcccttccatcgccatctccctctgcgggggcctcagcgaccaccgggagatcacgaaagatgcattcctggagcaagctgtgtcatatcaacagtttgtggacaaccccgctattatcgatgaccccaatctcgtggtaaagattgggagtaaatattataactggacaacagcagcacccctcctcctggcaatgcaggccttccagaaacctttgccaaaggccactgtggaatctatcatgagggataaaatgcccaaaaagggaggaagatggtggttttcatggaggggaagaaacaccacaatcaaggaggaaagtaagccagagcagtgcttggctggcaaggcccatagcaccggagagcaaccgccgcagctcagcttggccaccagggtaaagcatgaatcatcctccagtgatgaggagcgcgcagctgccaagccatcaaacgcaggccacctccctcttctgcctaatgtcagctacaagaagactctccggctgacttccgagcagcttaaaagcttgaagttgaagaatggccccaacgacgtggttttcagtgtcaccacgcagtaccaaggcacgtgccgctgtgagggcaccatctatctgtggaactgggatgataaagtcatcatttctgatattgatgggacaattaccagatcagatactcttggccacattttgcccacccttgggaaggattggacccatcagggcatcgctaagctgtaccataaagtgagccagaatggatataaatttctctactgttctgcccgtgccatcgggatggcggacatgacgcggggctacctgcactgggtcaacgagaggggcacggtgctgccccaggggcccctgctgctgagtcccagcagcctcttctctgccctgcacagagaagtgattgaaaagaagccagaaaagtttaaagtccagtgtttgacagacatcaaaaacctgtttttccccaacacagaacccttttatgctgcttttggaaaccgaccagctgatgtgtattcatacaagcaagtaggagtgtctttgaatagaatatttaccgtcaaccctaaaggagagctggtacaggaacatgcaaagaccaacatctcttcgtatgtgagactctgtgaagtagtcgaccacgttttcccgttgctgaaaagaagccattcttcagactttccctgttcggataccttcagtaacttcaccttttggagagagccactgccaccttttgaaaaccaggacattcattctgcctcagcgtaaaatgtcccaagcagcctcttgccagcagtgcagagcctggttgtcacccattaaaggataggtctccccgga

SEQ ID NO: 299255 - DNA, 2799 bp, Artificial Sequence
  derived and/or modified sequence
atgagccgggtgcagaccatgaactacgtgggccagctggccggccaggtatttgttactgttaaggagttatacaagggcctgaaccccgccacgctctccgggtgtatcgatattatcgttattcggcagcccaatggaaacctgcagtgctcgccctttcacgtgcggttcgggaaaatgggtgtactgcggagcagagaaaaagtggttgacattgaaatcaacggagagtcagtagacctgcacatgaagctgggcgacaatggagaggccttcttcgtgcaggaaactgataacgaccaggaggtgatccccatgcatctggcaacttctccaattctgtctgagggtgccagtcgcatggaatgtcaattaaagcggggaagcgtggaccggatgcgcggcttagatccctccacccccgcccaagtgatcgccccttcagagactccgtcctcctcaagtgtggttaaaaagaggcgtaaacggaggagaaaatctcaacttgattctctgaagcgggatgacaatatgaatacctcagaagatgaagacatgttccccattgagatgagtagcgatgaggcgatggaattgctggaatctagccgtacccttccaaatgatataccacccttccaggacgacatccccgaggagaacctaagcttagccgtgatatatccacagagcgcctcttatcctaactcagaccgcgagtggagtcccaccccctcttccctcgttgattgcaaaagaacagccccgcacctggcagtagcggccgaaggggggttgagctcctcttgtcccccacagagttcactattccacccctccgaatctcccagtggatcccgccccagcacacctaaatctgacagtgaacttgtctcaaaaagcacagagcgaacaggtcagaagaatcccgagatgctctggctttggggagagcttccacaggccgctaagtcgagctcgccacataagatgaaagagagttcccccctgagctcccgcaaaatctgtgacaaatcccattttcaggcaattcattcagagtcctcagacacattcagtgatcagagccctaccctggtcggaggcgcgttattggatcagaacaaaccccagaccgaaatgcaattcgtgaatgaggaggatcttgagaccctcggagccgctgccccattgctacctatgattgaggaactcaaacccccatccgctagtgtagtgcagacagccaacaaaacggacagtcctagtaggaaacgggacaaacgctcacgccatcttggggcagatggggtatacctggacgacctcaccgatatggatccggaggtcgctgccctttatttccccaagaacggtgatccctctgggctcgccaagcatgcttccgacaatggcgcaagaagcgcaaaccagtcgcctcagagtgtgggtagctccggtgtagattctggagttgagtccacatccgatggcctccgcgatctaccgtccattgcgatctccctttgtgggggtctctcggatcacagggaaatcacaaaggacgccttcttagagcaggcggtgtcctatcagcagttcgtcgacaatcctgcgatcattgacgatccgaaccttgtggtcaaaattggatccaagtactataactggaccacagcggctccactactgcttgctatgcaggcctttcaaaaaccactgcccaaggctaccgttgagtctattatgcgcgacaagatgcctaagaaaggcggcagatggtggttctcatggagaggtaggaacaccactattaaggaggaatccaaaccagagcaatgtctagccggcaaagctcattcaaccggggagcaacccccccagctttccttggccactagagtcaagcacgagtcctctagttccgacgaggagcgggcagctgcgaagcctagtaacgccggccacctgcccctgttgcccaacgtcagctacaagaagaccctccggctcacttctgaacaacttaaatctttgaagttaaaaaatgggcccaatgatgtagtattctcggttaccacacagtatcagggcacctgccgttgcgagggaacgatttacctgtggaactgggacgacaaagtgatcatcagtgatattgacggtacaatcacccggtccgatacactgggacacatcttgcctaccctgggaaaggattggacccatcagggcattgcaaagctgtaccataaagttagccaaaacggctacaagtttctctactgctctgcaagagctatcggcatggcggacatgacccggggctatctacactgggttaacgagagaggaaccgttctgcctcaaggtcccttgctgctcagccccagctctttattcagcgcattgcaccgcgaagtgattgaaaagaagcctgaaaagttcaaggtgcagtgcctgacagacattaagaacctgttctttccaaacactgagccattctacgccgcctttggtaaccggcccgcggatgtgtacagctacaagcaggtgggcgttagcctgaatcgtattttcactgtgaaccctaagggtgaactggtgcaagaacatgccaagaccaacattagctcatacgtgaggttatgcgaggtagtggatcacgtcttcccccttctgaagagatcccattcatctgattttccctgcagcgatacgttctccaattttacattctggagagaacctctgccaccctttgaaaaccaagatatacattccgcctccgcttag

SEQ ID NO: 299256 - DNA, 2799 bp, Artificial Sequence
  derived and/or modified sequence
atgtcacgggtccagaccatgaactatgtcggacaactagccggtcaggtcttcgtcacagttaaggaactgtataagggcctgaaccctgctaccctttcagggtgcatcgacatcatcgtgatccgtcagcctaacggcaacctccagtgttcaccttttcacgtccggtttgggaaaatgggagtattacgttcccgagaaaaggtggtcgacattgaaattaatggcgaatccgtggatctgcacatgaagttaggtgataatggagaagcattcttcgtgcaggagacagataatgatcaggaagtgattcccatgcacctggccacgtcacctattttgtctgagggtgctagccgaatggagtgtcaactgaagcggggatcagtggacagaatgagaggacttgaccctagtacccctgcacaggttatagcgccatccgagactccaagctctagctccgtggttaaaaagcggagaaagaggagacgtaagtcccagctggacagcctcaagcgcgacgataacatgaacacctccgaagacgaggatatgttccctattgaaatgagttcagatgaagcgatggagcttcttgagagtagcaggactctaccgaatgacatacccccattccaagacgacatccccgaggaaaatctgagcctcgctgtgatctacccacagtcagcttcttaccctaacagtgatcgagagtggtcacccacacccagcagcctcgtggattgtaaaagaacggccccacacctggcagttgctgccgaagggggactgtcctcttcgtgcccccctcagtccagtctgtttcatccatcagaatccccatcgggctcaaggccatccacccccaaatccgactccgagctggtgtctaagtccaccgagaggaccggccagaagaatcctgagatgctctggctctggggcgaactgcctcaagctgccaagtccagctctccccataaaatgaaagaatcatcccccttgagctctagaaagatctgcgataagtctcactttcaggccatacactccgaatcatccgatacattctcagaccagtcgcccaccttggtcgggggtgcccttcttgatcaaaataagccacagactgagatgcagttcgtgaacgaggaagatctggagacgcttggagctgctgccccattgctgccaatgattgaagagcttaaaccacctagtgcaagtgtggttcagaccgccaataagacagacagcccctcccggaaaagggacaagcggtcacgccaccttggtgctgacggcgtttatctagacgacctcaccgacatggacccagaagttgcagctctgtactttccaaaaaacggggatcccagcgggctcgccaaacatgccagtgataatggggctagaagcgctaatcaatctccacagtctgtgggtagctctggagtcgactccggggtggaaagcacaagcgacgggctgcgggatctccccagcatcgcaatttccctatgtggaggcctcagcgaccatcgcgagatcactaaagacgcgttcctggagcaagcagttagctaccagcagttcgtggacaatccagcaatcattgatgatccgaatttggtcgtaaagatcggttcaaagtactataactggaccactgcagcccctctcctactcgccatgcaggctttccagaagccactacctaaggcgaccgtcgagtccatcatgcgggacaagatgccaaaaaagggcggtagatggtggttctcctggcgtggcaggaacactacaattaaggaggagtctaaaccagagcagtgccttgcgggaaaggcccattcaactggcgaacaacctccccaactgtctcttgcaactcgggtgaaacatgaaagtagctcatctgacgaggagagagcagccgctaaaccgtctaacgcaggccacctccccttactgcctaatgtaagttataagaaaacattgcgactaacgagcgaacagttgaagtctttgaagcttaaaaatggacccaatgatgtcgtattctccgttaccacgcagtatcaggggacatgtcgctgtgaggggaccatttatctgtggaattgggatgataaagttattatctccgacatagacggcactataacaagatccgacacactagggcacatcctgccaacattaggcaaagattggacgcatcaggggatagcaaagctataccacaaggtgagtcagaacggctacaagttcctctactgttctgctcgcgctatcgggatggcagacatgacacgcggatatttacattgggtcaacgagcgcggaaccgtacttcctcagggcccactgcttctgtcaccttcttccttgtttagtgccctacacagagaagtaattgaaaaaaaacccgagaaatttaaggtgcaatgtctgactgacatcaaaaacctgttttttcccaatactgagcctttctatgctgccttcgggaatagacccgcagatgtttattcttataagcaggttggagttagcctgaacagaattttcacagtcaatcctaagggcgagttggtgcaagaacatgccaaaaccaatatatctagctacgtcaggttgtgcgaggttgtggatcatgtgttccctttgctgaaacgatcacacagcagcgactttccttgcagcgatacatttagcaacttcacattttggcgggagccgttaccaccctttgagaaccaggatatccattcagcgtcggcgtag

SEQ ID NO: 299257 - DNA, 2799 bp, Artificial Sequence
  derived and/or modified sequence
atgagcagagtgcagaccatgaactacgtgggccagctggccggccaggtgttcgtgaccgtgaaggagctgtacaagggcctgaaccccgccaccctgagcggctgcatcgacatcatcgtgatcagacagcccaacggcaacctgcagtgcagccccttccacgtgagattcggcaagatgggcgtgctgagaagcagagagaaggtggtggacatcgagatcaacggcgagagcgtggacctgcacatgaagctgggcgacaacggcgaggccttcttcgtgcaggagaccgacaacgaccaggaggtgatccccatgcacctggccaccagccccatcctgagcgagggcgccagcagaatggagtgccagctgaagagaggcagcgtggacagaatgagaggcctggaccccagcacccccgcccaggtgatcgcccccagcgagacccccagcagcagcagcgtggtgaagaagagaagaaagagaagaagaaagagccagctggacagcctgaagagagacgacaacatgaacaccagcgaggacgaggacatgttccccatcgagatgagcagcgacgaggccatggagctgctggagagcagcagaaccctgcccaacgacatcccccccttccaggacgacatccccgaggagaacctgagcctggccgtgatctacccccagagcgccagctaccccaacagcgacagagagtggagccccacccccagcagcctggtggactgcaagagaaccgccccccacctggccgtggccgccgagggcggcctgagcagcagctgccccccccagagcagcctgttccaccccagcgagagccccagcggcagcagacccagcacccccaagagcgacagcgagctggtgagcaagagcaccgagagaaccggccagaagaaccccgagatgctgtggctgtggggcgagctgccccaggccgccaagagcagcagcccccacaagatgaaggagagcagccccctgagcagcagaaagatctgcgacaagagccacttccaggccatccacagcgagagcagcgacaccttcagcgaccagagccccaccctggtgggcggcgccctgctggaccagaacaagccccagaccgagatgcagttcgtgaacgaggaggacctggagaccctgggcgccgccgcccccctgctgcccatgatcgaggagctgaagccccccagcgccagcgtggtgcagaccgccaacaagaccgacagccccagcagaaagagagacaagagaagcagacacctgggcgccgacggcgtgtacctggacgacctgaccgacatggaccccgaggtggccgccctgtacttccccaagaacggcgaccccagcggcctggccaagcacgccagcgacaacggcgccagaagcgccaaccagagcccccagagcgtgggcagcagcggcgtggacagcggcgtggagagcaccagcgacggcctgagagacctgcccagcatcgccatcagcctgtgcggcggcctgagcgaccacagagagatcaccaaggacgccttcctggagcaggccgtgagctaccagcagttcgtggacaaccccgccatcatcgacgaccccaacctggtggtgaagatcggcagcaagtactacaactggaccaccgccgcccccctgctgctggccatgcaggccttccagaagcccctgcccaaggccaccgtggagagcatcatgagagacaagatgcccaagaagggcggcagatggtggttcagctggagaggcagaaacaccaccatcaaggaggagagcaagcccgagcagtgcctggccggcaaggcccacagcaccggcgagcagcccccccagctgagcctggccaccagagtgaagcacgagagcagcagcagcgacgaggagagagccgccgccaagcccagcaacgccggccacctgcccctgctgcccaacgtgagctacaagaagaccctgagactgaccagcgagcagctgaagagcctgaagctgaagaacggccccaacgacgtggtgttcagcgtgaccacccagtaccagggcacctgcagatgcgagggcaccatctacctgtggaactgggacgacaaggtgatcatcagcgacatcgacggcaccatcaccagaagcgacaccctgggccacatcctgcccaccctgggcaaggactggacccaccagggcatcgccaagctgtaccacaaggtgagccagaacggctacaagttcctgtactgcagcgccagagccatcggcatggccgacatgaccagaggctacctgcactgggtgaacgagagaggcaccgtgctgccccagggccccctgctgctgagccccagcagcctgttcagcgccctgcacagagaggtgatcgagaagaagcccgagaagttcaaggtgcagtgcctgaccgacatcaagaacctgttcttccccaacaccgagcccttctacgccgccttcggcaacagacccgccgacgtgtacagctacaagcaggtgggcgtgagcctgaacagaatcttcaccgtgaaccccaagggcgagctggtgcaggagcacgccaagaccaacatcagcagctacgtgagactgtgcgaggtggtggaccacgtgttccccctgctgaagagaagccacagcagcgacttcccctgcagcgacaccttcagcaacttcaccttctggagagagcccctgccccccttcgagaaccaggacatccacagcgccagcgcctag

SEQ ID NO: 299258 - DNA, 477 bp, Artificial Sequence
  derived and/or modified sequence
gcaatacaaaggcggccacgcgcggcgccgctcgtatttgcaaccacgtggcttcacgagtccgccaaaccatcaggtgaataaacgggagaggagaagagagtctaggactcagccctggagtataagtcagagctggaaaagaagaggctccagagactggacggccactgagaggtgccacgtccctgaagggcctgaggagggttgatggcatgaccccatgaagcccagcaaggagtggagagaggagggctggaggactcccgcctgccatgacccagtccagggataagattggcacgatctcagctcactgcagcctccacctcctgggttcaagtgatcttcccacctcagcctcccaagtagctgggactacaggtgcagaccatgaattacgtggggcagttagccggccaggtgtttgtcaccgtgaaggagctctacaaggggctgaatcccgccacactctca

SEQ ID NO: 299259 - protein, 193 aa, Artificial Sequence
  derived and/or modified sequence
MGKQNSKLRPEVLQDLRENTEFTDHELQEWYKGFLKDCPTGHLTVDEFKKIYANFFPYGDASKFAEHVFRTFDTNGDGTIDFREFIIALSVTSRGKLEQKLKWAFSMYDLDGNGYISRSEMLEIVQAIYKMVSSVMKMPEDESTPEKRTDKIFRQMDTNNDGKLSLEEFIRGAKSDPSIVRLLQCDPSSASQF

SEQ ID NO: 299260 - protein, 30 aa, Artificial Sequence
  derived and/or modified sequence
MGKQNSKLRPEVLQDLRENTEFTDHELQEW

SEQ ID NO: 299261 - DNA, 1769 bp, Artificial Sequence
  derived and/or modified sequence
cggcggcggcgggcagcggacgggcggactgacgggcgcctccaccttgctccctccctggctgccggcttccttttgtctttctgggcggcgatgagcgcagggccggcgcagcagctgcgggcgcacggaggcccgcgctgctagtcactcctcccggcctcggcgcgcttgtcccgggcagcggcccgggcccgctgcagccgccgccggcgccgaacttgggctcgggaagccggcggaccgcgtcctgcgccggagcaggggcatggtctagtggcccagtcaggacgcggaaacactccctggaggttctgacccactccctctcagcctccgcctggtctctggtgtagtcgccgccgccagccgccatgggcaaacagaacagcaagctgcggcccgaggtgctgcaggacctgcgggagaacacggagttcaccgaccacgagctgcaggagtggtacaagggcttcctcaaggactgccccaccggccacctgaccgtggacgagttcaagaagatctacgccaacttcttcccctacggcgacgcttccaagttcgccgagcacgtcttccgcaccttcgacaccaacggcgacggcaccatcgacttccgggagttcatcattgcgctgagcgtgacctcgcggggcaagctggagcagaagctcaagtgggccttcagcatgtacgacctggacggcaacggctacatcagccgcagcgagatgctggagatcgtgcaggccatctacaagatggtgtcgtctgtgatgaagatgccggaggatgagtccaccccggagaagcgcacagacaagatcttcaggcagatggacaccaacaatgacggcaaactgtccttggaagaattcatcagaggtgccaagagcgacccctccatcgtccgcctgctgcagtgcgaccccagcagtgccagtcagttctgagcgagcggcccctggacagttgcagagaaacacaggcttgtcgtgccgtttaagctttgcttgcaagagtggatgccccgcaatcgttcctgctctcccgggccccgggcctggggcatgcgttgcacctgcccggcccggtggctgcgcctccctcctccacctgaccaacgcgacattcctcccctcacgcctggcccggtcccttccagggcaactcccagggatgtggtgacatgcagggttcaagtgttcttggttccaggcacctcccggctcacggggagctcagaggtccatgccgaggagaccaggcaggacctcccgaggctgcgccccggccggcccatgcgttttgtgatcccaagtgactctgtgggaagggtggggacgaggcgtcgggagggtatacagggagcccctcccgtgcatggctgcccccccgttcattttctccaccacagccgcttgcacgtatagatactgtggtcccctttcttttaatatataaattatgtatggtgaagtggagtgtattgtgtaggtcccgtatttaatgcctctgactgcctttgaagcgcagccctctgtggcccgcagccccctgagcctggctgttgtgtggtatttatgctctctttgtctgcctgtttctaaggaaatgcatgtgtgccctgagccgtgatgatcctcccatccgtgttgtgagcacaggcatttgtgtctggtctgtcctccctgttgattggtctggcatttccggtattaaaatgataaaataaatggcattttctgaaaaaaaaaaaaaaaaaa

SEQ ID NO: 299262 - DNA, 582 bp, Artificial Sequence
  derived and/or modified sequence
atgggtaaacagaattccaagctgcggccagaggtgttacaggacctgcgcgagaacaccgagtttactgaccacgagttgcaagagtggtacaaagggttccttaaggactgtccaacagggcacttgaccgttgacgaatttaaaaaaatttacgcaaattttttcccatatggcgacgcctccaagttcgccgagcatgtgttcagaacattcgacactaacggtgacggtacaatagacttccgggagttcatcatagcactctcagtgactagtcgagggaagctggagcagaagctgaagtgggctttctcgatgtacgacctggacggtaatggatacatttcaaggagcgagatgttagaaatcgtgcaagcaatctataagatggtgtcctctgtcatgaagatgcctgaggatgaatctactccggaaaagaggacagacaaaattttcaggcagatggacaccaacaacgacgggaaactgtcgctcgaggaattcataaggggcgccaagagcgaccccagcatagttcgactgctgcagtgtgacccgagtagtgccagtcagttctag

SEQ ID NO: 299263 - DNA, 582 bp, Artificial Sequence
  derived and/or modified sequence
atgggtaagcaaaatagtaagctgcgacccgaagtcctccaggacttgcgggagaacacagaattcacagatcacgaactccaggagtggtacaaaggtttcctcaaagactgccctactggccatcttacggttgatgaatttaagaaaatctatgcaaatttcttcccatacggcgatgccagtaagtttgccgaacacgtttttcggaccttcgacaccaacggagatgggaccatagatttccgcgagttcattattgcgctctccgtgacatcacggggtaaactggagcagaagcttaaatgggccttctctatgtacgatcttgatggtaacggttacatttcgcggtcagaaatgttagagatcgtgcaagctatctataagatggtaagctctgtgatgaaaatgcccgaagacgaaagcacgccagagaagagaaccgataagattttccgccagatggacaccaacaacgacggcaagttgagtctggaggagttcattagaggagctaagagtgatccttccattgtgagactccttcaatgtgacccatcatcagcaagccaattctag

SEQ ID NO: 299264 - DNA, 1751 bp, Artificial Sequence
  derived and/or modified sequence
cgggccgcggcggcggcgggcagcggacgggcggactgacgggcgcctccaccttgctccctccctggctgccggcttccttttgtctttctgggcggcgatgagcgcagggccggcgcagcagctgcgggcgcacggaggcccgcgctgctagtcactcctcccggcctcggcgcgcttgtcccgggcagcggcccgggcccgctgcagccgccgccggcgccgaacttgggctcgggaagccggcggaccgcgtcctgcgccggagcaggggcatggtctagtggcccagtcaggacgcggaaacactccctggaggttctgacccactccctctcagcctccgcctggtctctggtgtagtcgccgccgccagccgccatgggcaaacagaacagcaagctgcggcccgaggtgctgcaggacctgcgggagaacacggagttcaccgaccacgagctgcaggagtggtacaagggcttcctcaaggactgccccaccggccacctgaccgtggacgagttcaagaagatctacgccaacttcttcccctacggcgacgcttccaagttcgccgagcacgtcttccgcaccttcgacaccaacggcgacggcaccatcgacttccgggagttcatcattgcgctgagcgtgacctcgcggggcaagctggagcagaagctcaagtgggccttcagcatgtacgacctggacggcaacggctacatcagccgcagcgagatgctggagatcgtgcaggccatctacaagatggtgtcgtctgtgatgaagatgccggaggatgagtccaccccggagaagcgcacagacaagatcttcaggcagatggacaccaacaatgacggcaaactgtccttggaagaattcatcagaggtgccaagagcgacccctccatcgtccgcctgctgcagtgcgaccccagcagtgccagtcagttctgagcgagcggcccctggacagttgcagagaaacacaggcttgtcgtgccgtttaagctttgcttgcaagagtggatgccccgcaatcgttcctgctctcccgggccccgggcctggggcatgcgttgcacctgcccagcccggtggctgcgcctccctcctccacctgaccaacgcgacattcctcccctcacgcctggcccggtcccttccagggcaactcccagggatgtggtgacatgcagggttcaagtgttcttggttccaggcacctcccggctcacggggagctcagaggtccatgccgaggagaccaggcaggacctcccgaggctgcgccccggccggcccatgcgttttgtgatcccaagtgactctgtgggaagggtggggacgaggcgtcgggagggtatacagggagcccctcccgtgcatggctgcccccccgttcattttctccaccacagccgcttgcacgtatagatactgtggtcccctttcttttaatatataaattatgtatggtgaagtggagtgtattgtgtaggtcccgtatttaatgcctctgactgcctttgaagcgcagccctctgtggcccgcagccccctgagcctggctgttgtgtggtatttatgctctctttgtctgcctgtttctaaggaaatgcatgtgtgccctgagccgtgatgatcctcccatccgtgttgtgagcacaggcatttgtgtctggtctgtcctccctgttgattggtctggcatttccggtattaaaatgataaaataaatggca

SEQ ID NO: 299265 - DNA, 1904 bp, Artificial Sequence
  derived and/or modified sequence
agcttctgccaagggtgggggcccacgcggaggcgatccgctcgttcctcccagggccatggggcgacgaggagagccctggcctccccgcgacccgcactgcgacctgggccagacgcgccaccttccccggtcgcggtttgcttctctttaaaatgaggacagctcctcccttgggggctgtggtgacaggtgaaatgagaacgcactgaagacagctcttggtccaaagccccgcacacagggcatggtctagtggcccagtcaggacgcggaaacactccctggaggttctgacccactccctctcagcctccgcctggtctctgggttggctgttccagctccaaagagaaggaggaaccttttccttctgcagcccctccccaccagcctcattccttagctggggtcagacctggggtcctcactgcagctggcctctggcagcgttctcaggctagccctccctgctgaaaagagaaccgtgtgggactcacaggtgtagtcgccgccgccagccgccatgggcaaacagaacagcaagctgcggcccgaggtgctgcaggacctgcgggagaacacggagttcaccgaccacgagctgcaggagtggtacaagggcttcctcaaggactgccccaccggccacctgaccgtggacgagttcaagaagatctacgccaacttcttcccctacggcgacgcttccaagttcgccgagcacgtcttccgcaccttcgacaccaacggcgacggcaccatcgacttccgggagttcatcattgcgctgagcgtgacctcgcggggcaagctggagcagaagctcaagtgggccttcagcatgtacgacctggacggcaacggctacatcagccgcagcgagatgctggagatcgtgcaggccatctacaagatggtgtcgtctgtgatgaagatgccggaggatgagtccaccccggagaagcgcacagacaagatcttcaggcagatggacaccaacaatgacggcaaactgtccttggaagaattcatcagaggtgccaagagcgacccctccatcgtccgcctgctgcagtgcgaccccagcagtgccagtcagttctgagcgagcggcccctggacagttgcagagaaacacaggcttgtcgtgccgtttaagctttgcttgcaagagtggatgccccgcaatcgttcctgctctcccgggccccgggcctggggcatgcgttgcacctgcccagcccggtggctgcgcctccctcctccacctgaccaacgcgacattcctcccctcacgcctggcccggtcccttccagggcaactcccagggatgtggtgacatgcagggttcaagtgttcttggttccaggcacctcccggctcacggggagctcagaggtccatgccgaggagaccaggcaggacctcccgaggctgcgccccggccggcccatgcgttttgtgatcccaagtgactctgtgggaagggtggggacgaggcgtcgggagggtatacagggagcccctcccgtgcatggctgcccccccgttcattttctccaccacagccgcttgcacgtatagatactgtggtcccctttcttttaatatataaattatgtatggtgaagtggagtgtattgtgtaggtcccgtatttaatgcctctgactgcctttgaagcgcagccctctgtggcccgcagccccctgagcctggctgttgtgtggtatttatgctctctttgtctgcctgtttctaaggaaatgcatgtgtgccctgagccgtgatgatcctcccatccgtgttgtgagcacaggcatttgtgtctggtctgtcctccctgttgattggtctggcatttccggtattaaaatgataaaataaatggcattttctga

SEQ ID NO: 299266 - DNA, 582 bp, Artificial Sequence
  derived and/or modified sequence
atgggcaagcagaacagcaagctgcggcctgaggtgctgcaggacctgcgggagaacacagagttcacagaccacgagctgcaggagtggtacaagggcttcctgaaggactgccccaccggccacctgactgtggatgagttcaagaagatctatgccaacttcttcccctatggagatgccagcaagtttgctgagcacgtgttccgcacctttgacaccaatggagatggcaccatcgacttccgggagttcatcatcgccctgtctgtgaccagccggggcaagctggagcagaagctgaagtgggccttctccatgtatgacctggatggaaatggctacatcagccgctctgagatgctggagatcgtgcaggccatctacaagatggtgtcctctgtgatgaagatgccagaagatgagagcaccccagagaagaggacagacaagatcttccggcagatggacaccaacaatgatggcaagctgagcctggaggagttcatccggggggccaagagtgaccccagcatcgtgcggctgctgcagtgtgaccccagcagcgccagccagttctag

SEQ ID NO: 299267 - DNA, 582 bp, Artificial Sequence
  derived and/or modified sequence
atgggcaagcagaacagcaagctgcggcccgaggtgctgcaggacctccgggagaatacagagttcaccgatcacgaactccaggaatggtacaaaggtttcttaaaggactgtcccaccgggcatctgactgtggacgagtttaaaaaaatatacgcaaatttctttccatatggtgatgcgtctaaattcgccgagcacgtatttaggacttttgacaccaacggagatggaacaatcgactttcgtgagttcattatcgctctcagcgtcacctcccggggcaaattagagcagaagttaaagtgggctttttctatgtatgacttggacggaaatggttacatctctagatctgagatgctggagatcgtgcaagctatctacaagatggtaagtagtgtgatgaagatgcccgaggatgagagtactccagaaaagcgtactgacaagatattccggcagatggataccaataatgacggaaagctctcactcgaagaattcatcagaggcgcgaaatccgaccctagcattgttcgtttgctacaatgcgatccatcctctgcctcacaattttag

SEQ ID NO: 299268 - DNA, 582 bp, Artificial Sequence
  derived and/or modified sequence
atgggcaagcagaacagcaagctgcggcccgaggtgctgcaggacctccgtgaaaacactgaatttactgatcacgaactgcaggagtggtacaaagggtttcttaaagactgtccaacagggcacctgactgtggacgagtttaaaaagatctacgctaactttttcccttacggcgacgcaagcaagttcgccgagcatgtgttcagaacttttgatactaatggagacggtaccattgacttcagggaatttatcatagcactgagcgtgacttctaggggtaagctagaacagaaattgaaatgggctttctccatgtatgacctggacggcaacggatatatttcgcgttcagagatgcttgagattgttcaggctatttataaaatggtctcctccgtgatgaagatgcccgaagatgagtccacgcctgagaagaggaccgacaagatttttagacagatggatactaataatgacggtaagttatccctggaagagttcataagaggggccaaaagcgatccatccatcgtaaggctgctccagtgcgatccttcatctgccagccagttttag

SEQ ID NO: 299269 - DNA, 582 bp, Artificial Sequence
  derived and/or modified sequence
atggggaagcaaaactccaagctgaggccagaggtcttgcaggacctgcgggaaaacactgagttcactgaccatgaactgcaggagtggtacaagggctttctgaaagactgccctaccggccacctcaccgtcgatgagttcaagaagatctacgcaaatttttttccctatggggatgcctctaagttcgcagagcatgtatttaggactttcgatacaaacggagacggcacgattgactttagggaatttattattgcactcagcgtcacttcacggggaaaattagagcaaaaattgaagtgggccttctctatgtatgatctggatggtaatggttatatctcaaggtcagaaatgctggaaatcgtgcaggcaatttacaagatggtatcaagcgtgatgaagatgcccgaagacgaatcaactcctgagaaacgcactgacaaaatcttccgacaaatggatacaaataacgacggcaagctgtcactcgaagagtttatcagaggggctaaaagcgacccatccattgtccgactgctgcaatgcgatccatctagtgcatctcaattctag

SEQ ID NO: 299270 - DNA, 582 bp, Artificial Sequence
  derived and/or modified sequence
atgggcaaacaaaactccaaactgcgccctgaagtcctacaagaccttcgggaaaacactgagttcaccgatcatgagcttcaggagtggtacaaggggttcctcaaggactgcccgaccggtcacttgactgtggacgaattcaaaaagatttatgctaatttcttcccctacggtgatgcgtctaagttcgctgagcatgttttccgaactttcgataccaatggcgacgggactatcgacttccgcgagtttattattgccctatctgtcacttcacggggaaagcttgaacagaagctgaaatgggcattcagtatgtatgatctcgatggtaatggctacatctctcgcagtgagatgctggagattgtgcaggctatctacaaaatggtttcatccgtcatgaagatgcctgaggacgaaagcaccccagagaaaaggacagataagatcttccggcagatggataccaacaacgacggaaagctgtcattggaggaatttattaggggcgctaaaagcgatcccagcattgtgcgactgctccaatgcgatcctagcagcgctagtcaattctag

SEQ ID NO: 299271 - DNA, 582 bp, Artificial Sequence
  derived and/or modified sequence
atgggcaagcagaacagcaagctgagacccgaggtgctgcaggacctgagagagaacaccgagttcaccgaccacgagctgcaggagtggtacaagggcttcctgaaggactgccccaccggccacctgaccgtggacgagttcaagaagatctacgccaacttcttcccctacggcgacgccagcaagttcgccgagcacgtgttcagaaccttcgacaccaacggcgacggcaccatcgacttcagagagttcatcatcgccctgagcgtgaccagcagaggcaagctggagcagaagctgaagtgggccttcagcatgtacgacctggacggcaacggctacatcagcagaagcgagatgctggagatcgtgcaggccatctacaagatggtgagcagcgtgatgaagatgcccgaggacgagagcacccccgagaagagaaccgacaagatcttcagacagatggacaccaacaacgacggcaagctgagcctggaggagttcatcagaggcgccaagagcgaccccagcatcgtgagactgctgcagtgcgaccccagcagcgccagccagttctag

SEQ ID NO: 299272 - DNA, 93 bp, Artificial Sequence
  derived and/or modified sequence
atgggtaagcagaactccaagctacgcccagaagtgctccaagacctgcgtgagaacacagaatttacagaccatgagctgcaggaatggtag

SEQ ID NO: 299273 - DNA, 586 bp, Artificial Sequence
  derived and/or modified sequence
cttcccggagctggcaggcgggccgcggcggcggcgggcagcggacgggcggactgacgggcgcctccaccttgctccctccctggctgccggcttccttttgtctttctgggcggcgatgagcgcagggccggcgcagcagctgcgggcgcacggaggcccgcgctgctagtcactcctcccggcctcggcgcgcttgtcccgggcagcggcccgggcccgctgcagccgccgccggcgccgaacttgggctcgggaagccggcggaccgcgtcctgcgccggagcaggggcatggtctagtggcccagtcaggacgcggaaacactccctggaggttctgacccactccctctcagcctccgcctggtctctgctggagaactcctggaacctttaagccctggctcagccctcagctctgtcccatcccagctgacctctgtgctctgcgcccgagctcctgagcccacgtgtagtcgccgccgccagccgccatgggcaaacagaacagcaagctgcggcccgaggtgctgcaggacctgcgggagaacacggagttcaccgaccacgagctgcaggagtgg

SEQ ID NO: 299274 - DNA, 93 bp, Artificial Sequence
  derived and/or modified sequence
atgggcaagcagaacagcaagctgcggcctgaggtgctgcaggacctgcgggagaacacagagttcacagaccacgagctgcaggagtggtag

SEQ ID NO: 299275 - DNA, 93 bp, Artificial Sequence
  derived and/or modified sequence
atgggcaagcagaacagcaagctgcggcccgaggtgctgcaggacctcagggagaataccgaattcacggatcacgaactgcaggagtggtag

SEQ ID NO: 299276 - DNA, 93 bp, Artificial Sequence
  derived and/or modified sequence
atgggcaagcaaaactctaagcttaggccagaagtgttacaagatctcagagaaaacactgagttcaccgatcatgagcttcaggagtggtag

SEQ ID NO: 299277 - DNA, 93 bp, Artificial Sequence
  derived and/or modified sequence
atgggcaagcagaacagcaagctgagacccgaggtgctgcaggacctgagagagaacaccgagttcaccgaccacgagctgcaggagtggtag

SEQ ID NO: 299278 - protein, 2251 aa, Artificial Sequence
  derived and/or modified sequence
MAAPESGPALSPGTAEGEEETILYDLLVNTEWPPETEVQPRGNQKHGASFIITKAIRDRLLFLRQYIWYSPAPFLLPDGLVRLVNKQINWHLVLASNGKLLAAVQDQCVEIRSAKDDFTSIIGKCQVPKDPKPQWRRVAWSYDCTLLAYAESTGTVRVFDLMGSELFVISPASSFIGDLSYAIAGLIFLEYKASAQWSAELLVINYRGELRSYLVSVGTNQSYQESHCFSFSSHYPHGINTAIYHPGHRLLLVGGCETAEVGMSKASSCGLSAWRVLSGSPYYKQVTNGGDGVTAVPKTLGLLRMLSVKFYSRQGQEQDGIFKMSLSPDGMLLAAIHFSGKLSIWAIPSLKQQGEWGQNEQPGYDDLNPDWRLSTEKRKKIKDKESFYPLIDVNWWADSAVTLARCSGALTVSSVKTLKNLLGKSCEWFEPSPQVTATHDGGFLSLECEIKLAPKRSRLETRAGEEDEGEEDSDSDYEISAKARYFGYIKQGLYLVTEMERFAPPRKRPRTITKNYRLVSLRSTTPEELYQRKIESEEYEEALSLAHTYGLDTDLVYQRQWRKSAVNVASIQNYLSKIKKRSWVLHECLERVPENVDAAKELLQYGLKGTDLEALLAIGKGADDGRFTLPGEIDIDSISYEELSPPDEEPAKNKKEKELKKRQELLKLVNFSKLTLEQKELCRCRRKLLTYLDRLATYEEILGVPHASEQRYDAEFFKKFRNQNIVLSARTYAQESNVQALEILFTYHGSDLLPHRLAILSNFPETTSPHEYSVLLPEACFNGDSLMIIPWHEHKHRAKDWCEELACRMVVEPNLQDESEFLYAAQPELLRFRMTQLTVEKVMDWYQTRAEEIEHYARQLQQKIIPDQDQLMAIALECIYTCERNDQLCLCYDLLECLPERGYGDKTEATTKLHDMVDQLEQILSVSELLEKHGLEKPISFVKNTQSSSEEARKLMVRLTRHTGRKQPPVSESHWRTLLQDMLTMQQNVYTCLDSDACYEIFTESLLCSSRLENIHLAGQMMHCSACSENPPAGIAHKGKPHYRVSYEKSIDLVLAASREYFNSSTNLTDSCMDLARCCLQLITDRPPAIQEELDLIQAVGCLEEFGVKILPLQVRLCPDRISLIKECISQSPTCYKQSTKLLGLAELLRVAGENPEERRGQVLILLVEQALRFHDYKAASMHCQELMATGYPKSWDVCSQLGQSEGYQDLATRQELMAFALTHCPPSSIELLLAASSSLQTEILYQRVNFQIHHEGGENISASPLTSKAVQEDEVGVPGSNSADLLRWTTATTMKVLSNTTTTTKAVLQAVSDGQWWKKSLTYLRPLQGQKCGGAYQIGTTANEDLEKQGCHPFYESVISNPFVAESEGTYDTYQHVPVESFAEVLLRTGKLAEAKNKGEVFPTTEVLLQLASEALPNDMTLALAYLLALPQVLDANRCFEKQSPSALSLQLAAYYYSLQIYARLAPCFRDKCHPLYRADPKELIKMVTRHVTRHEHEAWPEDLISLTKQLHCYNERLLDFTQAQILQGLRKGVDVQRFTADDQYKRETILGLAETLEESVYSIAISLAQRYSVSRWEVFMTHLEFLFTDSGLSTLEIENRAQDLHLFETLKTDPEAFHQHMVKYIYPTIGGFDHERLQYYFTLLENCGCADLGNCAIKPETHIRLLKKFKVVASGLNYKKLTDENMSPLEALEPVLSSQNILSISKLVPKIPEKDGQMLSPSSLYTIWLQKLFWTGDPHLIKQVPGSSPEWLHAYDVCMKYFDRLHPGDLITVVDAVTFSPKAVTKLSVEARKEMTRKAIKTVKHFIEKPRKRNSEDEAQEAKDSKVTYADTLNHLEKSLAHLETLSHSFILSLKNSEQETLQKYSHLYDLSRSEKEKLHDEAVAICLDGQPLAMIQQLLEVAVGPLDISPKDIVQSAIMKIISALSGGSADLGGPRDPLKVLEGVVAAVHASVDKGEELVSPEDLLEWLRPFCADDAWPVRPRIHVLQILGQSFHLTEEDSKLLVFFRTEAILKASWPQRQVDIADIENEENRYCLFMELLESSHHEAEFQHLVLLLQAWPPMKSEYVITNNPWVRLATVMLTRCTMENKEGLGNEVLKMCRSLYNTKQMLPAEGVKELCLLLLNQSLLLPSLKLLLESRDEHLHEMALEQITAVTTVNDSNCDQELLSLLLDAKLLVKCVSTPFYPRIVDHLLASLQQGRWDAEELGRHLREAGHEAEAGSLLLAVRGTHQAFRTFSTALRAAQHWV

SEQ ID NO: 299279 - DNA, 6756 bp, Artificial Sequence
  derived and/or modified sequence
atggccgcccctgagtctggcccagccttgtctcccggaacggccgaaggcgaggaagaaactattctttacgatctactggtcaacactgagtggccgcccgagacagaagtgcagcctcgagggaatcaaaaacacggggcatcttttatcataactaaggcaatcagggaccgcctcctgttcttgaggcagtatatttggtatagcccagctcccttccttctccctgatggactcgtgagactcgtgaataaacaaataaactggcatctggtactagcatccaacggaaaacttctggcagctgtgcaggatcagtgtgtcgaaattaggagcgcaaaagacgactttacttctataattggaaaatgtcaggtccccaaagatcctaaaccccaatggaggcgcgtggcatggtcttatgactgcactctcctcgcatacgccgagagcacaggaacagtgcgtgtattcgatctgatgggaagcgagctgttcgtcattagtccagcctctagtttcatcggcgacctcagctacgccatcgctggcttgatctttttggagtacaaggcaagtgctcaatggagcgccgagcttcttgtaatcaactataggggtgaactgcgcagctacctggtctcagtgggcacaaaccagtcataccaggagagtcactgtttttcattctccagtcactatccccatggaattaacaccgcaatttaccacccgggccaccgactgctgctcgtcggcgggtgcgaaaccgccgaagtgggcatgtcgaaagcctccagctgcgggctgagcgcctggcgtgtgcttagcggctccccctactacaagcaggtcaccaatggaggtgacggggtgaccgcagtccccaaaaccttggggctgctacgcatgctctccgtcaaattttacagcagacaggggcaagagcaagatggcatcttcaagatgtccctatctcctgacggcatgctgttggctgcaattcacttttcaggcaagctgtccatttgggccattccatctcttaaacagcagggtgaatggggccagaatgaacagcccggatacgatgatctcaatcctgattggaggttatctactgaaaagcggaaaaagattaaagataaggagtctttctatcctttgatagatgtaaactggtgggctgacagcgcagtgactctggcaagatgcagtggggcactcaccgtttctagcgttaaaactctcaaaaacttgctcggcaagagctgtgaatggtttgaacctagccctcaggtgacagctactcacgacgggggattcctcagcctggaatgcgaaatcaaactcgccccgaaacgcagtaggctggagacccgtgccggtgaagaggatgagggagaagaagattctgattcagactacgagattagcgccaaagcgcgatactttggctatattaaacaagggctttatctcgtcacagagatggagcgctttgcccctccccgaaagagaccgcgcaccatcaccaagaattaccggctagtcagcctgaggagcacaacgcctgaagaattgtaccagagaaaaattgaaagcgaagaatacgaggaagcccttagtttggcacacacatatggcctggatacggatctggtataccaaaggcaatggcgtaagagtgcggtgaatgtggcctctatccagaactatctgtccaaaatcaagaagcgcagttgggtgctgcatgagtgcctggagcgcgtcccagagaacgtcgacgccgcaaaggaactgctgcaatacgggctgaaaggcaccgatctggaggcgttacttgcaataggcaaaggagcagacgatggtagattcacactgcctggcgagatcgatatcgattcaatctcatatgaggaactgtccccccccgacgaggaacccgccaaaaacaagaaagaaaaagagctgaagaagcgtcaagagctgctaaaactggtgaatttttcaaaactaacactggagcaaaaagagttatgtcgttgcagaagaaaactgctaacgtatctggatagactggccacatatgaagagatcctcggcgtgccccacgcatccgaacaacgatacgatgctgaatttttcaagaagttccgaaaccagaacatcgtcttgtcagcgagaacctatgcacaggaaagtaacgtacaggccctggagatcctgtttacctaccatggctcagacctactcccacaccgcttggctatcttgagcaacttccccgagactacctctccccacgagtattcggtcttgcttccagaagcctgcttcaatggcgatagcctgatgataataccatggcacgaacacaagcacagagccaaggattggtgtgaagagttagcctgccgaatggtggtggagcctaacctgcaagacgaatcggagtttctgtatgccgctcaaccggagctgctccgattccgtatgacgcagctcacggtggaaaaagtgatggactggtaccagaccagggcggaggagatagagcattacgcacggcaactacaacagaagattattcctgatcaggaccaactgatggcaatcgcccttgagtgcatctacacgtgcgagcgcaacgatcagctgtgtctatgctatgatcttctcgaatgtctccccgagcgcgggtatggagataagacagaagccactacaaaactgcatgacatggtggatcaattggagcagattctatccgtctctgagctcctggagaagcacggacttgagaaaccaatttccttcgtcaaaaacacgcagtcctcaagcgaggaggccagaaagctgatggttaggcttacaagacacacagggcggaaacagcccccagtcagcgaaagtcactggcgtactctgttgcaggatatgcttaccatgcagcagaacgtgtatacctgcctcgattcagacgcctgttatgaaatttttaccgagagtcttctgtgtagtagccggctggagaatatccacctggccggccagatgatgcattgctctgcatgcagcgagaatccaccggctgggatagcccacaaaggtaagcctcactatcgcgtctcatatgagaaatccatcgacctagtgctggccgcgtcccgcgaatacttcaattcctcaacaaacctcaccgactcctgtatggacctcgccagatgctgcctgcagttaattaccgatcgtcccccagccattcaggaggagctggacctcatccaggcagtcggatgcctagaggaatttggagtcaagatcctgcctctgcaagtacggctctgcccggatcgcatttctctgatcaaagaatgtatctcccagagccctacttgttataaacagtctacaaaactgctgggcctggccgagttactgcgagtggccggagagaatcctgaggaaagacgcggccaggtcctcatcctgctcgttgaacaggccctaagattccatgactacaaagctgcatccatgcactgccaggagctgatggccacaggctaccctaaaagttgggatgtatgctcacagttgggacagtcggagggctatcaggatctcgcgacgagacaggagctgatggccttcgccttgacgcattgccctccctcatctattgaactcctgctcgccgcctcctcctcactacagactgaaattctctatcagcgagttaactttcagattcatcatgaggggggagaaaacatctctgcctccccacttacaagcaaggctgtgcaggaggatgaggttggggtccccggcagcaactccgctgatctgttgcgatggacaactgccacgactatgaaggtgttgagtaataccactacaactaccaaggctgttttgcaggcagtgtccgatggacagtggtggaagaagagtctgacttatcttagacctttgcagggccagaagtgcggtggcgcgtaccaaatcggaaccacagctaacgaagacctcgaaaaacagggatgtcaccccttctatgaatctgtgatatctaaccccttcgttgccgagagtgaaggtacctatgatacttaccaacatgtgccagtagaatctttcgcagaggtcttgctgagaactggcaagctagctgaggctaaaaacaaaggtgaagtgttcccaactacagaggttcttctgcagctggccagtgaagccctgccaaatgatatgaccctcgccctcgcttacctccttgcactgccacaagtgttggatgcaaaccgatgtttcgagaaacagtcgccgtcagctctatctctacaactggctgcctattactactcactgcagatctacgcccggttagcaccctgtttcagagacaagtgccatcccctgtacagggcagatccgaaagagttaattaaaatggtaacacgccacgtgacgaggcatgagcacgaagcctggccggaagatctgatatctttgactaagcaattgcactgctataatgagcggcttttagatttcacgcaggcacaaatactgcaagggctgcgtaagggcgtcgacgtacagagattcaccgcggatgatcagtacaaaagagaaacaatcttaggactggcagagacactagaggagtccgtttattcaatcgcgatctcactcgcgcagaggtactccgtttcccgatgggaggtattcatgacccacctcgaatttctgttcactgacagtggactgtcgaccctggaaattgagaacagggctcaagatctgcacctatttgagactcttaaaactgaccccgaggcttttcatcagcacatggtaaaatacatctatcccacaatcggtggtttcgatcacgaaagacttcagtattacttcaccctccttgagaattgtggatgtgcggacttgggaaactgtgccataaaaccggaaacccatatcaggctactgaagaagtttaaggtggtggcatccgggttgaattataagaagctgaccgatgaaaatatgtccccgttggaagccttggagccagtcctcagtagccagaacatcctctccatctctaagttggtcccaaagatccctgaaaaagacggccagatgttgtcgcctagctctctttataccatctggcttcagaaattattctggaccggggatccccacctgatcaaacaggttcctggctctagtccagagtggctgcacgcttacgatgtgtgcatgaaatacttcgacagactgcatccaggcgatctgatcaccgtcgttgatgcggtgaccttttcacctaaggccgtcaccaaactgagcgttgaggctcggaaagaaatgacacgtaaggcgattaagacagtgaaacattttattgaaaagccacgaaagcgtaactcagaagatgaagctcaggaggccaaggattccaaagttacatacgcggatacactgaatcatctggagaaatccctcgcacacttggaaaccctgtcccattcgtttattctgtccctgaagaatagtgagcaggagactctgcagaaatattctcatctttacgatttatctagatccgaaaaagaaaaattgcatgatgaggcagtggcgatctgcctggacggccagcctcttgcaatgattcagcagttactggaggtggctgtcggtccattagacattagtcccaaagacatcgtccagtctgcaatcatgaaaattatttcagctctgtccggaggttcagcggatctgggtggtccccgcgacccacttaaagtgttggagggggtcgttgctgctgttcacgcatccgtggataagggggaggagttggtgtcacccgaagacctactagaatggctccgacccttctgtgccgatgacgcttggccagttcgcccccggatacacgtgcttcagattctcgggcaatccttccacctgactgaagaggatagcaaactcctcgtgttcttcagaaccgaggccatcttgaaagctagctggccccaacgacaggttgacattgctgacatcgagaatgaagagaaccgatattgcctttttatggaacttctggagtcttctcatcacgaggcagaattccagcacttggtgctccttctacaggcttggcccccgatgaagagcgaatacgtcataaccaacaacccatgggtacgcctggctacagtcatgctgacaaggtgcacgatggagaacaaagagggccttggcaacgaagtgttgaagatgtgtcggagtctctacaacaccaagcagatgctgcccgctgaaggggttaaagagctgtgtctcctgctgctgaaccagagcttacttctgcccagtctgaagctgttgctagaatccagagatgaacatctgcacgagatggcccttgagcaaattaccgctgtgactaccgtgaacgacagtaactgtgatcaggagctcctgagtctgctccttgacgctaagctgctggtaaagtgtgtttccacccctttctaccctcggattgtcgatcatttactcgctagcttgcagcaaggtaggtgggacgcggaggaactggggcgtcatctcagagaagcaggccacgaagccgaagctggatctctgctgctggccgtgcgcggaacccatcaggccttcaggaccttctccaccgctttgcgcgctgcccaacactgggtctag

SEQ ID NO: 299280 - DNA, 6756 bp, Artificial Sequence
  derived and/or modified sequence
atggccgcccctgagagcggccctgccctgagccctggaacagctgagggggaggaggagaccatcctgtatgacctgctggtgaacacagagtggcccccagagacagaggtgcagccccggggcaaccagaagcacggggccagcttcatcatcaccaaggccatccgggaccggctgctcttcctgcggcagtacatctggtacagccctgcccccttcctgctgcctgatggcctggtgcggctggtgaacaagcagatcaactggcacctggtgctggccagcaatggcaagctgctggccgctgtgcaggaccagtgtgtggagatccgcagcgccaaggatgacttcaccagcatcatcggcaagtgccaggtgcccaaggaccccaagccccagtggaggagagtggcctggagctatgactgcaccctgctggcctatgcagagagcactggaacagtgcgggtgtttgacctgatgggcagcgagctgtttgtgatcagccctgccagcagcttcatcggggacctgtcctatgccatcgccggcctcatcttcctggagtacaaggccagcgcccagtggagcgctgagctgctggtgatcaactacagaggagagctgcggagctacctggtgtctgtgggcaccaaccagagctaccaggagagccactgcttctccttcagcagccactacccccacggcatcaacacagccatctaccaccctggccaccggctgctgctggtgggcggctgtgaaacagctgaggtgggcatgagcaaggccagcagctgtggcctgagcgcctggagggtgctgagcggcagcccctactacaagcaggtgaccaatggaggagatggagtgacagctgtgcccaagaccctgggcctgctgaggatgctgtctgtgaagttctacagccggcagggccaggagcaggacggcatcttcaagatgagcctgagcccagatggcatgctgctggccgccatccacttcagcggcaagctgagcatctgggccatccccagcctgaagcagcagggcgagtggggccagaatgagcagcccggctatgatgacctgaacccagactggaggctgagcacagagaagaggaagaagatcaaggacaaggagagcttctaccccctgattgatgtgaactggtgggccgacagcgctgtgaccctggcccgctgcagcggggccctgactgtgtcctctgtgaagaccctgaagaacctgctgggcaagagctgtgagtggtttgagcccagcccccaggtgacagccacccatgatggcggcttcctgagcctggagtgtgagatcaagctggcccccaagaggagccggctggagaccagggctggggaggaggatgaaggagaagaagattctgacagcgactatgagatcagcgccaaggcccgctacttcggctacatcaagcagggcctgtacctggtgacagagatggagagatttgccccacccaggaagaggcccaggaccatcaccaagaactaccgcctggtgtccctgcggagcaccaccccagaggagctgtaccagaggaagattgagagcgaggagtatgaggaggccctgagcctggcccacacctacggcctggacacagacctggtgtaccagaggcagtggaggaagtctgctgtgaatgtggccagcatccagaactacctgagcaagatcaagaagaggtcctgggtgctgcatgaatgtctggagcgggtgcctgaaaatgtggatgctgccaaggagctgctgcagtatggcctgaagggcacagacctggaggccctgctggccatcggcaaaggagcagatgatggccgcttcaccctgcccggggagattgatattgacagcatctcctatgaggagctgagccccccagatgaggagcccgccaagaacaagaaggagaaggagctgaagaagaggcaggagctgctgaagctggtgaacttcagcaagctgaccctggagcagaaggagctgtgccgctgcaggaggaagctgctgacctacctggaccggctggccacctatgaggagatcctgggcgtgccccacgccagcgagcagagatatgatgctgagttcttcaagaagttcaggaaccagaacatcgtgctgagcgcccggacctacgcccaggagagcaatgtgcaggccctggagatcctcttcacctaccacggcagtgacctgctgccccaccggctggccatcctgagcaacttccctgagaccaccagcccccatgagtacagcgtgctgctgcctgaggcctgcttcaacggggacagcctgatgatcatcccctggcatgagcacaagcaccgggccaaggactggtgtgaggagctggcctgcaggatggtggtggagcccaacctgcaggatgaaagtgagttcctgtatgctgcccagcctgagctgctgcgcttcaggatgacccagctgactgtggagaaggtgatggactggtaccagaccagggctgaggagattgagcactacgcccggcagctgcagcagaagatcatcccagaccaggaccagctgatggccatcgccctggagtgcatctacacctgtgaaagaaatgaccagctgtgcctgtgctatgacctgctggagtgcctgcctgagcggggctatggagacaagacagaggccaccaccaagctgcatgacatggtggaccagctggagcagatcctgtctgtgtctgagctgctggagaagcacggcctggagaagcccatcagctttgtgaagaacacccagagcagcagcgaggaggccaggaagctgatggtgcggctgaccaggcacactggaaggaagcagccccctgtgtctgagagccactggaggaccctgctgcaggacatgctgaccatgcagcagaatgtgtacacctgcctggacagtgatgcctgctatgagatcttcacagagagcctgctgtgcagcagccggctggagaacatccacctggccggccagatgatgcactgcagcgcctgcagtgaaaatcctcctgctggcatcgcccacaagggcaagccccactacagagtgtcctatgagaagagcattgacctggtgctggccgccagccgggagtacttcaacagcagcaccaacctgacagacagctgcatggacctggcccgctgctgcctgcagctgatcacagaccggcccccagccatccaggaggagctggacctgatccaggccgtgggctgcctggaggagtttggagtgaagatcctgcccctgcaggtgcggctgtgcccagaccgcatcagcctcatcaaggagtgcatcagccagagccccacctgctacaagcagagcaccaagctgctgggcctggccgagctgctgcgggtggccggggagaaccctgaggagcggcggggccaggtgctgatcctgctggtggagcaggccctgcgcttccatgactacaaggccgcctccatgcactgccaggagctgatggccaccggctaccccaagtcctgggatgtgtgcagccagctgggccagagcgagggctaccaggacctggccacccggcaggagctgatggcctttgccctgacccactgcccccccagcagcattgagctgctgctggccgccagcagcagcctgcagacagagatcctgtaccagagggtgaacttccagatccaccatgaaggaggagagaacatcagcgccagccccctgaccagcaaggctgtgcaggaggatgaggtgggcgtgcccggcagcaacagcgctgacctgctgcgctggaccacagccaccaccatgaaggtgctgagcaacaccaccaccaccaccaaggctgtgctgcaggccgtgtctgatggccagtggtggaagaagagcctgacctacctgcggcccctgcagggccagaagtgtggcggggcctaccagatcggcaccacagccaatgaagacctggagaagcagggctgccaccccttctatgagagcgtcatcagcaacccctttgtggccgagagcgagggcacctatgacacctaccagcacgtgcctgtggagagctttgctgaggtgctgctgaggacaggcaagctggccgaggccaagaacaagggggaggtgttccccaccacagaggtgctgctgcagctggccagcgaggccctgcccaatgacatgaccctggccctggcctacctgctggccctgccccaggtgctggatgccaaccgctgctttgagaagcagagccccagcgccctgagcctgcagctggccgcctactactacagcctgcagatctatgcccggctggccccctgcttccgggacaagtgccaccccctgtacagagctgaccccaaggagctgatcaagatggtgaccaggcatgtgaccaggcatgagcacgaggcctggccagaagatctcatcagcctgaccaagcagctgcactgctacaatgaaaggctgctggacttcacccaggcccagatcctgcagggcctgaggaaaggagtggatgtgcagcgcttcaccgcagatgaccagtacaagcgggagaccatcctgggcctggccgagaccctggaggagagcgtgtacagcatcgccatcagcctggcccagcgctacagcgtgagccgctgggaggtgttcatgacccacctggagttcctgttcacagacagcggcctgagcaccctggagattgagaacagagcccaggacctgcacctgtttgagaccctgaagacagatcctgaggccttccaccagcacatggtgaagtacatctaccccaccatcggcggctttgaccacgagcggctgcagtactacttcaccctgctggagaactgtggctgtgccgacctgggcaactgtgccatcaagccagagacccacatccggctgctgaagaagttcaaggtggtggccagcggcctgaactacaagaagctgacagatgagaacatgagccccctggaggccctggagcctgtgctgagcagccagaacatcctgagcatcagcaagctggtgcccaagatccctgagaaggatggccagatgctgagccccagcagcctgtacaccatctggctgcagaagctgttctggacaggagacccccacctgatcaagcaggtgcccggcagcagccctgagtggctgcacgcctatgatgtgtgcatgaagtactttgaccggctgcaccctggggacctgatcaccgtggtggatgctgtgaccttcagccccaaggctgtgaccaagctgtctgtggaggccaggaaggagatgaccaggaaggccatcaagacagtgaagcacttcatcgagaagcccaggaagagaaattctgaagatgaggcccaggaggccaaggacagcaaggtgacctacgccgacaccctgaaccacctggagaagagcctggcccacctggagaccctgagccacagcttcatcctgagcctgaagaacagcgagcaggagaccctgcagaagtacagccacctgtatgacctgagccgctctgagaaggagaagctgcatgatgaagctgtggccatctgcctggatggccagcccctggccatgatccagcagctgctggaggtggccgtgggccccctggacatcagccccaaggacatcgtgcagagcgccatcatgaagatcatcagcgccctgagcggcggcagcgctgacctgggcggcccccgggaccccctgaaggtgctggagggcgtggtggccgctgtgcacgcctctgtggacaagggggaggagctggtgtccccagaggacctgctggagtggctgcggcccttctgtgctgatgatgcctggcctgtgcggccccgcatccacgtgctgcagatcctgggccagagcttccacctgacagaggaggacagcaagctgctggtgttcttcagaacagaggccatcctgaaggcctcctggccccagaggcaggtggacattgctgacattgaaaatgaggagaaccgctactgcctcttcatggagctgctggagagcagccaccatgaagctgagttccagcacctggtgctgctgctgcaggcctggccacccatgaagtcagaatatgtgatcaccaacaacccctgggtgcggctggccaccgtgatgctgacccgctgcaccatggagaacaaggagggcctgggcaatgaggtgctgaagatgtgccgcagcctgtacaacaccaagcagatgctgcctgctgagggcgtgaaggagctgtgcctgctgctgctgaaccagagcctgctgctgcccagcctgaagctgctgctggagagcagagatgagcacctgcacgagatggccctggagcagatcacagctgtgaccaccgtgaatgacagcaactgtgaccaggagctgctgagcctgctgctggatgccaagctgctggtgaagtgtgtgtccacccccttctacccccgcatcgtggaccacctgctggccagcctgcagcagggccgctgggatgctgaggagctgggccgccacctgcgggaggccggccatgaagctgaggccggcagcctgctgctggccgtgcggggcacccaccaggccttccgcaccttcagcacagccctgcgggccgcccagcactgggtgtag

SEQ ID NO: 299281 - DNA, 6756 bp, Artificial Sequence
  derived and/or modified sequence
atggccgcccccgagagcggccccgccctgagccccggcaccgccgagggtgaggaagagactatcctgtacgacctccttgtgaatacagagtggccccccgagaccgaggtgcagcctagaggaaaccagaagcatggcgcatcttttatcattacaaaagctatcagggataggttgctgtttctgcggcaatacatctggtactctcccgcaccttttcttttacccgatgggttagtaagattagtaaacaagcaaattaactggcacttagtgctggccagcaatgggaagctactggccgctgtgcaggaccagtgtgtggaaatcaggagtgcaaaggacgatttcactagcattattggaaagtgccaggtcccgaaggaccctaagcctcagtggcgaagagtggcttggagctacgactgcacgctgttagcgtacgcagaatcgacgggcaccgtgcgagtgtttgacttaatgggaagcgaattgtttgtgatcagtccggcctcttcttttattggcgatctcagctacgccatagccggcctgatttttctggaatacaaagctagcgctcagtggagcgcagagctgctggtaataaactatcgtggcgagctcagatcctatctggtttcagtggggaccaaccagtcctaccaagaatcgcactgcttcagcttttcttcccactaccctcacggaattaacacggccatctatcacccaggccataggcttctgctagtggggggctgtgagaccgctgaggttgggatgtccaaggcttcctcttgtgggctgtcagcttggcgcgttctctccggatctccctattataagcaggtcaccaacggcggagacggcgtaaccgcggtgccaaagacactgggattgctgagaatgctctcagtgaaattctattcacgccaggggcaggagcaggatggcatatttaagatgtccttgtctcccgatgggatgcttcttgctgcgatacacttctctggcaagctgagtatttgggcaatcccatccctgaagcagcaaggagaatggggacagaacgagcagcccggctatgatgacctcaaccctgattggaggcttagcacagagaaaaggaaaaagattaaagacaaggagtccttctacccgctgattgatgtgaattggtgggcggactccgccgtgaccctggctcgctgttccggagctctgactgtgagttctgtcaagacacttaagaaccttctcgggaagtcctgcgaatggttcgaaccaagcccacaggtcaccgccactcacgacggaggatttctcagccttgagtgcgaaatcaaactcgctccaaagcgatccagactggaaacacgcgccggtgaggaggatgaaggtgaggaggactcagattccgactatgaaatttccgccaaagccagatacttcggatatatcaaacagggactatacctggtgaccgaaatggagcggttcgctccaccacgcaaaagaccaaggacgattactaagaattaccgcctagttagcttgcgaagcacaacacctgaggagctttatcagaggaaaatagagtccgaagaatacgaagaggcactctcactagctcacacctacggactggatacagaccttgtttatcagaggcagtggaggaaatccgccgtgaacgtggcctccatccaaaattacctctcaaaaatcaaaaagaggagctgggttttgcacgagtgtctggaacgggttcctgagaacgtcgatgctgctaaggagctcctacagtatggcctaaaaggcaccgatttggaggcgctgctggccattggcaagggggccgatgatggacgcttcaccctgccaggggagatcgatatcgatagtataagttacgaagaattgagtcctcctgatgaggaaccggcaaagaataaaaaggaaaaagaacttaagaaacgacaggagctgctcaaactcgtgaatttctctaagttgacactggaacagaaggagctttgccgatgtagaaggaagctgctcacttacctggatcgccttgcaacatacgaggaaatcttgggcgttccccacgcatccgaacagcgctatgatgctgaattcttcaagaaattcaggaaccagaacatcgtgttgagcgcccgaacgtatgcccaggagtctaacgttcaggccctcgagatcctgtttacctatcatgggtcagatttgcttccccaccggttagccatccttagcaacttcccagagacaacctcccctcacgagtactctgttctgctgcctgaggcatgttttaacggggactcactgatgatcattccttggcacgaacacaaacaccgtgccaaggactggtgcgaagaactggcatgccgaatggtagtggagcccaatttgcaggatgagtctgagtttctgtatgctgctcagcccgaactgctccgctttcgtatgacacagctaacagttgagaaggtcatggactggtaccagaccagagccgaggagatcgagcattacgcccggcagctccagcagaagataattccagaccaggatcagctcatggctatcgcactggagtgcatttacacttgtgagaggaacgaccagctttgcctgtgctatgatctccttgagtgcctgcctgagcgtgggtatggcgacaagacagaggccacaacaaaactccacgatatggtcgatcagcttgagcagatcctgtctgtgagcgaactcctggagaagcacgggttggagaagcccatttctttcgtgaaaaacactcagtcctctagtgaggaggctcgcaaactcatggtacggctcacccggcacactggccggaagcagcctcccgtaagtgaatcacactggcggaccctccttcaggacatgttgaccatgcaacagaacgtttacacgtgtctcgactcagacgcatgttacgagatctttacagagagcctcctgtgtagcagcagacttgagaacatccatttagccggtcagatgatgcattgttcagcctgtagtgaaaatccaccagcaggtattgcccacaagggtaaaccacattaccgagtgtcatatgaaaagagtatcgatcttgtcctcgccgcatctcgggaatatttcaactcctctaccaatctgaccgatagctgtatggatctggcacggtgctgtttgcaactgatcacagatcgaccacccgctatccaggaagaacttgatctgattcaggccgtagggtgtcttgaggagttcggcgtgaagattttaccgctgcaagttaggctgtgcccagaccggatttctctgatcaaggaatgcattagccagagccccacctgctacaaacagagtactaagttattggggctcgccgagctcttgcgagtcgcgggtgagaatccagaagagcgacggggccaggtgttgatcttactggtggaacaggccctgcggtttcacgactataaggccgcttcaatgcactgtcaggagttaatggccacaggataccctaaaagctgggacgtgtgttctcagctgggccagagcgagggataccaggacctggccactcggcaggagctcatggccttcgccctcacgcattgtccaccttcctctattgaactgttactggccgcctcaagctccctgcagacagagatattgtatcagcgcgtgaactttcagatccatcatgaggggggcgaaaacatctcagcctcgccgttgaccagcaaagcggttcaagaagacgaggtgggtgtaccaggatcaaattccgcggatttgcttaggtggaccactgccaccacaatgaaggtgctaagcaacacgaccaccaccaccaaagccgtgctgcaggccgtgagcgacggtcagtggtggaaaaaatctctcacatatcttcgtcctctccagggccagaagtgtggcggagcctaccagattgggaccaccgctaatgaggatctcgaaaaacagggatgccatccattctacgaatctgtaattagcaacccattcgtcgcagaatcagagggtacatacgacacctatcagcacgttccggtggagtcatttgccgaggtactcctccgcacggggaagttggctgaggcaaagaacaagggggaggtgtttccaacgacagaggtgctgctccagctggcttcagaagcgctgccaaatgatatgaccttggccctcgcttatctgcttgctctacctcaggtcttggacgcgaacagatgtttcgagaagcaaagcccatcagccctgtccttgcaactggctgcctattattattccctgcagatttatgctcggttggcaccttgcttcagagacaaatgtcatccactttacagagccgacccaaaggagttgatcaagatggtgacgcgccacgtgacacgacatgagcatgaggcttggcccgaagatttgatatcactgaccaagcaattgcactgttataacgagcgcctgttggattttacacaggcacagattctgcaggggctgcggaagggtgtcgacgtccagcgcttcacggcagatgatcagtataagcgcgaaacgatcctcgggctcgctgaaaccctggaggaatccgtttactcaatcgccatttcattggcgcaacgttattcagtctcgagatgggaggtcttcatgacacacctggagttcctctttacagattcagggttaagcaccttggaaatagagaatcgggctcaagatcttcatttgttcgaaacgcttaaaactgacccggaggctttccaccagcacatggtgaaatatatataccccacaattggcggattcgaccacgagaggctccaatattattttaccctgctcgagaactgtggctgtgcagatctgggcaactgcgctattaaacccgagacacacattcgactccttaaaaagtttaaagttgttgccagtgggctgaactataagaagcttaccgatgagaacatgtcacccctggaagccctcgagcccgtgctgagctcccaaaatattctttccatttcaaagttagtacctaagatccccgaaaaggatggccaaatgcttagcccttccagcctgtatacgatctggctccagaaattgttttggacgggtgaccctcatttaatcaagcaggtaccaggaagttcacccgagtggctccacgcatacgatgtctgtatgaaatattttgacagattgcatcccggagacctaatcaccgtcgtcgacgccgttactttcagtcccaaagcagttaccaagctctctgtagaggcacggaaggaaatgacaagaaaggccataaagaccgtaaaacatttcatagagaagcctcgcaagaggaatagcgaagatgaggcgcaggaggccaaagacagtaaggtgacatacgccgacactttgaaccatcttgagaaatccttggcccaccttgagaccctgtcccactcattcattctctctctaaagaactctgagcaggaaacccttcagaagtattcacatctgtacgatctgtctcgctcggagaaagagaagctgcacgacgaggcggttgccatctgtctggacggtcagccattagccatgatccaacagttgttggaggtggccgttgggcctctggacatcagtcctaaagatattgtgcagagcgctatcatgaagataatttcagctctgagcggcggatctgctgatctgggcggaccacgagaccccctgaaggttcttgaaggagtggtcgcagccgtgcatgccagcgtggacaaaggagaggagcttgtgtccccagaggatctgctcgagtggctgcgccccttctgcgctgacgacgcatggcctgtccggccgcgtatccacgttcttcagattctggggcagagcttccatttgactgaagaagatagcaaactactggtgtttttcagaaccgaggccatcctgaaagccagttggcctcagcggcaggtcgacattgcagacattgagaatgaagagaatagatattgtctgttcatggagctgctggagtcatcccatcatgaagctgagttccagcatctagtgctgctgctccaggcgtggccacccatgaaaagcgaatacgtgatcacaaacaatccctgggtgagattggctacagtaatgctaactcggtgtacaatggagaataaggagggactgggcaacgaggtcttgaagatgtgtaggagcctgtataacacaaagcaaatgctgcccgcagagggcgttaaagaactctgcctgctgctgttgaatcagtctctcttgttacctagtctgaagctcctgctcgagtctcgggacgagcacctccatgagatggctctcgagcagatcacagcagtgacgacagtgaatgactccaattgcgatcaagaattactgtccttgctgcttgacgctaaactcctggtaaaatgtgttagcacaccgttttacccaaggatcgtggaccacctgctagcctcgctgcagcagggtcggtgggatgcagaagaactgggcaggcatctccgggaggccgggcacgaggctgaggcgggaagccttttgctggccgtgaggggtactcatcaggcgtttaggacatttagtaccgccctgagggcagctcagcactgggtttag

SEQ ID NO: 299282 - DNA, 6922 bp, Artificial Sequence
  derived and/or modified sequence
ctccgctgcctgagtcctcggcgaacatggcggcccccgagtcagggccggctttgagtccaggcactgcagagggtgaggaggagacgattctctatgacttgttggtcaacaccgagtggccaccggagactgaagtacagcctagaggcaaccaaaaacatggtgcatcctttatcatcacgaaagcaattcgagatcgtttattatttttacgccaatacatctggtacagcccggcaccttttttgctccctgatggactggttcgcttggttaataaacagataaactggcatttggtacttgcaagcaatggaaagcttttggctgctgttcaagatcagtgtgtggaaatcaggtctgcaaaagatgattttacatccattattgggaaatgtcaagttccgaaagacccgaaaccccagtggagacgggtagcatggagttacgattgtaccctactggcctatgccgaaagcacaggaactgtgagggtgtttgatctcatgggaagtgaactctttgtcatttccccggcatctagttttataggtgacttaagctatgccattgctgggttgatatttttagaatataaagcaagtgcacagtggtctgcagaactcctggtcatcaattaccgaggagaacttagaagttaccttgtaagtgttggaacaaatcagagctaccaagaaagtcactgtttcagcttcagtagtcattatcctcatggaatcaacacagctatttaccaccctggtcacagacttttacttgttggtggatgtgaaactgctgaagtaggcatgtcaaaagcttctagctgtggcctttctgcctggagagttctttcaggatcaccgtattataagcaggttactaatggtggagacggggttactgcagtaccgaagacactgggattattaaggatgttaagtgtcaagttttacagtcgccagggacaagaacaggatggaatttttaagatgagcctttctccagatgggatgctcctggcagccattcacttctcagggaaactgagcatctgggcgattccatctctgaagcaacaaggggaatggggtcaaaatgagcagccaggctatgatgaccttaatcctgattggaggctctctactgagaagagaaaaaaaatcaaagataaagagtccttttacccactgatagatgtcaattggtgggcagacagtgcagtgactttagctcgatgctctggtgctttaactgtttcatctgtgaaaactttgaagaatttactgggaaaatcctgtgaatggtttgaaccatcacctcaagtcactgctacccatgatgggggatttttaagtttggagtgtgagattaaacttgcccccaaacgatctcgtttggagactagagctggagaagaagatgaaggagaagaggattctgattctgattatgaaatatctgccaaggctcgctactttggttatataaaacagggcctttacttggtgactgaaatggagcgatttgcaccaccacggaaacgcccacgaaccattactaaaaactaccgccttgtgagtttgcgctccacgacaccagaggaactttatcagaggaagattgaaagtgaagagtatgaggaagccttgtccttggctcatacctacggcctggatactgaccttgtatatcagaggcagtggaggaagtcagcggtcaacgttgcttcaattcagaattatttgagtaaaataaagaagcgatcctgggttctccatgagtgtttggaaagagttcctgaaaatgtggatgctgcaaaagaactgcttcagtatggattaaaaggcacagacctggaggctcttttagcaatagggaaaggagcagatgatggcagatttacattacctggtgaaatagacattgacagtatctcctatgaagagctttcaccacctgatgaagagcctgccaagaataaaaaggaaaaggagctcaagaagagacaagaactactgaaattagtgaacttttccaagttgacactggaacaaaaggaactttgccgttgtagacggaagttattaacctacttagatcgacttgcaacatatgaggaaatcctaggagtgcctcatgcatctgaacagagatatgatgctgaattctttaagaaattcagaaatcagaatattgttctctcagcaagaacttatgctcaggaaagtaatgtacaagccctggaaattctgtttacttaccatggttccgacctgcttcctcatcgccttgcaattctgtccaactttccagagaccacttctccacatgaatattctgttttgctgcccgaagcttgttttaacggtgactccctgatgatcattccttggcatgaacataaacaccgagctaaagattggtgcgaggagttggcttgcagaatggttgttgagccgaatctccaagatgaaagtgaattcttgtatgctgcacagcctgagttactaaggttcaggatgacccagcttacggtggagaaggttatggactggtatcagaccagagcagaggaaatagagcattatgctcggcagctgcagcaaaaaattattcctgatcaggaccaactgatggcaatagcactagagtgcatctatacctgtgaacgaaatgatcaactctgtctttgctatgacctactagaatgtctgccagaaagaggatatggtgataagacagaggcaaccacaaagcttcatgacatggtagaccaactggaacaaattctcagtgtgtcagagcttttggaaaaacatggactcgagaaaccaatttcatttgttaaaaacactcaatctagctcagaagaggcacgcaagctgatggttagattgacgaggcacactggccggaagcagcctcctgtcagtgagtctcattggagaacgttgctgcaagacatgttaactatgcagcagaatgtatacacatgtctagattctgatgcctgctatgagatatttacagaaagccttctgtgctctagtcgccttgaaaacatccacctggctggacagatgatgcactgcagtgcttgttcagaaaatcctccagctggtatagcccataaagggaaaccccactacagggtcagctacgaaaagagtattgacttggttttggctgccagcagagagtacttcaattcttctaccaacctcactgatagctgcatggatctagccaggtgctgcttacaactgataacagacagaccccctgccattcaagaggagctagatcttatccaagccgttggatgtcttgaagaatttggggtaaagatcctgcctttgcaagtgcgattgtgccctgatcggatcagtctcatcaaggagtgtatttcccagtcccccacatgctataaacaatccaccaagcttctgggccttgctgagctgctgagggttgcaggtgagaacccagaagaaaggcggggacaggttctaatccttttagtggagcaggcacttcgcttccatgactacaaagcagccagtatgcattgtcaggagctgatggccacaggttatcctaaaagttgggatgtttgtagccagttaggacaatcagaaggttaccaggacttggccactcgtcaagagctcatggcttttgctttgacacattgccctcctagcagcattgaacttcttttggcagctagcagctctctgcagacagaaattctttatcaaagagtgaatttccagatccatcatgaaggaggggaaaatatcagtgcttcaccattaactagtaaagcagtacaagaggatgaagtaggtgttccaggtagcaattcagctgacctattgcgctggaccactgctaccaccatgaaagtcctttccaacaccacaaccaccaccaaagcggtgctgcaggccgtcagtgatgggcagtggtggaagaagtctttaacttaccttcgaccccttcaggggcaaaaatgtggtggtgcatatcaaatcggaactacagccaatgaagatctagagaaacaagggtgtcatcctttttatgaatctgtcatctcaaatccttttgtcgctgagtctgaagggacctatgacacctatcagcatgttccagtggaaagctttgcagaagtattgctgagaactggaaaattggcagaggctaaaaataaaggagaagtatttccaacaactgaagttctcttgcaactagcaagtgaagccttgccaaatgacatgaccttggctcttgcttaccttcttgccttaccacaagtgttagatgctaaccggtgctttgaaaagcagtccccctctgcattatctctccagctggcagcgtattactatagcctccagatctatgcccgattggccccatgtttcagggacaagtgccatcctctttacagggctgatcccaaagaactaatcaagatggtcaccaggcatgtgactcgacatgagcacgaagcctggcctgaagaccttatttcactgaccaagcagttacactgctacaatgaacgtctcctggatttcactcaggcgcagatccttcagggccttcggaagggtgtggacgtgcagcggtttactgcagatgaccagtataaaagggaaactatccttggtctggcagaaactctagaggaaagcgtctacagcattgctatttctctggcacaacgttacagtgtctcccgctgggaagtttttatgacccatttggagttcctcttcacggacagtggtttgtccacactagaaattgaaaatagagcccaagaccttcatctctttgagactttgaagactgatccagaagcctttcaccagcacatggtcaagtatatttaccctactattggtggctttgatcacgaaaggctgcagtattatttcactcttctggaaaactgtggctgtgcagatttggggaactgtgccattaaaccagaaacccacattcgactgctgaagaagtttaaggttgttgcatcaggtcttaattacaaaaagctgacagatgaaaacatgagtcctcttgaagcattggagccagttctttcaagtcaaaatatcttgtctatttccaaacttgttcccaaaatccctgaaaaggatggacagatgctttccccaagctctctgtacaccatctggttacagaagttgttctggactggagaccctcatctcattaaacaagtcccaggctcttcaccggagtggcttcatgcctatgatgtctgcatgaagtactttgatcgtctccacccaggtgacctcatcactgtggtagatgcagttacattttctccaaaagctgtgaccaagctgtctgtggaagcccgtaaagagatgactagaaaggctattaagacagtcaaacattttattgagaagccaaggaaaagaaactcagaagacgaagctcaagaagctaaggattctaaagttacctatgcagatactttgaatcatctggagaaatcacttgcccacctggaaaccctgagccacagcttcatcctttctctgaagaatagtgagcaggaaacactgcaaaaatacagtcacctctatgatctgtcccgatcagaaaaagagaaacttcatgatgaagctgtggctatttgtttagatggtcagcctctagcaatgattcagcagctgctagaggtggcagttggccctcttgacatctcacccaaggatatagtgcagagtgcaatcatgaaaataatttctgcattgagtggtggcagtgctgaccttggtgggccaagggacccactgaaggtcctggaaggtgttgttgcagcagtccacgccagtgtggacaagggtgaggagctggtttcacctgaggacctgctggagtggctgcggcctttctgtgctgatgacgcctggccggtgcggccccgcattcacgtgctgcagattttggggcaatcatttcacctgactgaggaggacagcaagctcctcgtgttctttagaactgaagccattctcaaagcctcctggccccagagacaggtagacatagctgacattgagaatgaagagaaccgctactgtctattcatggaactcctggaatctagtcaccacgaggctgaatttcagcacttggttttacttttgcaagcttggccacctatgaaaagtgaatatgtcataaccaataatccatgggtgagactagctacagtgatgctaaccagatgtacgatggagaacaaggaaggattggggaatgaagttttgaaaatgtgtcgctctttgtataacaccaagcagatgctgcctgcagagggtgtgaaggagctgtgtctgctgctgcttaaccagtccctcctgcttccatctctgaaacttctcctcgagagccgagatgagcatctgcacgagatggcactggagcaaatcacggcagtcactacggtgaatgattccaattgtgaccaagaacttctttccctgctcctggatgccaagctgctggtgaagtgtgtctccactcccttctatccacgtattgttgaccacctcttggctagcctccagcaagggcgctgggatgcagaggagctgggcagacacctgcgggaggccggccatgaagccgaagccgggtctctccttctggccgtgagggggactcaccaggccttcagaaccttcagtacagccctccgcgcagcacagcactgggtgtgagggccacctgtggccctgctccttagcagaaaaagcatctggagttgaatgctgttcccagaagcaacatgtgtatctgccgattgttctccatggttccaacaaattgcaaataaaactgtatggaaacgatgagcaag

SEQ ID NO: 299283 - DNA, 6755 bp, Artificial Sequence
  derived and/or modified sequence
atggctgcacccgagagtggcccagccttgtccccagggacggccgaaggcgaagaagagaccatcctgtatgatctgctcgtaaacaccgaatggcccccagagaccgaagtccagcccagggggaaccaaaagcacggagcgtccttcattatcaccaaagcaatccgggataggctgttatttctcagacagtatatctggtactctccagcgccattcctgcttcccgatgggttggtgcgccttgttaataaacagatcaactggcatttggtgctcgcctccaacggaaaattgttggctgccgttcaagaccaatgcgtggaaattagaagcgccaaggacgactttacctcaattataggcaaatgtcaggtacccaaggaccccaaaccacagtggagaagggttgcttggagctatgattgcacgctgttggcttacgctgaaagcactgggaccgttcgtgtttttgatctaatgggctccgaattgttcgtcatctctcccgctagcagcttcattggagacttgagttacgccatcgcaggcctcatctttctcgaatacaaagccagcgctcagtggtccgcagaactgctcgtgataaactatcgtggcgagttgagatcttacctagtgagtgtcggtaccaatcagagttatcaggagagtcactgtttttccttcagttcccactatccgcatggcatcaatacagccatttaccatcccggacatcgccttctcctggtcggtggctgcgaaaccgcagaagtgggcatgagcaaagcttcatcctgtggtctatccgcatggcgggtgctctcaggttccccctactataagcaggtgaccaatgggggtgacggggtcactgctgtgccaaaaacactgggcctactcaggatgctgtcggtaaagttttactcccgccagggacaagaacaggatggaatctttaagatgtccctgtctccagacggcatgctgcttgcggctatacattttagcggaaaactgtcaatctgggctattccctctctgaagcagcagggggagtggggtcagaatgaacagccgggatacgatgacctcaacccagactggaggttatccactgaaaaaaggaaaaaaataaaggataaggagtccttctatccgctaattgatgttaactggtgggcggattccgctgtgaccctggctagatgttccggagctctgacagtctcaagcgtgaaaaccctgaaaaatctgctgggcaagtcttgtgaatggttcgaaccctccccccaggtgaccgccactcatgacgggggtttcctgtccctcgaatgtgagattaaattggctcccaagcgatcacggctggagactagggctggggaagaggacgagggtgaggaagatagcgactctgactatgagatatccgccaaggcacgctacttcggatatattaaacaggggttgtacttagtaactgagatggaaaggttcgctccaccgaggaaacgcccacggaccattacgaaaaactacagattggtgtccttgcggtccacgacacccgaagaactgtatcagaggaagattgagagcgaagagtatgaagaggcattgagtctcgctcacacctacggcctcgatacagacctggtataccaacggcaatggcgtaagtctgccgtcaatgtcgcgagcattcagaactacctttcaaagatcaaaaagcgtagttgggttttgcacgagtgcctggaacgcgtgccagagaacgttgacgcggcaaaggaactgctacagtacggcctaaaggggaccgacttggaggccctgttagccattggaaagggcgcagacgatggacggttcacactccccggtgaaatagacattgatagtatctcttatgaagagctctcaccgcctgatgaagagcctgccaagaataaaaaagagaaagagttaaaaaaaaggcaggagctattgaagctcgtgaacttctcaaagctgacattggaacaaaaagagttgtgccgctgtcgacggaaactgctcacttacctggaccgactggcgacctacgaggagattctgggagtcccacacgccagcgagcagcggtatgacgccgagttcttcaaaaagtttaggaaccagaacatcgtcctgtctgcaagaacttatgcccaggagtcaaacgtgcaggccctcgagattctgttcacataccacggatccgacctactgccccacagacttgccatccttagtaatttcccagaaactactagtcctcatgagtatagtgtcctgctgcccgaggcctgcttcaacggcgacagcttgatgattatcccttggcatgaacacaaacacagggcaaaggattggtgtgaggagctggcttgtagaatggtagtagaacccaatttacaggacgaatctgagttcctgtacgctgcccagcctgagctgctacggttccgaatgacgcagctgaccgtcgagaaggtaatggattggtatcagacacgagcagaagaaattgaacattacgctagacagctgcagcagaaaatcattccagaccaggatcagcttatggccatcgccctagagtgtatatacacgtgcgagagaaacgatcagctgtgcttgtgctatgatctgctcgaatgtctgccagaaagagggtacggcgacaaaaccgaggctaccaccaagctccacgatatggtggatcagctggaacagatactgtctgtcagcgaactgctagagaaacacggcctcgagaagccaatttccttcgtcaagaacacacaaagttcatccgaagaagcgcgaaagctaatggtccgcctgactagacacactggaaggaagcagccaccagtttccgaatctcattggaggacactgttgcaggatatgctgactatgcagcagaacgtctatacttgccttgatagtgatgcgtgttatgagatattcacggagtcactgctctgttcatcccggttggagaatattcatcttgccggacagatgatgcattgttccgcctgttcagagaatcctccagcaggcatcgcgcacaaggggaaacctcattatagggtgtcctacgaaaagtccatcgacctagttttagctgcatcccgggaatatttcaactcctccactaatttgacggattcttgcatggacctggcacgttgctgcctgcagttgatcacggatcgaccccctgctatccaggaggaattggatctgattcaagctgtagggtgtctggaagaatttggagttaagattctgcccttacaagttcgcttatgtccagatagaatctctctcattaaagagtgcatcagccagagtcccacctgctacaagcagtccaccaagcttttgggactcgcggaattgctgcgggtggccggtgagaatcccgaggagcgacggggtcaagtgctgatattactggttgagcaggctcttcggtttcacgattataaggccgcttcgatgcattgtcaggagcttatggccaccggttaccctaaatcgtgggacgtttgctctcaactgggccaatccgagggttaccaggatctcgccactcgtcaggagctcatggccttcgctctcacccattgtccaccaagcagcattgaattgctcctggctgcatctagcagcctccagactgaaatcctctaccagagggtcaactttcagatacaccacgaaggcggtgagaatatatctgcaagtccccttacttccaaagcagtgcaggaagatgaggtgggagtacccggttcaaacagcgccgacctccttagatggaccacagctacgactatgaaggtgctgagcaataccactacaacgacaaaggccgtcctgcaggcagtttcggatggacaatggtggaagaagtcgctgacatacctcagaccactgcagggccaaaagtgtggcggtgcctaccagatcggaactaccgccaatgaagaccttgagaaacagggatgccacccattttacgagtctgtcatcagcaatcctttcgttgccgagagcgaggggacatatgatacttatcaacacgtgccagttgaatctttcgccgaggttttgcttcggactgggaaactggctgaggcaaaaaataagggcgaagtgtttcccactacagaggtgctcctacaattggcgtccgaggctcttcccaacgacatgaccctggcactagcttacctcctggctctcccacaagtccttgacgctaatcgatgcttcgagaagcagtccccctcagccctgagcctgcagctggccgcttattactacagtctacagatttacgctcgcttagctccctgtttccgtgacaagtgccacccactctatcgggcagatcctaaagagctgattaagatggttaccaggcatgtgacccgtcacgaacatgaggcttggcctgaggatctcatctcattgactaaacagctgcactgctataatgaaaggctgcttgacttcactcaggcgcagatactgcagggactgagaaagggggtggacgtccaaagattcacagcagacgatcagtacaaacgagagactatcctcggcttggccgagaccctggaggaaagcgtatactccattgccattagcctcgcgcaaagatattcagtgtccagatgggaggtattcatgacgcacctagagtttttgtttaccgattcaggcctctctactttagagatagagaaccgggctcaggatctgcatctgtttgaaacactcaagaccgaccccgaagcatttcatcaacacatggtgaagtatatttacccaaccataggaggcttcgatcacgaaagacttcagtattacttcacactcctggagaattgcggctgtgccgacctgggaaactgtgccatcaagcctgaaacccacatcaggttgctgaaaaagttcaaagttgtggcctccggactgaattacaagaaacttacagatgaaaatatgtcacctctggaagcattggagccagtgctgtcttcacagaacatactctcaattagcaaactcgtacctaaaatccctgagaaggacggacagatgctgtcaccatccagcctgtatacaatctggctgcaaaaactgttctggacaggcgacccccaccttatcaagcaagtcccaggctcctccccagaatggcttcacgcttacgacgtgtgtatgaagtacttcgatcgattacatcccggagacctgatcacagtagttgatgccgtgacatttagtcccaaggctgtgacaaaattgagtgtggaagccaggaaggaaatgaccaggaaggcaatcaagacggttaagcacttcatcgaaaaaccaagaaaacggaattctgaggacgaggcccaagaggccaaggacagtaaggtgacatatgctgatactctgaaccacttggagaaatctttggctcatctggagaccttaagccacagttttattctgagtctgaagaattctgaacaggaaaccctgcaaaagtattcccatctgtacgacctgagccgcagcgagaaggagaaactgcatgacgaggctgtggccatttgtctggatggccagcccctcgcgatgatccagcaactactggaggtggctgtgggtcctctggacattagcccaaaagacatcgtccaatcagccatcatgaagattatatcggctttgtctgggggtagtgccgacctgggagggcctcgggatccactgaaagttcttgagggcgtggtggccgcagtgcatgcctcagtggataagggggaggagctggtcagccccgaagatctcctggaatggctccggccattttgtgccgacgatgcatggcctgttcggcctagaattcacgtgttgcagattcttggccagtcattccacctaaccgaggaggactccaaactgctggtgtttttcagaacagaagcgatactcaaagctagttggccacagaggcaggtggacattgctgacatcgaaaatgaagaaaatagatattgcctgttcatggaactgctcgagtcttctcatcatgaggccgaatttcagcacctggtactcctgcttcaagcctggccccctatgaaatcagagtacgtgatcactaataacccatgggtacggctagccactgtgatgttgacccgctgcactatggaaaataaggaaggacttgggaacgaagtgttgaagatgtgtagaagtctctataacactaaacagatgttgcccgctgaaggggtaaaggagttgtgtctgcttctgctcaatcagagcctgttgcttccctccctcaaattgctcttggagagccgtgacgaacacttgcatgaaatggccttggaacagattactgcagtgacgaccgtcaatgactcaaattgcgaccaggaactcctctccttactcctagacgcaaagttactggtgaaatgcgtgtctactcctttctaccctaggatcgtcgaccatctgttggcatctcttcagcaaggaagatgggatgccgaagagttgggccgacatctccgcgaagccggtcatgaggcagaggctggctccctgttgctggccgtccgcggaacccatcaggcctttcgtactttttccaccgctctccgtgcagcccagcactgggttta

SEQ ID NO: 299284 - DNA, 6756 bp, Artificial Sequence
  derived and/or modified sequence
atggccgcccccgagagcggccccgccctgagccccggcaccgccgagggcgaggaggagaccatcctgtacgacctgctggtgaacaccgagtggccccccgagaccgaggtgcagcccagaggcaaccagaagcacggcgccagcttcatcatcaccaaggccatcagagacagactgctgttcctgagacagtacatctggtacagccccgcccccttcctgctgcccgacggcctggtgagactggtgaacaagcagatcaactggcacctggtgctggccagcaacggcaagctgctggccgccgtgcaggaccagtgcgtggagatcagaagcgccaaggacgacttcaccagcatcatcggcaagtgccaggtgcccaaggaccccaagccccagtggagaagagtggcctggagctacgactgcaccctgctggcctacgccgagagcaccggcaccgtgagagtgttcgacctgatgggcagcgagctgttcgtgatcagccccgccagcagcttcatcggcgacctgagctacgccatcgccggcctgatcttcctggagtacaaggccagcgcccagtggagcgccgagctgctggtgatcaactacagaggcgagctgagaagctacctggtgagcgtgggcaccaaccagagctaccaggagagccactgcttcagcttcagcagccactacccccacggcatcaacaccgccatctaccaccccggccacagactgctgctggtgggcggctgcgagaccgccgaggtgggcatgagcaaggccagcagctgcggcctgagcgcctggagagtgctgagcggcagcccctactacaagcaggtgaccaacggcggcgacggcgtgaccgccgtgcccaagaccctgggcctgctgagaatgctgagcgtgaagttctacagcagacagggccaggagcaggacggcatcttcaagatgagcctgagccccgacggcatgctgctggccgccatccacttcagcggcaagctgagcatctgggccatccccagcctgaagcagcagggcgagtggggccagaacgagcagcccggctacgacgacctgaaccccgactggagactgagcaccgagaagagaaagaagatcaaggacaaggagagcttctaccccctgatcgacgtgaactggtgggccgacagcgccgtgaccctggccagatgcagcggcgccctgaccgtgagcagcgtgaagaccctgaagaacctgctgggcaagagctgcgagtggttcgagcccagcccccaggtgaccgccacccacgacggcggcttcctgagcctggagtgcgagatcaagctggcccccaagagaagcagactggagaccagagccggcgaggaggacgagggcgaggaggacagcgacagcgactacgagatcagcgccaaggccagatacttcggctacatcaagcagggcctgtacctggtgaccgagatggagagattcgccccccccagaaagagacccagaaccatcaccaagaactacagactggtgagcctgagaagcaccacccccgaggagctgtaccagagaaagatcgagagcgaggagtacgaggaggccctgagcctggcccacacctacggcctggacaccgacctggtgtaccagagacagtggagaaagagcgccgtgaacgtggccagcatccagaactacctgagcaagatcaagaagagaagctgggtgctgcacgagtgcctggagagagtgcccgagaacgtggacgccgccaaggagctgctgcagtacggcctgaagggcaccgacctggaggccctgctggccatcggcaagggcgccgacgacggcagattcaccctgcccggcgagatcgacatcgacagcatcagctacgaggagctgagcccccccgacgaggagcccgccaagaacaagaaggagaaggagctgaagaagagacaggagctgctgaagctggtgaacttcagcaagctgaccctggagcagaaggagctgtgcagatgcagaagaaagctgctgacctacctggacagactggccacctacgaggagatcctgggcgtgccccacgccagcgagcagagatacgacgccgagttcttcaagaagttcagaaaccagaacatcgtgctgagcgccagaacctacgcccaggagagcaacgtgcaggccctggagatcctgttcacctaccacggcagcgacctgctgccccacagactggccatcctgagcaacttccccgagaccaccagcccccacgagtacagcgtgctgctgcccgaggcctgcttcaacggcgacagcctgatgatcatcccctggcacgagcacaagcacagagccaaggactggtgcgaggagctggcctgcagaatggtggtggagcccaacctgcaggacgagagcgagttcctgtacgccgcccagcccgagctgctgagattcagaatgacccagctgaccgtggagaaggtgatggactggtaccagaccagagccgaggagatcgagcactacgccagacagctgcagcagaagatcatccccgaccaggaccagctgatggccatcgccctggagtgcatctacacctgcgagagaaacgaccagctgtgcctgtgctacgacctgctggagtgcctgcccgagagaggctacggcgacaagaccgaggccaccaccaagctgcacgacatggtggaccagctggagcagatcctgagcgtgagcgagctgctggagaagcacggcctggagaagcccatcagcttcgtgaagaacacccagagcagcagcgaggaggccagaaagctgatggtgagactgaccagacacaccggcagaaagcagccccccgtgagcgagagccactggagaaccctgctgcaggacatgctgaccatgcagcagaacgtgtacacctgcctggacagcgacgcctgctacgagatcttcaccgagagcctgctgtgcagcagcagactggagaacatccacctggccggccagatgatgcactgcagcgcctgcagcgagaacccccccgccggcatcgcccacaagggcaagccccactacagagtgagctacgagaagagcatcgacctggtgctggccgccagcagagagtacttcaacagcagcaccaacctgaccgacagctgcatggacctggccagatgctgcctgcagctgatcaccgacagaccccccgccatccaggaggagctggacctgatccaggccgtgggctgcctggaggagttcggcgtgaagatcctgcccctgcaggtgagactgtgccccgacagaatcagcctgatcaaggagtgcatcagccagagccccacctgctacaagcagagcaccaagctgctgggcctggccgagctgctgagagtggccggcgagaaccccgaggagagaagaggccaggtgctgatcctgctggtggagcaggccctgagattccacgactacaaggccgccagcatgcactgccaggagctgatggccaccggctaccccaagagctgggacgtgtgcagccagctgggccagagcgagggctaccaggacctggccaccagacaggagctgatggccttcgccctgacccactgcccccccagcagcatcgagctgctgctggccgccagcagcagcctgcagaccgagatcctgtaccagagagtgaacttccagatccaccacgagggcggcgagaacatcagcgccagccccctgaccagcaaggccgtgcaggaggacgaggtgggcgtgcccggcagcaacagcgccgacctgctgagatggaccaccgccaccaccatgaaggtgctgagcaacaccaccaccaccaccaaggccgtgctgcaggccgtgagcgacggccagtggtggaagaagagcctgacctacctgagacccctgcagggccagaagtgcggcggcgcctaccagatcggcaccaccgccaacgaggacctggagaagcagggctgccaccccttctacgagagcgtgatcagcaaccccttcgtggccgagagcgagggcacctacgacacctaccagcacgtgcccgtggagagcttcgccgaggtgctgctgagaaccggcaagctggccgaggccaagaacaagggcgaggtgttccccaccaccgaggtgctgctgcagctggccagcgaggccctgcccaacgacatgaccctggccctggcctacctgctggccctgccccaggtgctggacgccaacagatgcttcgagaagcagagccccagcgccctgagcctgcagctggccgcctactactacagcctgcagatctacgccagactggccccctgcttcagagacaagtgccaccccctgtacagagccgaccccaaggagctgatcaagatggtgaccagacacgtgaccagacacgagcacgaggcctggcccgaggacctgatcagcctgaccaagcagctgcactgctacaacgagagactgctggacttcacccaggcccagatcctgcagggcctgagaaagggcgtggacgtgcagagattcaccgccgacgaccagtacaagagagagaccatcctgggcctggccgagaccctggaggagagcgtgtacagcatcgccatcagcctggcccagagatacagcgtgagcagatgggaggtgttcatgacccacctggagttcctgttcaccgacagcggcctgagcaccctggagatcgagaacagagcccaggacctgcacctgttcgagaccctgaagaccgaccccgaggccttccaccagcacatggtgaagtacatctaccccaccatcggcggcttcgaccacgagagactgcagtactacttcaccctgctggagaactgcggctgcgccgacctgggcaactgcgccatcaagcccgagacccacatcagactgctgaagaagttcaaggtggtggccagcggcctgaactacaagaagctgaccgacgagaacatgagccccctggaggccctggagcccgtgctgagcagccagaacatcctgagcatcagcaagctggtgcccaagatccccgagaaggacggccagatgctgagccccagcagcctgtacaccatctggctgcagaagctgttctggaccggcgacccccacctgatcaagcaggtgcccggcagcagccccgagtggctgcacgcctacgacgtgtgcatgaagtacttcgacagactgcaccccggcgacctgatcaccgtggtggacgccgtgaccttcagccccaaggccgtgaccaagctgagcgtggaggccagaaaggagatgaccagaaaggccatcaagaccgtgaagcacttcatcgagaagcccagaaagagaaacagcgaggacgaggcccaggaggccaaggacagcaaggtgacctacgccgacaccctgaaccacctggagaagagcctggcccacctggagaccctgagccacagcttcatcctgagcctgaagaacagcgagcaggagaccctgcagaagtacagccacctgtacgacctgagcagaagcgagaaggagaagctgcacgacgaggccgtggccatctgcctggacggccagcccctggccatgatccagcagctgctggaggtggccgtgggccccctggacatcagccccaaggacatcgtgcagagcgccatcatgaagatcatcagcgccctgagcggcggcagcgccgacctgggcggccccagagaccccctgaaggtgctggagggcgtggtggccgccgtgcacgccagcgtggacaagggcgaggagctggtgagccccgaggacctgctggagtggctgagacccttctgcgccgacgacgcctggcccgtgagacccagaatccacgtgctgcagatcctgggccagagcttccacctgaccgaggaggacagcaagctgctggtgttcttcagaaccgaggccatcctgaaggccagctggccccagagacaggtggacatcgccgacatcgagaacgaggagaacagatactgcctgttcatggagctgctggagagcagccaccacgaggccgagttccagcacctggtgctgctgctgcaggcctggccccccatgaagagcgagtacgtgatcaccaacaacccctgggtgagactggccaccgtgatgctgaccagatgcaccatggagaacaaggagggcctgggcaacgaggtgctgaagatgtgcagaagcctgtacaacaccaagcagatgctgcccgccgagggcgtgaaggagctgtgcctgctgctgctgaaccagagcctgctgctgcccagcctgaagctgctgctggagagcagagacgagcacctgcacgagatggccctggagcagatcaccgccgtgaccaccgtgaacgacagcaactgcgaccaggagctgctgagcctgctgctggacgccaagctgctggtgaagtgcgtgagcacccccttctaccccagaatcgtggaccacctgctggccagcctgcagcagggcagatgggacgccgaggagctgggcagacacctgagagaggccggccacgaggccgaggccggcagcctgctgctggccgtgagaggcacccaccaggccttcagaaccttcagcaccgccctgagagccgcccagcactgggtgtag

SEQ ID NO: 299285 - DNA, 1221 bp, Artificial Sequence
  derived and/or modified sequence
atggccgtctaccaaacttatgttaacgcaatgaatgacaaaatcagaaagcaaattaatataaataacccattcgtgttcaaacacattagcaacctgaagtcaatggaccattttgacgacattgggcccagcgtggtcatggcatctcctggtatgatgcagagcgggctcagtcgagagctgtttgagagctggtgcaccgacaagcgcaacggcgtgattatcgccgggtactgcgttgagggcactctcgccaagcacattatgagcgagccggaggagataacaactatgagcggacagaagttgccactaaagatgtcagtcgattatatatccttctccgcccataccgattatcagcaaacaagcgagtttattcgagccctaaagcctccccacgtgattctggtgcatggtgagcaaaacgaaatggcccgactgaaggcggccctgatccgtgaatatgaggacaacgacgaagtgcatatagaagtacataatccgaggaatactgaggctgttaccttaaatttcaggggagagaagttagccaaagtgatgggattcctggccgataagaaaccggaacagggtcagagggtgtccggcatcctggtgaaaaggaactttaactaccacatactgtccccgtgtgatttatctaattatactgatttagcgatgagcacagtgaagcaaacacaggccatcccatatacagggccatttaacctgctctgttaccagctccagaaattgaccggcgatgtggaagaactggaaattcaggagaagcctgccttaaaggtgttcaaaaatatcactgtgattcaagaacccggcatggtcgtgctcgagtggcttgctaaccccagcaacgacatgtatgcagatactgtgactaccgtaattctagaggttcagtcaaaccccaagattcgcaaaggcgccgtgcagaaggtaagcaaaaagctggagatgcatgtgtactcaaaaagacttgaaatcatgctacaggatatatttggagaggattgcgtcagcgtaaaagacgattcaattctaagcgtgactgtagacggcaagactgcaaacctcaatctcgaaaccagaacagtggaatgtgaagagggctcagaagacgatgagtctcttagggagatggtggagctcgccgcacagagactatatgaagcgctcactcccgtgcactag

SEQ ID NO: 299286 - DNA, 1221 bp, Artificial Sequence
  derived and/or modified sequence
atggctgtgtaccagacctacgtgaatgccatgaatgacaagatcaggaagcagatcaacatcaacaacccctttgtgttcaagcacatcagcaacctgaagtccatggaccactttgatgacatcggccccagcgtggtgatggccagccctggcatgatgcagagcggcctgagccgggagctgtttgagagctggtgcacagacaagagaaatggagtcatcatcgccggctactgtgtggagggcaccctggccaagcacatcatgtctgagcctgaggagatcaccaccatgagcggccagaagctgcccctgaagatgtctgtggactacatctccttcagcgcccacacagactaccagcagaccagcgagttcatccgggccctgaagccccctcatgtgatcctggtgcacggggagcagaatgagatggcccggctgaaggccgccctgatccgggagtatgaggacaatgatgaggtgcacatcgaggtgcacaaccccaggaacacagaagctgtgaccctgaacttccggggggagaagctggccaaggtgatgggcttcctggccgacaagaagccagagcagggccagagggtgtctggcatcctggtgaagaggaacttcaactaccacatcctgagcccctgtgacctgagcaactacacagacctggccatgagcacagtgaagcagacccaggccatcccctacacaggccccttcaacctgctgtgctaccagctgcagaagctgactggagatgtggaggagctggagatccaggagaagccagccctgaaggtgttcaagaacatcaccgtcatccaggagcccggcatggtggtgctggagtggctggccaaccccagcaatgacatgtatgctgacacagtgaccaccgtcatcctggaggtgcagagcaaccccaagatcagaaaaggagctgtgcagaaggtgtccaagaagctggagatgcacgtgtacagcaagaggctggagatcatgctgcaggacatctttggagaggactgtgtgtctgtgaaggatgacagcatcctgtctgtgacagtggatggcaagacagccaacctgaacctggagaccaggacagtggagtgtgaggagggctctgaagatgatgagagcctgcgggagatggtggagctggccgcccagaggctgtatgaggccctgacccctgtgcactag

SEQ ID NO: 299287 - DNA, 1221 bp, Artificial Sequence
  derived and/or modified sequence
atggccgtgtaccagacctacgtgaacgccatgaacgacaagatccgcaaacagattaacatcaacaaccccttcgtgttcaagcatatttctaaccttaaatcaatggaccactttgacgacatcggtccttccgtagttatggctagtcccggcatgatgcagagtgggctgagcagagaactgtttgagtcgtggtgcactgacaaaagaaatggtgtcatcatcgccgggtattgcgtggagggcacacttgcaaagcacattatgagcgaacccgaagagatcaccaccatgagtggtcagaagctacctttgaagatgtccgttgattatatcagcttctcagcccataccgattaccagcagaccagcgagttcattagagccttgaagccaccccacgtgattttggtgcacggtgaacagaatgagatggcgagacttaaagctgctctgattcgggaatatgaggacaacgatgaggtccacatcgaggtgcacaatcctcggaacacagaagcagtgacccttaacttccggggagagaaactggcaaaggtaatgggcttcttggccgacaaaaagcccgaacaagggcagcgtgtgtcgggaattctggtcaaaaggaacttcaactaccacattctgtctccctgcgatctgtctaattataccgacctggccatgtctacagtgaagcagacacaggccatcccctacactggcccattcaatctgctttgctatcagctgcagaaactgaccggcgatgtcgaggaactcgaaatccaagagaaacctgccttgaaggtgttcaaaaatatcactgtcattcaagagcctggtatggtcgtcctggaatggctggcaaatccttccaatgacatgtatgcggatacagtgaccaccgtcatcctggaagtgcagagtaatccaaaaatccgcaagggtgcagtgcagaaagttagcaagaagctggaaatgcatgtctacagcaagcggctggaaattatgttgcaggacatttttggagaggactgtgtaagcgtaaaggacgactctattctcagcgtgaccgttgatggaaagactgccaacttgaacttagaaacaagaactgttgagtgcgaagaaggctcagaggacgacgagagtctgagggaaatggtggaactggccgcccagcggctttacgaggccctgacacccgtgcactag

SEQ ID NO: 299288 - DNA, 1221 bp, Artificial Sequence
  derived and/or modified sequence
atggcagtctaccagacctacgttaacgcaatgaatgataaaatccggaaacaaataaacatcaacaacccattcgttttcaaacacatttcaaatctcaagtccatggaccactttgatgacatcggcccatccgtcgtcatggcctcccctggaatgatgcagtcaggcctgagccgggaactgtttgagtcttggtgcactgacaaacgcaacggagttatcatcgccggatattgcgtagagggaacactggccaaacacattatgtctgagccagaggaaattacgacaatgtccggtcagaaactacccttaaagatgagcgtcgactatataagctttagtgctcacactgattaccaacagactagcgaatttattagggcgttgaaaccgcctcacgtcatattagtgcatggtgagcagaacgaaatggcccgactcaaagctgccctgattcgggaatacgaggacaacgacgaggtccatattgaggtgcacaaccctcggaacaccgaagcagtgaccctcaatttcaggggggagaagctcgccaaggttatgggctttttggccgacaagaagcctgagcaggggcaaagggtcagcggaattttagtcaagcgcaatttcaactatcacatcctctctccttgtgatctgtcgaattatactgacctggccatgagtacggtgaagcaaacacaggcgattccttataccggacctttcaatttgctctgctaccaactgcagaaactaacaggggacgtcgaagagctggaaatccaggaaaaaccggctcttaaggtgttcaagaacatcaccgtgatccaggagcctggcatggtggtgctggaatggctcgccaatccctctaacgacatgtatgccgacaccgtcactaccgtaatcctggaggtccagagtaatcccaaaatccgcaagggagctgtgcagaaggtgtccaagaagctagaaatgcacgtgtattcgaagaggctggaaataatgctgcaagacatctttggcgaggactgtgtcagcgtgaaggacgacagtatcctgagtgtgacagtggatgggaaaaccgctaatctgaatctggaaacaaggacagtggagtgtgaggaggggtcagaagatgacgaaagtttgagagagatggtcgagttagccgctcaaaggctgtacgaagcactcactcctgtccattag

SEQ ID NO: 299289 - DNA, 1221 bp, Artificial Sequence
  derived and/or modified sequence
atggccgtgtaccagacctacgtgaacgccatgaacgacaagatcagaaagcagatcaacatcaacaaccccttcgtgttcaagcacatcagcaacctgaagagcatggaccacttcgacgacatcggccccagcgtggtgatggccagccccggcatgatgcagagcggcctgagcagagagctgttcgagagctggtgcaccgacaagagaaacggcgtgatcatcgccggctactgcgtggagggcaccctggccaagcacatcatgagcgagcccgaggagatcaccaccatgagcggccagaagctgcccctgaagatgagcgtggactacatcagcttcagcgcccacaccgactaccagcagaccagcgagttcatcagagccctgaagcccccccacgtgatcctggtgcacggcgagcagaacgagatggccagactgaaggccgccctgatcagagagtacgaggacaacgacgaggtgcacatcgaggtgcacaaccccagaaacaccgaggccgtgaccctgaacttcagaggcgagaagctggccaaggtgatgggcttcctggccgacaagaagcccgagcagggccagagagtgagcggcatcctggtgaagagaaacttcaactaccacatcctgagcccctgcgacctgagcaactacaccgacctggccatgagcaccgtgaagcagacccaggccatcccctacaccggccccttcaacctgctgtgctaccagctgcagaagctgaccggcgacgtggaggagctggagatccaggagaagcccgccctgaaggtgttcaagaacatcaccgtgatccaggagcccggcatggtggtgctggagtggctggccaaccccagcaacgacatgtacgccgacaccgtgaccaccgtgatcctggaggtgcagagcaaccccaagatcagaaagggcgccgtgcagaaggtgagcaagaagctggagatgcacgtgtacagcaagagactggagatcatgctgcaggacatcttcggcgaggactgcgtgagcgtgaaggacgacagcatcctgagcgtgaccgtggacggcaagaccgccaacctgaacctggagaccagaaccgtggagtgcgaggagggcagcgaggacgacgagagcctgagagagatggtggagctggccgcccagagactgtacgaggccctgacccccgtgcactag

SEQ ID NO: 299290 - DNA, 462 bp, Artificial Sequence
  derived and/or modified sequence
atgaacgggttaacttccttcctcgatgcgtccactgtctacggcagctcccctgcccttgaaagacagctgcggaactggacttctgcagaaggactccttcgagtgcacgccagactgagggactctggtcgtgcatacctgccctttgtcccaccgagggctccagccgcttgcgcccctgaaccagggatcccaggagagactcggggaccgtgctttctagccggagatccgcgacagagaggcccattgccagacggaacggctcacgcggtggcagccagagcccagccgccaggcaggggtgcgcaagggcctcaatgtgcactggaaagaggacgcagggttccgggtggagctcagggcagggggagaagcgcaccagaccatcatcccgagggcctccacccgcaggatcctggaacaagagggttgcccgctgtgagggggagcctgtag

SEQ ID NO: 299291 - protein, 929 aa, Artificial Sequence
  derived and/or modified sequence
MRALAVLSVTLVMACTEAFFPFISRGKELLWGKPEESRVSSVLEESKRLVDTAMYATMQRNLKKRGILSPAQLLSFSKLPEPTSGVIARAAEIMETSIQAMKRKVNLKTQQSQHPTDALSEDLLSIIANMSGCLPYMLPPKCPNTCLANKYRPITGACNNRDHPRWGASNTALARWLPPVYEDGFSQPRGWNPGFLYNGFPLPPVREVTRHVIQVSNEVVTDDDRYSDLLMAWGQYIDHDIAFTPQSTSKAAFGGGADCQMTCENQNPCFPIQLPEEARPAAGTACLPFYRSSAACGTGDQGALFGNLSTANPRQQMNGLTSFLDASTVYGSSPALERQLRNWTSAEGLLRVHARLRDSGRAYLPFVPPRAPAACAPEPGIPGETRGPCFLAGDGRASEVPSLTALHTLWLREHNRLAAALKALNAHWSADAVYQEARKVVGALHQIITLRDYIPRILGPEAFQQYVGPYEGYDSTANPTVSNVFSTAAFRFGHATIHPLVRRLDASFQEHPDLPGLWLHQAFFSPWTLLRGGGLDPLIRGLLARPAKLQVQDQLMNEELTERLFVLSNSSTLDLASINLQRGRDHGLPGYNEWREFCGLPRLETPADLSTAIASRSVADKILDLYKHPDNIDVWLGGLAENFLPRARTGPLFACLIGKQMKALRDGDWFWWENSHVFTDAQRRELEKHSLSRVICDNTGLTRVPMDAFQVGKFPEDFESCDSITGMNLEAWRETFPQDDKCGFPESVENGDFVHCEESGRRVLVYSCRHGYELQGREQLTCTQEGWDFQPPLCKDVNECADGAHPPCHASARCRNTKGGFQCLCADPYELGDDGRTCVDSGRLPRVTWISMSLAALLIGGFAGLTSTVICRWRVLGWKAGILTGCREPSEGKVAGHCRTASCSQNHRTTLFQTQANPKSAGRLFSQHG

SEQ ID NO: 299292 - DNA, 2790 bp, Artificial Sequence
  derived and/or modified sequence
atgagagccctggccgtgctgagcgtgaccctggtgatggcctgcaccgaggccttcttccccttcatcagcagaggcaaggagctgctgtggggcaagcccgaggagagcagagtgagcagcgtgctggaggagagcaagagactggtggacaccgccatgtacgccaccatgcagagaaacctgaagaagagaggcatcctgagccccgcccagctgctgagcttcagcaagctgcccgagcccaccagcggcgtgatcgccagagccgccgagatcatggagaccagcatccaggccatgaagagaaaggtgaacctgaagacccagcagagccagcaccccaccgacgccctgagcgaggacctgctgagcatcatcgccaacatgagcggctgcctgccctacatgctgccccccaagtgccccaacacctgcctggccaacaagtacagacccatcaccggcgcctgcaacaacagagaccaccccagatggggcgccagcaacaccgccctggccagatggctgccccccgtgtacgaggacggcttcagccagcccagaggctggaaccccggcttcctgtacaacggcttccccctgccccccgtgagagaggtgaccagacacgtgatccaggtgagcaacgaggtggtgaccgacgacgacagatacagcgacctgctgatggcctggggccagtacatcgaccacgacatcgccttcaccccccagagcaccagcaaggccgccttcggcggcggcgccgactgccagatgacctgcgagaaccagaacccctgcttccccatccagctgcccgaggaggccagacccgccgccggcaccgcctgcctgcccttctacagaagcagcgccgcctgcggcaccggcgaccagggcgccctgttcggcaacctgagcaccgccaaccccagacagcagatgaacggcctgaccagcttcctggacgccagcaccgtgtacggcagcagccccgccctggagagacagctgagaaactggaccagcgccgagggcctgctgagagtgcacgccagactgagagacagcggcagagcctacctgcccttcgtgccccccagagcccccgccgcctgcgcccccgagcccggcatccccggcgagaccagaggcccctgcttcctggccggcgacggcagagccagcgaggtgcccagcctgaccgccctgcacaccctgtggctgagagagcacaacagactggccgccgccctgaaggccctgaacgcccactggagcgccgacgccgtgtaccaggaggccagaaaggtggtgggcgccctgcaccagatcatcaccctgagagactacatccccagaatcctgggccccgaggccttccagcagtacgtgggcccctacgagggctacgacagcaccgccaaccccaccgtgagcaacgtgttcagcaccgccgccttcagattcggccacgccaccatccaccccctggtgagaagactggacgccagcttccaggagcaccccgacctgcccggcctgtggctgcaccaggccttcttcagcccctggaccctgctgagaggcggcggcctggaccccctgatcagaggcctgctggccagacccgccaagctgcaggtgcaggaccagctgatgaacgaggagctgaccgagagactgttcgtgctgagcaacagcagcaccctggacctggccagcatcaacctgcagagaggcagagaccacggcctgcccggctacaacgagtggagagagttctgcggcctgcccagactggagacccccgccgacctgagcaccgccatcgccagcagaagcgtggccgacaagatcctggacctgtacaagcaccccgacaacatcgacgtgtggctgggcggcctggccgagaacttcctgcccagagccagaaccggccccctgttcgcctgcctgatcggcaagcagatgaaggccctgagagacggcgactggttctggtgggagaacagccacgtgttcaccgacgcccagagaagagagctggagaagcacagcctgagcagagtgatctgcgacaacaccggcctgaccagagtgcccatggacgccttccaggtgggcaagttccccgaggacttcgagagctgcgacagcatcaccggcatgaacctggaggcctggagagagaccttcccccaggacgacaagtgcggcttccccgagagcgtggagaacggcgacttcgtgcactgcgaggagagcggcagaagagtgctggtgtacagctgcagacacggctacgagctgcagggcagagagcagctgacctgcacccaggagggctgggacttccagccccccctgtgcaaggacgtgaacgagtgcgccgacggcgcccaccccccctgccacgccagcgccagatgcagaaacaccaagggcggcttccagtgcctgtgcgccgacccctacgagctgggcgacgacggcagaacctgcgtggacagcggcagactgcccagagtgacctggatcagcatgagcctggccgccctgctgatcggcggcttcgccggcctgaccagcaccgtgatctgcagatggagagtgctgggctggaaggccggcatcctgaccggctgcagagagcccagcgagggcaaggtggccggccactgcagaaccgccagctgcagccagaaccacagaaccaccctgttccagacccaggccaaccccaagagcgccggcagactgttcagccagcacggctag

SEQ ID NO: 299293 - DNA, 2790 bp, Artificial Sequence
  derived and/or modified sequence
atgagggctctcgcagttctgagcgtcaccctcgtgatggcctgtacggaggccttttttccatttatcagccggggcaaggagctcctttgggggaaaccggaggagtcacgcgtgagcagtgtgctcgaggagtctaaaaggctagttgatacagccatgtacgccaccatgcagcggaaccttaaaaagcgcggtatcctgagccccgcccagcttctgagtttttcaaagctgcccgagccaaccagtggcgtgatagcccgcgccgccgaaattatggaaacctcaatccaggccatgaaacggaaagtgaacctcaagacacagcagagtcagcacccaaccgatgccttgagtgaggacctgttaagcatcattgccaatatgtcagggtgtttaccttacatgcttccacctaaatgccctaatacatgtctagcaaataaataccggcctatcactggcgcctgcaacaaccgtgaccacccccgatggggggcaagtaatactgcactggccaggtggctccccccagtctacgaggacgggttttcccagcctagaggttggaaccccggtttcctgtataatggatttcctctgcctccagtacgggaagttacccgacacgttatccaggtatctaacgaggtagtcactgacgacgacagatactctgacctgctgatggcgtggggccagtacatcgatcatgacatagccttcactcctcaatctacatccaaagctgctttcgggggcggggcagattgtcaaatgacctgcgagaaccagaatccgtgcttccccattcagctgcccgaagaagccaggcccgccgctggaactgcatgtctgccgttttatcggtcatcagccgcgtgtggcacgggtgatcagggggcactgtttgggaatctgagtaccgccaacccccgacagcagatgaacgggctgacatcatttctggacgcttcaacagtgtacggaagctctccagcactggaaaggcagctgaggaattggacatccgccgaggggctcctacgagtgcacgcaagattacgggattcgggacgagcctacctaccttttgtgccccctagagcccctgcggcgtgcgcccctgaacctggcatccccggcgagactcgtggtccttgtttccttgcaggggatggtcgggcctcagaggtgccctctcttactgcgctgcacacgctgtggctcagggagcacaatcggcttgctgccgccctaaaagctctgaatgcccactggtcagccgacgcggtctaccaggaagcgcggaaagttgtaggagctcttcaccaaatcatcacccttcgcgactacatcccaagaatcctcgggcccgaagcgtttcagcagtacgttggcccatacgaggggtacgattccacagccaatccgacagtgtcaaacgtcttttctactgccgcgtttcggttcggacatgccactatccatcccctcgtccgcagattagacgcctcttttcaggagcaccccgacctgccaggtctgtggctgcaccaggcatttttttcaccctggacactgctccgcggcggaggcttagaccctctgattcgaggcctactcgcacgacctgcaaaactgcaggtgcaagaccaactgatgaatgaggagctaactgagagactatttgtgctgtctaatagctcaacactcgacctggcgtctataaaccttcagagggggcgcgatcatggcctccccggctacaacgagtggagagagttttgtggacttccaaggttggagactcctgccgatcttagcaccgcaatcgcctcccggtcagtcgcagataagatcctggacctttacaagcatccagataacatcgacgtgtggctgggtggactggcggaaaattttcttcccagagcccgcaccgggccgctgttcgcgtgtcttatcggaaaacagatgaaagccctgcgtgatggggactggttttggtgggaaaattcacatgtcttcactgacgcccagcgacgagagttagaaaagcattcacttagccgggtgatatgtgataacaccggcctcacccgcgtgcccatggacgccttccaggtgggcaaattcccggaggattttgagagttgtgatagtattaccggtatgaatcttgaggcgtggagagaaacgtttccacaggatgacaaatgtggcttccctgaatcagtggaaaatggagatttcgtgcattgtgaggagtccgggcgtcgggtgctagtttatagctgccgacacggttacgagttgcagggcagggagcagcttacctgcactcaggaagggtgggattttcaaccaccactgtgcaaggacgttaacgaatgtgctgacggcgcacacccgccttgccacgcgtctgcccggtgccggaacacaaaaggcggctttcaatgtctttgtgcagatccgtatgagcttggtgacgacggccggacctgcgtcgactcaggaaggctcccccgtgtgacctggattagcatgtcactggctgcattattgatcggaggattcgccggactgacaagcaccgtgatttgccgctggcgggttctggggtggaaagctggcattctgacaggttgccgcgaaccctctgagggtaaggtcgcgggccattgtcggactgcctcctgcagccagaaccatcggaccacactgttccagactcaagcaaaccccaagagtgctgggcgcctgttcagccagcacggctag

SEQ ID NO: 299294 - DNA, 2790 bp, Artificial Sequence
  derived and/or modified sequence
atgagggccctggccgtgctgtctgtgaccctggtgatggcctgcacagaggccttcttccccttcatcagccggggcaaggagctgctgtggggcaagccagaggagagccgggtgtcctctgtgctggaggagagcaagaggctggtggacacagccatgtatgccaccatgcagaggaacctgaagaagaggggcatcctgagccctgcccagctgctgtccttcagcaagctgcctgagcccaccagcggcgtgattgcccgggctgctgagatcatggagaccagcatccaggccatgaagaggaaggtgaacctgaagacccagcagagccagcaccccacagatgccctgtctgaggacctgctgagcatcatcgccaacatgagcggctgcctgccctacatgctgccccccaagtgccccaacacctgcctggccaacaagtaccggcccatcactggagcctgcaacaacagagaccacccccgctggggcgccagcaacacagccctggcccgctggctgccccctgtgtatgaagatggcttcagccagccccggggctggaaccctggcttcctgtacaacggcttccccctgccccctgtgcgggaggtgaccaggcatgtgatccaggtgtccaatgaggtggtgacagatgatgaccgctacagcgacctgctgatggcctggggccagtacatcgaccatgacatcgccttcaccccccagagcaccagcaaggccgcctttggaggcggcgctgactgccagatgacctgtgagaaccagaacccctgcttccccatccagctgcctgaggaggcccggcctgctgctggaacagcctgcctgcccttctaccgcagcagcgctgcctgtggcaccggggaccagggcgccctgtttggaaacctgagcacagccaacccccggcagcagatgaatggcctgaccagcttcctggatgccagcacagtgtatggcagcagccctgccctggagcggcagctgaggaactggaccagcgctgagggcctgctgcgggtgcacgcccggctgcgggacagcggccgggcctacctgccctttgtgcccccccgggccccagctgcctgtgcccctgagcccggcatccctggagagacccggggcccctgcttcctggccggagatggccgggccagcgaggtgcccagcctgacagccctgcacaccctgtggctgcgggagcacaaccggctggccgccgccctgaaggccctgaatgcccactggagcgcagatgctgtgtaccaggaggccaggaaggtggtgggcgccctgcaccagatcatcaccctgcgggactacatcccccgcatcctgggccctgaggccttccagcagtatgtgggcccctatgagggctatgacagcacagccaaccccaccgtgtccaatgtgttcagcacagctgccttccgcttcggccacgccaccatccaccccctggtgcggcggctggatgccagcttccaggagcacccagacctgcccggcctgtggctgcaccaggccttcttcagcccctggaccctgctgcggggcggcggcctggaccccctcatccggggcctgctggcccggcctgccaagctgcaggtgcaggaccagctgatgaatgaggagctgacagagcggctgtttgtgctgagcaacagcagcaccctggacctggccagcatcaacctgcagaggggccgggaccacggcctgcccggctacaatgagtggagggagttctgtggcctgccccggctggagaccccagctgacctgagcacagccatcgccagccgctctgtggccgacaagatcctggacctgtacaagcacccagacaacattgatgtgtggctgggcggcctggccgagaacttcctgccccgggccaggacaggccccctgtttgcctgcctgattggcaagcagatgaaggccctgagagatggagactggttctggtgggagaacagccacgtgttcacagatgcccagaggcgggagctggagaagcacagcctgagcagggtcatctgtgacaacacaggcctgaccagggtgcccatggatgccttccaggtgggcaagtttcctgaggactttgagagctgtgacagcatcaccggcatgaacctggaggcctggagggagaccttcccccaggatgacaagtgtggcttccctgagagcgtggagaatggagactttgtgcactgtgaggagagcggcagaagagtgctggtgtacagctgccgccacggctatgagctgcagggccgggagcagctgacctgcacccaggagggctgggacttccagccccccctgtgcaaggatgtgaatgaatgtgctgatggagcccaccccccctgccacgccagcgcccgctgcaggaacaccaagggcggcttccagtgcctgtgtgccgacccctatgagctgggagatgatggccgcacctgtgtggacagcggccgcctgccccgggtgacctggatctccatgagcctggccgccctgctgattggaggctttgctggcctgaccagcaccgtcatctgccgctggagggtgctgggctggaaggccggcatcctgaccggctgccgggagcccagcgagggcaaggtggccggccactgcaggacagccagctgcagccagaaccacaggaccaccctcttccagacccaggccaaccccaagtctgctggccgcctcttcagccagcacggctag

SEQ ID NO: 299295 - DNA, 2790 bp, Artificial Sequence
  derived and/or modified sequence
atgcgggccctggccgtgctgagcgtgaccctggtgatggcctgcacagaggctttttttccttttatcagcaggggaaaggaattgctttgggggaagcctgaagagtctcgagtgtctagcgttctggaagagtccaaacgcttagtggatacagcaatgtatgccacgatgcaaagaaacttgaaaaagcgggggatcctgagccctgcacagctgttaagcttcagtaagctgcccgagccaacttcaggcgtcatcgctagagcagctgagatcatggaaacatctatccaggctatgaaaagaaaggtgaacttaaagacccagcaatctcaacacccaactgacgccctgtccgaggatctcctgagtatcattgccaacatgagcgggtgcttgccatacatgctgcccccgaagtgccctaatacatgcctggctaacaagtaccgtccaatcacgggggcctgcaataacagagatcatcctcgctggggtgcctccaacactgcgttagcgagatggctgccaccggtgtacgaagatggattcagccaaccacggggatggaacccgggcttcttgtataacgggttcccactgcctcccgttcgagaggtgactaggcacgtgatccaagtgagtaacgaagtggtcacagacgatgataggtattccgatctcctaatggcatggggtcaatacatcgaccatgacatcgcattcactccacagtccacgtctaaggccgcattcggaggcggagctgactgtcagatgacatgcgagaaccagaatccttgctttcccattcagttgcccgaggaggctcgtcccgctgcgggtaccgcctgccttcctttttaccgttcgtccgcggcttgcgggaccggcgatcagggagcgctgtttgggaacctcagcaccgctaatccccgccaacagatgaacggcctcacgagctttctcgacgctagtactgtgtacgggagttcccctgccttggagcgtcagttacgcaattggacgtctgcagagggcctgctgcgcgtccatgctcgcctccgggatagcggccgggcgtaccttcccttcgtgccgccccgggctcccgccgcatgtgcccccgaacctggcatccccggggagacgagaggaccttgttttctggctggcgacgggcgtgccagtgaagtacccagcttgaccgctctgcataccctttggctgagagagcataatcgactcgcagccgccctcaaggccctgaatgctcactggtctgccgacgctgtgtaccaggaggctaggaaagtagtcggagccttgcatcagattatcaccctgcgcgactacattccccggatacttggcccggaagcattccagcagtacgtgggaccatatgaaggctacgacagcaccgctaatccgacggtttctaatgttttctccacggccgcatttagatttgggcatgcgacaattcatccactggtcaggaggttagacgctagctttcaagaacatcccgacctccctggcctatggctccaccaggcttttttctcaccttggacgctactgcggggaggaggcctagacccgcttatccgtggattactggcaaggccagctaaactacaggtgcaggaccaactgatgaatgaggaactcacggagagactcttcgtgctgagtaattctagcaccttggatctggcgagcatcaatctccagcgtggccgcgaccacgggctgcccggctataacgagtggcgggagttctgcggactgcctcgattagaaaccccagcagacctctccacagccatcgcatcacgcagcgttgccgataaaattctcgacttgtacaaacacccagataatatcgatgtctggttgggcgggctcgcagaaaacttcctgccccgcgcgcgcacaggcccgctgttcgcatgcttgattggtaaacagatgaaagcgttaagagacggcgactggttttggtgggaaaactcccacgtgtttactgatgctcagcgtcgcgagttggagaagcattccttgtcacgcgtcatctgcgacaatacaggtcttacccgggtaccaatggacgcattccaggtcggcaagttcccggaagacttcgagtcctgtgacagcattactgggatgaatctggaggcctggcgtgaaacttttccgcaagacgacaagtgtggtttccctgaatcagtcgaaaacggcgactttgtacattgtgaagaaagtggacggagggttttggtatatagctgccggcatggatacgagctgcaagggcgcgagcagctcacttgcactcaggaggggtgggactttcagccacctctgtgtaaagacgttaatgagtgcgctgatggcgctcaccccccctgtcacgcttccgcccgctgtcgcaataccaaaggaggtttccagtgtctctgcgcagatccttatgaactgggggacgatggaaggacctgcgtggactcgggtaggttgccaagagtaacttggatcagtatgtctttggcagcgttgctcattgggggctttgctggactgaccagcaccgtaatctgtcgatggcgagtcctgggttggaaggccggaattctgacggggtgccgggagccttcagaaggaaaggttgccgggcattgtcgtacagctagctgcagccagaatcaccggaccacactatttcagacacaggcgaatcccaagtcagccgggcgcctgtttagccagcacggatag

SEQ ID NO: 299296 - DNA, 2790 bp, Artificial Sequence
  derived and/or modified sequence
atgagagcgctcgcagtgttgtcggtgacacttgtgatggcctgtaccgaggcattttttccattcatcagcagggggaaagaactactctggggaaagccggaagaatccagagtatcctcagtcctcgaggaatcaaaaagactggtggacactgcaatgtatgccactatgcagcggaacttaaagaagcgaggcattcttagcccagcacaactgctatcttttagtaaactccccgagcctacttctggtgtgatcgcaagggccgcagaaatcatggagactagcatccaggctatgaagcgaaaagtgaatttgaagactcagcagagccagcatccgaccgacgccttaagtgaggacctcctgagcattatcgccaacatgtccggctgcctcccctacatgctgccaccaaaatgcccgaacacctgtctcgccaataaatacagaccgatcactggcgcttgcaacaatagagaccacccgcgatggggcgcttcaaacactgctcttgccaggtggctgcctccagtgtatgaggatggcttttcccaaccacgaggctggaacccaggcttcctgtataatgggtttcccttgccccctgtaagggaggtaacaagacatgtgatccaagtgagtaatgaggtcgtgaccgacgacgatcgttactcagacttgctgatggcttggggacagtacatcgatcacgacatagccttcactcctcagagcacaagcaaggcagcctttggaggcggagcggattgtcagatgacgtgcgagaatcagaatccgtgtttcccaattcagttaccagaggaagctcggccagccgctggaaccgcttgtctgcctttctatcgcagctcagccgcttgtggcacaggtgaccagggagccctttttggcaacctgagcaccgcaaacccacggcagcaaatgaatggactgacctctttcttagacgctagcaccgtttatggaagctcacccgcactcgaacggcaattaagaaattggacttcagcggagggcctcctccgcgtgcacgcacgcctcagagattcaggacgggcatacttgccattcgtcccaccacgggctcccgcagcctgtgccccagaacccggaataccgggagagacaaggggtccttgtttcctcgcgggagacggaagagctagtgaggtgcctagccttaccgccctacacacattgtggcttcgggagcacaacagactcgccgctgcgctcaaagccctcaacgcgcattggagtgccgacgcagtgtatcaagaggccagaaaggtggttggagccctacatcagattatcacactccgcgattacattccacgaatccttggaccggaggccttccagcagtacgtaggtccctatgagggctacgacagcacagcgaatccaactgtaagtaatgtgttcagtacagctgcgttccgatttggacacgccacaattcaccccttagtccggagactcgacgcaagtttccaggaacatcccgacctgcctggcctgtggttacatcaagcctttttttcgccttggacacttttgcggggaggagggttagaccctcttatccggggtctcctcgcccgaccagccaagttgcaggttcaagaccaactgatgaatgaagagttgacagagcggctgttcgttttgagtaattcgagtacactggaccttgcctcaatcaatcttcaaaggggaagggaccacggactgcctggatacaatgaatggcgggagttctgcgggctgcccaggcttgagacccctgctgatttatccactgccattgcaagccggtctgtggcagacaaaatactggatctttataagcacccagataatatcgacgtgtggttaggtgggttggcagagaatttcttgcctagggcacgcactgggcctctttttgcttgtcttattggcaagcaaatgaaagccctcagagacggcgactggttctggtgggagaattcccacgtgtttaccgacgcccagaggcgggaactagagaagcacagtctgagccgagtcatttgtgataatacgggcctgaccagagtacccatggatgcattccaggtgggtaagttccccgaggattttgagtcctgtgacagcattaccggcatgaaccttgaagcatggcgggagaccttcccacaggatgacaagtgcgggtttccggagagcgtggaaaatggagacttcgtacattgtgaggagtccggccgaagggttctggtgtactcctgccggcatgggtacgaattgcaggggagagagcagctcacttgcacccaggaagggtgggattttcagccccctctgtgtaaggacgtgaatgagtgcgctgatggcgctcaccccccttgtcacgcctctgcaagatgtaggaataccaaaggtggtttccaatgcctctgcgcggacccctatgagcttggcgatgacggacgcacttgtgtggactctgggaggctgcctcgggttacctggatctctatgtcccttgcagctctgttaattggtggatttgcgggactcacatctacagtgatttgtcgctggcgggtcttgggctggaaggctggtattctcacaggatgtcgagaacctagcgagggcaaagtggccggacactgccggaccgcaagctgctctcagaaccaccgcacaaccctatttcagactcaggcaaatccgaagtccgcgggtcgtctgttcagccagcacgggtag

SEQ ID NO: 299297 - DNA, 3015 bp, Artificial Sequence
  derived and/or modified sequence
ggaaggcaattaaggcgcccatttcagaagagttacagccgtgaaaattactcagcagtgcagttggctgagaagaggaaaaaaggtcagaatgagagcgctcgctgtgctgtctgtcacgctggttatggcctgcacagaagccttcttccccttcatctcgagagggaaagaactcctttggggaaagcctgaggagtctcgtgtctctagcgtcttggaggaaagcaagcgcctggtggacaccgccatgtacgccacgatgcagagaaacctcaagaaaagaggaatcctttctccagctcagcttctgtctttttccaaacttcctgagccaacaagcggagtgattgcccgagcagcagagataatggaaacatcaatacaagcgatgaaaagaaaagtcaacctgaaaactcaacaatcacagcatccaacggatgctttatcagaagatctgctgagcatcattgcaaacatgtctggatgtctcccttacatgctgcccccaaaatgcccaaacacttgcctggcgaacaaatacaggcccatcacaggagcttgcaacaacagagaccaccccagatggggcgcctccaacacggccctggcacgatggctccctccagtctatgaggacggcttcagtcagccccgaggctggaaccccggcttcttgtacaacgggttcccactgcccccggtccgggaggtgacaagacatgtcattcaagtttcaaatgaggttgtcacagatgatgaccgctattctgacctcctgatggcatggggacaatacatcgaccacgacatcgcgttcacaccacagagcaccagcaaagctgccttcgggggaggggctgactgccagatgacttgtgagaaccaaaacccatgttttcccatacaactcccggaggaggcccggccggccgcgggcaccgcctgtctgcccttctaccgctcttcggccgcctgcggcaccggggaccaaggcgcgctctttgggaacctgtccacggccaacccgcggcagcagatgaacgggttgacctcgttcctggacgcgtccaccgtgtatggcagctccccggccctagagaggcagctgcggaactggaccagtgccgaagggctgctccgcgtccacgcgcgcctccgggactccggccgcgcctacctgcccttcgtgccgccacgcgcgcctgcggcctgtgcgcccgagcccggcatccccggagagacccgcgggccctgcttcctggccggagacggccgcgccagcgaggtcccctccctgacggcactgcacacgctgtggctgcgcgagcacaaccgcctggccgcggcgctcaaggccctcaatgcgcactggagcgcggacgccgtgtaccaggaggcgcgcaaggtcgtgggcgctctgcaccagatcatcaccctgagggattacatccccaggatcctgggacccgaggccttccagcagtacgtgggtccctatgaaggctatgactccaccgccaaccccactgtgtccaacgtgttctccacagccgccttccgcttcggccatgccacgatccacccgctggtgaggaggctggacgccagcttccaggagcaccccgacctgcccgggctgtggctgcaccaggctttcttcagcccatggacattactccgtggaggtggtttggacccactaatacgaggccttcttgcaagaccagccaaactgcaggtgcaggatcagctgatgaacgaggagctgacggaaaggctctttgtgctgtccaattccagcaccttggatctggcgtccatcaacctgcagaggggccgggaccacgggctgccaggttacaatgagtggagggagttctgcggcctgcctcgcctggagacccccgctgacctgagcacagccatcgccagcaggagcgtggccgacaagatcctggacttgtacaagcatcctgacaacatcgatgtctggctgggaggcttagctgaaaacttcctccccagggctcggacagggcccctgtttgcctgtctcattgggaagcagatgaaggctctgcgggacggtgactggttttggtgggagaacagccacgtcttcacggatgcacagaggcgtgagctggagaagcactccctgtctcgggtcatctgtgacaacactggcctcaccagggtgcccatggatgccttccaagtcggcaaattccccgaagactttgagtcttgtgacagcatcactggcatgaacctggaggcctggagggaaacctttcctcaagacgacaagtgtggcttcccagagagcgtggagaatggggactttgtgcactgtgaggagtctgggaggcgcgtgctggtgtattcctgccggcacgggtatgagctccaaggccgggagcagctcacttgcacccaggaaggatgggatttccagcctcccctctgcaaagatgtgaacgagtgtgcagacggtgcccaccccccctgccacgcctctgcgaggtgcagaaacaccaaaggcggcttccagtgtctctgcgcggacccctacgagttaggagacgatgggagaacctgcgtagactccgggaggctccctcgggtgacttggatctccatgtcgctggctgctctgctgatcggaggcttcgcaggtctcacctcgacggtgatttgcaggtggagagtgctgggatggaaggccgggatactcacaggctgccgagagccctctgagggcaaagtggcaggacactgcagaacagcttcatgttcccaaaatcaccgtacgactcttttccaaacacaggcaaatccgaaatcagcaggacgactgttttcccaacacgggtaaatctagtaccatgtcgtagttactctcaggcatggatgaataaatgttatagctgcatttgtctggccttttcttgtaaacattgcctgatttgttccttctggggctttgccattaaaatgtatttacagatt

SEQ ID NO: 299298 - protein, 172 aa, Artificial Sequence
  derived and/or modified sequence
MRALAVLSVTLVMACTEAFFPFISRGKELLWGKPEESRVSSVLEESKRLVDTAMYATMQRNLKKRGILSPAQLLSFSKLPEPTSGVIARAAEIMETSIQAMKRKVNLKTQQSQHPTDALSEDLLSIIANMSGCLPYMLPPKCPNTCLANKYRPITGACNNRDHPRWGASNTA

SEQ ID NO: 299299 - protein, 153 aa, Artificial Sequence
  derived and/or modified sequence
MNGLTSFLDASTVYGSSPALERQLRNWTSAEGLLRVHARLRDSGRAYLPFVPPRAPAACAPEPGIPGETRGPCFLAGDPRQRGPLPDGTAHAVAARAQPPGRGAQGPQCALERGRRVPGGAQGRGRSAPDHHPEGLHPQDPGTRGLPAVRGSL

SEQ ID NO: 299300 - protein, 174 aa, Artificial Sequence
  derived and/or modified sequence
MRALAVLSVTLVMACTEAFFPFISRGKELLWGKPEESRVSSVLEESKRLVDTAMYATMQRNLKKRGILSPAQLLSFSKLPEPTSGVIARAAEIMETSIQAMKRKVNLKTQQSQHPTDALSEDLLSIIANMSGCLPYMLPPKCPNTCLANKYRPITGACNNRKMKYKPDHSETAN

SEQ ID NO: 299301 - DNA, 519 bp, Artificial Sequence
  derived and/or modified sequence
atgagagccctggccgtgctgagcgtgaccctggtgatggcctgcaccgaggccttcttccccttcatcagcagaggcaaggagctgctgtggggcaagcccgaggagagcagagtgagcagcgtgctggaggagagcaagagactggtggacaccgccatgtacgccaccatgcagagaaacctgaagaagagaggcatcctgagccccgcccagctgctgagcttcagcaagctgcccgagcccaccagcggcgtgatcgccagagccgccgagatcatggagaccagcatccaggccatgaagagaaaggtgaacctgaagacccagcagagccagcaccccaccgacgccctgagcgaggacctgctgagcatcatcgccaacatgagcggctgcctgccctacatgctgccccccaagtgccccaacacctgcctggccaacaagtacagacccatcaccggcgcctgcaacaacagagaccaccccagatggggcgccagcaacaccgcctag

SEQ ID NO: 299302 - DNA, 462 bp, Artificial Sequence
  derived and/or modified sequence
atgaacggcctgaccagcttcctggacgccagcaccgtgtacggcagcagccccgccctggagagacagctgagaaactggaccagcgccgagggcctgctgagagtgcacgccagactgagagacagcggcagagcctacctgcccttcgtgccccccagagcccccgccgcctgcgcccccgagcccggcatccccggcgagaccagaggcccctgcttcctggccggcgaccccagacagagaggccccctgcccgacggcaccgcccacgccgtggccgccagagcccagccccccggcagaggcgcccagggcccccagtgcgccctggagagaggcagaagagtgcccggcggcgcccagggcagaggcagaagcgcccccgaccaccaccccgagggcctgcacccccaggaccccggcaccagaggcctgcccgccgtgagaggcagcctgtag

SEQ ID NO: 299303 - DNA, 525 bp, Artificial Sequence
  derived and/or modified sequence
atgagagccctggccgtgctgagcgtgaccctggtgatggcctgcaccgaggccttcttccccttcatcagcagaggcaaggagctgctgtggggcaagcccgaggagagcagagtgagcagcgtgctggaggagagcaagagactggtggacaccgccatgtacgccaccatgcagagaaacctgaagaagagaggcatcctgagccccgcccagctgctgagcttcagcaagctgcccgagcccaccagcggcgtgatcgccagagccgccgagatcatggagaccagcatccaggccatgaagagaaaggtgaacctgaagacccagcagagccagcaccccaccgacgccctgagcgaggacctgctgagcatcatcgccaacatgagcggctgcctgccctacatgctgccccccaagtgccccaacacctgcctggccaacaagtacagacccatcaccggcgcctgcaacaacagaaagatgaagtacaagcccgaccacagcgagaccgccaactag

SEQ ID NO: 299304 - DNA, 519 bp, Artificial Sequence
  derived and/or modified sequence
atgcgagccttagctgtcctgagcgtcaccctggtgatggcctgtacagaagccttctttcctttcatttccagaggcaaagagctgctctggggtaagccggaggaaagccgcgtttcctctgttctcgaggagagcaagagactggtggacacagccatgtacgcaacgatgcaacgaaacctgaaaaaacgcggcatcctctcccccgcccagctgctgtctttttctaagttacctgaacctaccagcggcgtgatcgcgagggctgcggaaattatggagacatcaatccaggcgatgaaacggaaggttaatttgaaaacacagcagtcacagcacccgaccgacgccctctccgaggatttgctgtctatcatcgctaacatgtccggctgcttgccttacatgctgcctcccaaatgcccaaacacgtgcttagccaacaagtacagaccaatcaccggcgcctgcaataaccgggaccatccaagatggggcgcatctaatacagcttag

SEQ ID NO: 299305 - DNA, 462 bp, Artificial Sequence
  derived and/or modified sequence
atgaatggcctgacttctttcctggacgcaagtaccgtgtatggtagcagccccgctctagaacgccagctgcggaattggacaagcgcagaagggttgctgagggtgcatgcccgcctccgggactccgggcgcgcatatctcccctttgtaccccctcgcgcccctgcagcttgcgcacccgaacccggcattccaggcgaaacccgagggccatgttttctcgccggagatcctagacagaggggccccctgccagatgggacagcccatgccgtggctgctagagcccagcctcctgggcgaggtgcacaaggaccccagtgtgctcttgagcgaggacgcagagtacccggcggtgcccagggccgtggacgaagcgccccggaccatcatccggagggacttcatcctcaggaccctgggacccgtggcctgccggcagttagggggagtctatag

SEQ ID NO: 299306 - DNA, 525 bp, Artificial Sequence
  derived and/or modified sequence
atgcgggctcttgccgtgctctccgtcaccctagtcatggcctgtaccgaggccttcttccccttcatctctagaggtaaagagttattgtggggaaagcctgaggaatcacgtgtgtcttctgtgctcgaagagtccaagcgactggtggatactgccatgtatgcaaccatgcagcggaatctgaagaagaggggcattctaagcccagcccagctgctgagcttctctaaactccctgaaccaacaagtggtgtgatcgctagagccgctgaaatcatggaaacctctatacaagcgatgaagcgaaaggtcaatctgaaaacacagcagtcccagcatccaactgacgccctgtctgaggatctactgagtataatcgctaacatgtcgggatgcctcccttacatgcttcctcctaagtgtcctaacacctgtctggccaacaagtatcggccaatcacgggagcctgtaataatcgcaaaatgaaatataaaccggaccacagcgagactgcgaactag

SEQ ID NO: 299307 - DNA, 519 bp, Artificial Sequence
  derived and/or modified sequence
atgagggccctggccgtgctgtctgtgaccctggtgatggcctgcacagaggccttcttccccttcatcagccggggcaaggagctgctgtggggcaagccagaggagagccgggtgtcctctgtgctggaggagagcaagaggctggtggacacagccatgtatgccaccatgcagaggaacctgaagaagaggggcatcctgagccctgcccagctgctgtccttcagcaagctgcctgagcccaccagcggcgtgattgcccgggctgctgagatcatggagaccagcatccaggccatgaagaggaaggtgaacctgaagacccagcagagccagcaccccacagatgccctgtctgaggacctgctgagcatcatcgccaacatgagcggctgcctgccctacatgctgccccccaagtgccccaacacctgcctggccaacaagtaccggcccatcactggagcctgcaacaacagagaccacccccgctggggcgccagcaacacagcctag

SEQ ID NO: 299308 - DNA, 462 bp, Artificial Sequence
  derived and/or modified sequence
atgaatggcctgaccagcttcctggatgccagcacagtgtatggcagcagccctgccctggagcggcagctgaggaactggaccagcgctgagggcctgctgcgggtgcacgcccggctgcgggacagcggccgggcctacctgccctttgtgcccccccgggccccagctgcctgtgcccctgagcccggcatccctggagagacccggggcccctgcttcctggccggggacccccggcagaggggccccctgcctgatggaacagcccatgctgtggccgcccgggcccagcccccaggccgcggggcccagggcccccagtgtgccctggagcggggcagaagagtgcctgggggcgcccagggccggggccgcagcgccccagaccaccaccctgagggcctgcacccccaggaccccggcacccggggcctgcctgctgtgcggggcagcctgtag

SEQ ID NO: 299309 - DNA, 525 bp, Artificial Sequence
  derived and/or modified sequence
atgagggccctggccgtgctgtctgtgaccctggtgatggcctgcacagaggccttcttccccttcatcagccggggcaaggagctgctgtggggcaagccagaggagagccgggtgtcctctgtgctggaggagagcaagaggctggtggacacagccatgtatgccaccatgcagaggaacctgaagaagaggggcatcctgagccctgcccagctgctgtccttcagcaagctgcctgagcccaccagcggcgtgattgcccgggctgctgagatcatggagaccagcatccaggccatgaagaggaaggtgaacctgaagacccagcagagccagcaccccacagatgccctgtctgaggacctgctgagcatcatcgccaacatgagcggctgcctgccctacatgctgccccccaagtgccccaacacctgcctggccaacaagtaccggcccatcactggagcctgcaacaacaggaagatgaagtacaagccagaccacagcgagacagccaactag

SEQ ID NO: 299310 - DNA, 519 bp, Artificial Sequence
  derived and/or modified sequence
atgcgggccctggccgtgctgagcgtgaccctggtgatggcctgcacggaggctttttttccttttatctcacgcggaaaagagctgctgtggggcaagccagaagaatcccgtgtaagcagtgtcttagaggaatcaaagcggctggtggataccgcaatgtatgccacaatgcagaggaatttgaaaaagcgtggcattcttagcccagcccagctgttatcattctccaaacttcctgagcccacgagcggagtgatcgctcgtgccgcagaaatcatggagacttccatccaagccatgaagaggaaagtcaacctgaagacacagcagtcacagcatcctactgatgcactgtcagaggaccttctctccattattgccaatatgagtgggtgcttaccctacatgttgccaccaaaatgccctaacacgtgcctggccaacaaataccgccctatcacgggcgcatgtaataaccgggaccatccaagatggggcgcttctaatacagcctag

SEQ ID NO: 299311 - DNA, 462 bp, Artificial Sequence
  derived and/or modified sequence
atgaacggcctgaccagcttcctggacgccagcaccgtgtacggctcaagtcccgctctggaacgtcagctccgcaattggacatccgccgagggtcttctgcgggtgcacgcccggcttcgcgattcagggagagcctatctcccatttgtgccgccccgagcccctgcagcttgcgcccccgaacctggcattccaggcgagacaaggggcccctgctttctcgcaggggacccccgccagagagggcccctcccagacggcactgctcacgcggtggcagctcgcgcccagccaccaggtcgcggcgctcaggggccccagtgtgcgttggaaaggggtcgccgggtcccaggaggggctcaggggcggggacgaagtgcccctgaccatcatccagaggggctgcacccccaggaccccgggacacgagggcttccagccgtgcgcggaagcctgtag

SEQ ID NO: 299312 - DNA, 525 bp, Artificial Sequence
  derived and/or modified sequence
atgcgggccctggccgtgctgagcgtgaccctggtgatggcctgcaccgaggcctttttccctttcattagcagaggaaaggaactgctgtggggcaaaccagaggaatcccgggtgtcttcagttctggaagaaagtaagcgcctggtggatactgcgatgtatgcgacaatgcagagaaatctgaagaagagagggatcctaagccctgcccagttattgtcttttagcaagctcccagagcccacgtcaggcgttatagcccgggcagcggagataatggaaacatccatccaggcaatgaagcggaaagtaaatctgaaaacccagcaaagccagcacccaacagatgcgttgtctgaagatctactttctattattgcaaacatgtccggctgccttccatatatgctgccgccgaagtgccccaacacttgcctagccaacaaatataggcctatcaccggtgcatgcaataaccgtaagatgaaatacaaacccgatcactccgagacggcgaattag

SEQ ID NO: 299313 - DNA, 519 bp, Artificial Sequence
  derived and/or modified sequence
atgcgggctctggccgtcctgtcagtgaccctggtgatggcatgcacagaggcatttttcccatttataagccgtggtaaggaattgttatggggcaagccagaggagtcccgtgtctcatcagtgctggaagagtctaagaggctggtagataccgccatgtatgcaaccatgcaaagaaaccttaagaaaagaggcatactatccccagcccagttactcagtttttccaaactgcccgaaccaacgagtggggtgatcgcccgagctgccgagataatggaaacttcaattcaggctatgaagagaaaagtgaatctgaaaacccaacagtcccagcatcctactgacgccttatctgaagatcttttgagtataattgctaatatgtctggctgcttgccctatatgctgccccctaaatgtcccaatacctgcctggctaacaaatataggccaataacaggcgcatgcaacaacagagatcacccgcgttggggcgcatccaacacggcgtag

SEQ ID NO: 299314 - DNA, 525 bp, Artificial Sequence
  derived and/or modified sequence
atgagagcattagctgtgctatccgtaacactcgtcatggcctgtaccgaagcctttttcccttttattagccgcggaaaggagctgttatggggcaagcccgaggaatccagagtgagctccgtgctagaggagtcaaagagactggtcgacaccgcaatgtacgctaccatgcagagaaacctcaaaaagcggggaatcctttcgcccgctcagctattaagcttcagcaaactgcccgagcccacctctggcgtaatcgcgagagcggctgaaataatggagacatccatccaggcaatgaagcggaaagtgaatctgaagacccaacagtcccagcatcctactgatgccttgtcagaggatctgctttcgatcatcgctaatatgtcaggatgcctcccctacatgcttcctcccaaatgcccaaacacgtgcctggccaataaatacaggccgatcacgggcgcatgtaataatagaaaaatgaagtacaaacctgaccattctgagactgctaattag

SEQ ID NO: 299315 - DNA, 542 bp, Artificial Sequence
  derived and/or modified sequence
actctgtctccttccgttaattttagaatgagagcgctcgctgtgctgtctgtcacgctggttatggcctgcacagaagccttcttccccttcatctcgagagggaaagaactcctttggggaaagcctgaggagtctcgtgtctctagcgtcttggaggaaagcaagcgcctggtggacaccgccatgtacgccacgatgcagagaaacctcaagaaaagaggaatcctttctccagctcagcttctgtctttttccaaacttcctgagccaacaagcggagtgattgcccgagcagcagagataatggaaacatcaatacaagcgatgaaaagaaaagtcaacctgaaaactcaacaatcacagcatccaacggatgctttatcagaagatctgctgagcatcattgcaaacatgtctggatgtctcccttacatgctgcccccaaaatgcccaaacacttgcctggcgaacaaatacaggcccatcacaggagcttgcaacaacagagaccaccccagatggggcgcctccaacacggc

SEQ ID NO: 299316 - DNA, 1157 bp, Artificial Sequence
  derived and/or modified sequence
ggaaggcaattaaggcgcccatttcagaagagttacagccgtgaaaattactcagcagtgcagttggctgagaagaggaaaaaaggtcagaatgagagcgctcgctgtgctgtctgtcacgctggttatggcctgcacagaagccttcttccccttcatctcgagagggaaagaactcctttggggaaagcctgaggagtctcgtgtctctagcgtcttggaggaaagcaagcgcctggtggacaccgccatgtacgccacgatgcagagaaacctcaagaaaagaggaatcctttctccagctcagcttctgtctttttccaaacttcctgagccaacaagcggagtgattgcccgagcagcagagataatggaaacatcaatacaagcgatgaaaagaaaagtcaacctgaaaactcaacaatcacagcatccaacggatgctttatcagaagatctgctgagcatcattgcaaacatgtctggatgtctcccttacatgctgcccccaaaatgcccaaacacttgcctggcgaacaaatacaggcccatcacaggagcttgcaacaacagaaaaatgaaatataagcccgaccattccgaaactgccaactaacctgtttaactaggaaccttccagcaggacagaccaaataatgcgaaactgaagccagtcaaagcttttctccaatgacgtctacatccacctgcaaagcctgcccctgggtcctgcagtagagcctgaacctttctttggtttgatgcttcctgattcataaatcatgatcactcaaaaaaaactctttaaaaaatgtattgtgcctaagtttacattttaacaacctcaagaccagggcctcagccggcagcagtgagttcctgctcggcccttctgaaaggccctgctgctgtcttgggcgcctctgccccagctgctgggcgggctccactgacgctcctgggagaatctctgctgaccacacaatgacattggcactgggagctgtgatctggggacacttagatctgagctggtttctctccttctgtggtaacagctacagttttcattaagaattcacagcatctggatctaaaatctcctacgttcaaggcttcacacattgtattccaccaaaaataaaacatctgctcag

SEQ ID NO: 299317 - DNA, 42 bp, Artificial Sequence
  derived and/or modified sequence
atgctgagcagaaatgatgaggccgccagcgcccagcagtag

SEQ ID NO: 299318 - DNA, 93 bp, Artificial Sequence
  derived and/or modified sequence
atgaaaaagaagcttgtggtgctggggctactggccgtagtattagtgctggtgatagtgggactctgcctgtggctgcccagtgcgtcatag

SEQ ID NO: 299319 - protein, 333 aa, Artificial Sequence
  derived and/or modified sequence
MKLYGRDRGIFGIESWPDYEDIYKKTVEVGTFLDLPRFPDITEDCYLHPNILCMKYLMEVNLPDEMHSLTCHVVKMTGMGEVDFLTFDPIAKMAKTVKYDVQAVAIIVVVLKLLFLLDDSFEWSLSNLAEKHNEKNKKDKPWFDFRKWYQIMKKAFDEKKQKWEEARAKYLWKSEKPLYYSFVDKPVAYKKREMVVNLQKQFSTLVESTATAGKKSPSSFQFNWTEEDTDRTCFHGHSLQGVLKEKGQSLLTKNSLYWLSTQKFCRCYCTHVTTYEESNYSLSYQFILNLFSFLLRIKTSLLHEEVSLVEKKLFEKKYSVKRKKSRSKKVRRH

SEQ ID NO: 299320 - DNA, 1931 bp, Artificial Sequence
  derived and/or modified sequence
aagctcccgcggcgccgcgatggacctcgaggaggcggaagagtttaaagaacgctgtactcagtgtgctgctgtctcatggggtcttactgatgaaggcaaatattattgcacttcttgccacaatgttacagagtaccttacagattacaaagtttttggatccattatctcatttcctcctcatcactaactgtgagagcctattgatagggctcagaagttgagtgagtttgccaaagttacccaagtaccaggacttgaatagatatcaggaagttacaaacactgatcttattcctaatacccaaataaaagccctcaaccgggggcttaaaaaaaaaaacaatactgaaaaaggctgggattggtatgtgtgtgaaggtttccagtatattctttatcaacaagcagaagccttaaagaaccttggagtaggcccagagttaaagaacgatgttttacataatttttggaagcgctaccttcagaagagcaagcaggcatattgtaagaacccagtttataccactggaaggaaacctacggtattagaagataatctaagtcattcagactgggctagtgagcctgagctgctaagtgatgtcagctgtcctccttttcttgaaagtggagcggagtctcagtctgacatccacactcgaaaacctttccccgtcagcaaagcatcacaatcaggtttgttgaagaggaccatattccttacataaatgcttttcagcattttccagaacagatgaaattatatggacgtgacagaggaatctttggtatagagtcttggcctgactacgaggacatctacaaaaaaacagtagaagttggaacatttttagatttgcctcgttttccagacataactgaagactgctatcttcatcccaacatactgtgtatgaaatacttgatggaagtcaacctccctgatgaaatgcatagcttaacttgccacgtggtaaaaatgactggaatgggagaagtggattttctgacatttgatcctatagctaaaatggcaaaaactgttaagtacgatgtacaagctgtagctatcattgtggtggtattgaaactgctctttctattggatgacagtttcgagtggtctttgtctaatcttgctgaaaagcataatgaaaagaacaaaaaagataagccatggtttgatttcagaaagtggtaccaaattatgaagaaagcttttgatgagaaaaaacaaaaatgggaagaagcaagggccaagtacctgtggaaaagtgaaaagccactctactactcatttgtcgacaaaccagtagcatataaaaaaagagaaatggtggtgaatctacagaaacaatttagcacactggtcgagtcaacagcaactgctggaaaaaaaagcccttcaagttttcagttcaactggactgaagaggacactgatagaacgtgtttccatggacacagccttcagggagtcctgaaagagaaaggccaatcactgctgactaagaattcattatattggcttagtacacagaaattctgcagatgctattgtacacatgtgacaacctatgaagaatcaaattattctctgagttatcagtttatactaaatctcttctccttcctgctcagaataaagacttcccttctccatgaagaagtgagcttagttgagaagaaactttttgagaaaaaatacagtgtaaaaagaaagaaatcaagatccaagaaagtgagacgacattgagaaaatgaaatagaaactttctggaaaaatattttaatagtgataataacatcagattttaatataacattccagagaattgtggaaaatactgcatatatatgtatagactctgacacatatttacatatatatcaagtgtgcttagaaaaatgtatattgtaaagca

SEQ ID NO: 299321 - DNA, 1002 bp, Artificial Sequence
  derived and/or modified sequence
atgaagctatacggcagggacagaggaatcttcggaatagagtcgtggcccgactacgaagatatctacaagaagaccgtggaggtcggcacattcctagacctccccagattcccagatatcaccgaggactgttatctgcaccctaacatcttatgcatgaaatacctgatggaagtcaatctgccagacgaaatgcactccctgacctgccatgtcgtaaagatgaccggcatgggagaggtggactttctcacctttgacccaatcgctaaaatggctaaaacagtgaaatatgacgtgcaggccgtggcaataattgtcgtggtgttgaagctgctctttcttctagatgacagctttgaatggtctctgtctaacctagcggaaaaacataacgagaagaataaaaaagataagccatggttcgatttccgaaagtggtatcagatcatgaaaaaggccttcgatgaaaaaaaacagaaatgggaagaagcaagggcaaagtatctgtggaaatccgagaaacccctctactactctttcgttgataagccagtggcctacaagaagagagagatggttgtgaacctgcagaagcagttctcaacactcgtggagtcgacggctacggcaggcaaaaagtcaccaagctcctttcagttcaactggacagaggaagatactgaccgcacttgtttccacggccatagcctccagggcgtgctgaaagaaaaaggccagtctctcttgactaaaaacagtttgtattggttgtctacccagaagttctgtaggtgttattgcacacacgtcactacctacgaggaatctaactattcactgtcctaccagttcatccttaacctgttctccttccttctacgcattaagacttcactactacacgaggaggtcagtctggttgagaagaaactcttcgagaagaaatactctgtgaagcgcaagaagagccgcagcaagaaagtgagaagacactag

SEQ ID NO: 299322 - DNA, 1002 bp, Artificial Sequence
  derived and/or modified sequence
atgaagctgtatggccgggaccggggcatctttggaattgaatcctggccagactatgaggacatctacaagaagacagtggaggtgggcaccttcctggacctgccccgcttcccagacatcacagaggactgctacctgcaccccaacatcctgtgcatgaagtacctgatggaggtgaacctgcctgatgagatgcacagcctgacctgccacgtggtgaagatgacaggcatgggagaggtggacttcctgacctttgaccccatcgccaagatggccaagacagtgaagtatgatgtgcaggccgtggccatcatcgtggtggtgctgaagctgctcttcctgctggatgacagctttgagtggagcctgagcaacctggccgagaagcacaatgagaagaacaagaaggacaagccctggtttgacttcaggaagtggtaccagatcatgaagaaggcctttgatgagaagaagcagaagtgggaggaggcccgggccaagtacctgtggaagtctgagaagcccctgtactacagctttgtggacaagcctgtggcctacaagaagcgggagatggtggtgaacctgcagaagcagttcagcaccctggtggagagcacagccacagctgggaagaagagccccagcagcttccagttcaactggacagaggaggacacagacaggacctgcttccacggccacagcctgcagggcgtgctgaaggagaagggccagagcctgctgaccaagaacagcctgtactggctgagcacccagaagttctgccgctgctactgcacccacgtgaccacctatgaggagagcaactacagcctgagctaccagttcatcctgaacctcttctccttcctgctgcgcatcaagaccagcctgctgcacgaggaggtgtccctggtggagaagaagctgtttgagaagaagtacagcgtgaagaggaagaagagccgcagcaagaaggtgagaagacactag

SEQ ID NO: 299323 - DNA, 1002 bp, Artificial Sequence
  derived and/or modified sequence
atgaagctgtacggccgggaccggggcatcttcggcatcgagagctggcctgactatgaagacatctacaagaagaccgtggaggtgggcacttttttggatttacccagatttcctgacatcacagaggattgctatctacatccaaacatactgtgcatgaagtacctgatggaggtaaatctgcccgatgagatgcattccctgacgtgtcacgtggtgaaaatgaccggcatgggcgaggtcgatttccttaccttcgaccctattgccaagatggcgaaaaccgtaaaatacgacgttcaggctgtggccatcatcgtggtagtgctgaaactgctctttcttcttgatgacagctttgagtggtctttgtcaaatttggccgagaaacataatgagaagaacaagaaggataagccttggtttgatttccggaagtggtaccagatcatgaaaaaagcctttgatgaaaagaaacagaaatgggaggaggcacgcgcaaagtacctttggaaaagcgaaaaacccctctactactcattcgtggataagccggtcgcctataagaaacgggaaatggtggtcaacctgcagaagcagttttcaactctagtggagtccaccgctacagccggtaagaagtctccatcatcattccagttcaactggaccgaagaagacacggacagaacctgtttccatggccacagccttcagggagtcctcaaggagaaaggccagtctctacttacgaagaactcactgtattggctaagtacacagaaattctgcaggtgttattgtacccacgttacgacatacgaggaaagcaactattccctctcttatcagttcattctaaatctcttctctttccttctccgtattaagacttctctgttgcacgaagaagtatcactggtggaaaaaaaactgtttgaaaagaagtactccgtcaagagaaagaaaagcagaagcaagaaggtgcgccgtcattag

SEQ ID NO: 299324 - DNA, 1002 bp, Artificial Sequence
  derived and/or modified sequence
atgaaactgtatggtcgggatcgcggaatcttcggaattgaatcctggcccgactacgaggacatttataagaagactgttgaagtgggtacatttctggatctgccaagattccccgatatcacagaggattgctacctccatcctaacattctttgcatgaaatatctgatggaggtgaatctgccggatgagatgcactcgctgacatgtcacgttgtcaagatgaccggtatgggggaagtggactttctcacgttcgatcccatcgctaaaatggcgaagacagtgaaatacgatgtgcaggcagtggctatcatcgtagtcgtgctaaaacttctcttcctcctggacgactcatttgagtggtccctaagcaacctggccgagaaacataatgagaagaataaaaaggacaaaccctggtttgacttcaggaaatggtatcagatcatgaagaaagcattcgatgagaaaaagcaaaagtgggaggaagccagagccaaatacctgtggaagagtgaaaagcccctgtattactcgtttgtcgacaagccagtggcttataaaaagcgggagatggtcgtaaacctgcagaagcaattctctacgctggtggagtcaaccgccactgctggcaagaagagtcctagttcctttcaatttaattggactgaggaggacactgaccgcacatgcttccatggtcactctttgcagggagtgctgaaggagaaaggacagtcacttcttacaaaaaattcactctactggctgtcgactcagaaattctgcagatgttactgtactcacgtgaccacatacgaggagtccaattactccctctcataccagtttatccttaacctatttagctttcttttacgtatcaaaacctccctactccacgaagaggtgagcctggttgagaaaaaactgttcgagaagaagtatagcgtgaagagaaagaagagtaggtccaagaaagtcaggcggcattag

SEQ ID NO: 299325 - DNA, 1002 bp, Artificial Sequence
  derived and/or modified sequence
atgaagctgtacggcagagacagaggcatcttcggcatcgagagctggcccgactacgaggacatctacaagaagaccgtggaggtgggcaccttcctggacctgcccagattccccgacatcaccgaggactgctacctgcaccccaacatcctgtgcatgaagtacctgatggaggtgaacctgcccgacgagatgcacagcctgacctgccacgtggtgaagatgaccggcatgggcgaggtggacttcctgaccttcgaccccatcgccaagatggccaagaccgtgaagtacgacgtgcaggccgtggccatcatcgtggtggtgctgaagctgctgttcctgctggacgacagcttcgagtggagcctgagcaacctggccgagaagcacaacgagaagaacaagaaggacaagccctggttcgacttcagaaagtggtaccagatcatgaagaaggccttcgacgagaagaagcagaagtgggaggaggccagagccaagtacctgtggaagagcgagaagcccctgtactacagcttcgtggacaagcccgtggcctacaagaagagagagatggtggtgaacctgcagaagcagttcagcaccctggtggagagcaccgccaccgccggcaagaagagccccagcagcttccagttcaactggaccgaggaggacaccgacagaacctgcttccacggccacagcctgcagggcgtgctgaaggagaagggccagagcctgctgaccaagaacagcctgtactggctgagcacccagaagttctgcagatgctactgcacccacgtgaccacctacgaggagagcaactacagcctgagctaccagttcatcctgaacctgttcagcttcctgctgagaatcaagaccagcctgctgcacgaggaggtgagcctggtggagaagaagctgttcgagaagaagtacagcgtgaagagaaagaagagcagaagcaagaaggtgagaagacactag

SEQ ID NO: 299326 - protein, 361 aa, Artificial Sequence
  derived and/or modified sequence
MWVLTPAAFAGKLLSVFRQPLSSLWRSLVPLFCWLRATFWLLATKRRKQQLVLRGPDETKEEEEDPPLPTTPTSVNYHFTRQCNYKCGFCFHTAKTSFVLPLEEAKRGLLLLKEAGMEKINFSGGEPFLQDRGEYLGKLVRFCKVELRLPSVSIVSNGSLIRERWFQNYGEYLDILAISCDSFDEEVNVLIGRGQGKKNHVENLQKLRRWCRDYRVAFKINSVINRFNVEEDMTEQIKALNPVRWKVFQCLLIEGENCGEDALREAERFVIGDEEFERFLERHKEVSCLVPESNQKMKDSYLILDEYMRFLNCRKGRKDPSKSILDVGVEEAIKFSGFDEKMFLKRGGKYIWSKADLKLDW

SEQ ID NO: 299327 - protein, 254 aa, Artificial Sequence [sequence omitted]

SEQ ID NO: 299328 - DNA, 1086 bp, Artificial Sequence
  derived and/or modified sequence
atgtgggttcttaccccagccgccttcgccgggaaactcctgtcagtcttcagacagcctttgagcagcctgtggcggtcacttgtgcccctcttctgttggctccgagctacgttttggttgctcgccactaaacgcaggaagcagcagttagtgctgcggggcccggacgaaactaaagaggaggaggaggatccaccactgccaacaacacccacgtcagtcaattatcatttcacacggcaatgcaactataaatgtggtttttgttttcatactgccaaaacatcgtttgtgctgccgctcgaagaggccaaacggggactgttgctgttaaaggaagccgggatggagaagatcaacttctctggcggggagccattcttacaggatagaggggagtacctcgggaaattagttcgtttctgcaaggttgagctccggctacccagtgtgtctatcgtgtctaatggatccctcattcgcgagcgctggttccaaaattatggtgaatacctcgacatcctggcgatctcatgcgatagttttgatgaggaggtgaacgtgctgattggcagaggccaaggcaaaaagaaccatgtggagaatctgcaaaagttgagaagatggtgtcgggactacagggtcgccttcaagattaatagcgtgataaaccgcttcaatgtggaggaagatatgaccgaacagatcaaggctttaaacccggttagatggaaagtatttcaatgtctgctcatcgaaggggagaattgcggagaagatgccctgcgcgaggccgagcggtttgtgatcggtgacgaggagttcgagcgcttcctggaacggcacaaggaggtctcctgtctcgtgcctgaaagtaatcagaaaatgaaagacagctatctgattcttgacgagtatatgcggtttcttaactgcaggaagggaaggaaggatccatcaaagagtatattggacgtgggagttgaggaagccatcaagttcagcggcttcgacgagaagatgttcctgaagcgcggcggtaaatatatttggagtaaagccgatctcaagctcgactggtag

SEQ ID NO: 299329 - DNA, 1086 bp, Artificial Sequence
  derived and/or modified sequence
atgtgggtgctgaccccagctgcctttgctgggaagctgctgtctgtgttccggcagcccctgagcagcctgtggaggagcctggtgcccctcttctgctggctgcgggccaccttctggctgctggccaccaagaggaggaagcagcagctggtgctgcggggcccagatgagaccaaggaggaggaggaggacccccccctgcccaccacccccacctctgtgaactaccacttcacccggcagtgcaactacaagtgtggcttctgcttccacacagccaagaccagctttgtgctgcccctggaggaggccaagaggggcctgctgctgctgaaggaggccggcatggagaagatcaacttctctggaggagagcccttcctgcaggacagaggagagtacctgggcaagctggtgcgcttctgcaaggtggagctgcggctgcccagcgtgtccatcgtgtccaatggcagcctcatccgggagcgctggttccagaactatggagagtacctggacatcctggccatcagctgtgacagctttgatgaggaggtgaatgtgctgattggccggggccagggcaagaagaaccacgtggagaacctgcagaagctgcggcgctggtgccgggactacagagtggccttcaagatcaacagcgtcatcaaccgcttcaacgtggaggaggacatgacagagcagatcaaggccctgaaccctgtgcgctggaaggtgttccagtgcctgctgattgaaggagagaactgtggggaggatgccctgcgggaggccgagagatttgtgattggagatgaggagtttgagcgcttcctggagcggcacaaggaggtgtcctgcctggtgcctgagagcaaccagaagatgaaggacagctacctgatcctggatgagtacatgaggttcctgaactgcaggaaaggaaggaaggaccccagcaagagcatcctggatgtgggcgtggaggaggccatcaagttcagcggctttgatgagaagatgttcctgaagagaggaggcaagtacatctggagcaaggctgacctgaagctggactggtag

SEQ ID NO: 299330 - DNA, 1086 bp, Artificial Sequence
  derived and/or modified sequence
atgtgggtgctgacccccgccgccttcgccggcaagctgctgagcgtgttccgccagccattgtcgtctttatggaggtcacttgtccccctattttgttggcttagggcaactttttggctgctggcaacgaagcgaagaaaacagcagctggttctgcgcggacctgatgagacaaaggaggaggaggaagacccccccctacccacaaccccaacatctgtgaactatcatttcacgcggcagtgtaactataagtgtggcttttgttttcacacagccaagactagcttcgtgctgccactcgaagaagctaagagaggtttgctgctcctgaaagaagctggtatggaaaagatcaacttcagtggcggcgaacctttcctacaggacaggggcgagtatctgggaaaactagtgcgattctgtaaagtggagctccgattgcctagcgtctctatcgtcagcaatgggtcactcatccgcgagcgatggttccagaactacggtgaataccttgacatactggcgattagctgcgattctttcgatgaggaggttaacgtgctcattggacgaggtcaaggaaagaagaatcacgtggaaaacctgcagaaactgcgccgttggtgtagagattaccgcgtggccttcaaaatcaatagcgtgatcaatcgcttcaacgtagaagaggatatgacggagcaaataaaagcactgaatcctgtccgctggaaggtttttcagtgcttgctgattgagggagagaactgcggagaggacgcactgcgagaggctgaaagattcgtaatcggagacgaagagttcgagagattcctggagagacacaaggaagtgtcttgcttagtgcctgagtccaatcagaaaatgaaggacagttacctaattctcgacgagtacatgcgctttctgaactgtagaaagggtcgaaaagatccatcaaagagcatactagacgtcggggtagaagaggctatcaagttctcaggattcgacgagaagatgttcctgaaacgtggaggcaagtacatttggtctaaggccgacctgaaactggactggtag

SEQ ID NO: 299331 - DNA, 1086 bp, Artificial Sequence
  derived and/or modified sequence
atgtgggtcctgactcctgcagcgttcgccggaaagctgctgtccgtgtttcggcagccactttcatctctgtggagatctctcgtgccactgttttgttggctaagggccacgttctggctgctggccactaaaaggcgcaaacagcagctggtactgagaggccctgacgaaacgaaagaggaagaggaggaccctccactccccaccacacccaccagtgtgaactaccacttcacccggcagtgcaattataaatgcgggttttgtttccacacagccaagacttcatttgttctgccgctggaggaagctaagaggggtctgctcttgctgaaagaggccggaatggaaaaaatcaacttctctggaggcgagcctttcctgcaggatcgaggcgaatatttagggaaactcgtgcgattttgcaaggttgagctgagactgcctagcgtttcaattgtttcaaacggttcattaatccgggagcgatggtttcagaattacggagaatacctcgacatccttgccatctcatgtgattctttcgacgaggaggtgaatgtgctgatcggcaggggccagggaaaaaaaaaccacgtcgagaatctgcagaagcttcgaaggtggtgtagagactatagggtcgcgtttaagatcaactcggttatcaataggtttaatgtggaggaggatatgacagaacaaattaaggcacttaaccctgtgagatggaaggtgtttcaatgcctgctcatagaaggagagaactgtggcgaggatgcactgcgggaagcagagcgattcgtgatcggtgatgaagaattcgagcgatttctggagaggcacaaagaggtaagctgcctcgttcctgagagtaaccagaagatgaaggactcctacctgatcctggacgaatatatgcgcttcctgaattgtcggaagggcaggaaagatcccagcaagtccatcttagacgtgggggtggaggaagccattaagttttcaggttttgacgagaagatgttcctgaaacgcggaggaaagtacatatggagcaaggctgacctgaaactcgactggtag

SEQ ID NO: 299332 - DNA, 3519 bp, Artificial Sequence
  derived and/or modified sequence
aactcagctgagtgttagtcaaagaaggtgtgtcctgctccccaatgacaggttgctcagagactgctgatttccatccctatataaagagagtccctggcatacagagactgctctgctccaggcatctgccacaatgtgggtgcttacacctgctgcttttgctgggaagctcttgagtgtgttcaggcaacctctgagctctctgtggaggagcctggtcccgctgttctgctggctgagggcaaccttctggctgctagctaccaagaggagaaagcagcagctggtcctgagagggccagatgagaccaaagaggaggaagaggaccctcctctgcccaccaccccaaccagcgtcaactatcacttcactcgccagtgcaactacaaatgcggcttctgtttccacacagccaaaacatcctttgtgctgccccttgaggaagcaaagagaggattgcttttgcttaaggaagctggtatggagaagatcaacttttcaggtggagagccatttcttcaagaccggggagaatacctgggcaagttggtgaggttctgcaaagtagagttgcggctgcccagcgtgagcatcgtgagcaatggaagcctgatccgggagaggtggttccagaattatggtgagtatttggacattctcgctatctcctgtgacagctttgacgaggaagtcaatgtccttattggccgtggccaaggaaagaagaaccatgtggaaaaccttcaaaagctgaggaggtggtgtagggattatagagtcgctttcaagataaattctgtcattaatcgtttcaacgtggaagaggacatgacggaacagatcaaagcactaaaccctgtccgctggaaagtgttccagtgcctcttaattgagggtgagaattgtggagaagatgctctaagagaagcagaaagatttgttattggtgatgaagaatttgaaagattcttggagcgccacaaagaagtgtcctgcttggtgcctgaatctaaccagaagatgaaagactcctaccttattctggatgaatatatgcgctttctgaactgtagaaagggacggaaggacccttccaagtccatcctggatgttggtgtagaagaagctataaaattcagtggatttgatgaaaagatgtttctgaagcgaggaggaaaatacatatggagtaaggctgatctgaagctggattggtagagcggaaagtggaacgagacttcaacacaccagtgggaaaactcctagagtaactgccattgtctgcaatactatcccgttggtatttcccagtggctgaaaacctgattttctgctgcacgtggcatctgattacctgtggtcactgaacacacgaataacttggatagcaaatcctgagacaatggaaaaccattaactttacttcattggcttataaccttgttgttattgaaacagcacttctgtttttgagtttgttttagctaaaaagaaggaatacacacaggaataatgaccccaaaaatgcttagataaggcccctatacacaggacctgacatttagctcaatgatgcgtttgtaagaaataagctctagtgatatctgtgggggcaaaatttaatttggatttgattttttaaaacaatgtttactgcgatttctatatttccattttgaaactatttcttgttccaggtttgttcatttgacagagtcagtattttttgccaaatatccagataaccagttttcacatctgagacattacaaagtatctgcctcaattatttctgctggttataatgcttttttttttttgcctttatgccattgcagtcttgtactttttactgtgatgtacagaaatagtcaacagatgtttccaagaacatatgatatgataatcctaccaattttcaagaagtctctagaaagagataacacatggaaagacggtgtggtgcagcccagcccacggtggctgttccatgaatgctggctacctatgtgtgtggtacctgttgtgtccctttctcttcaaagatcctgagcaaaacaaagatacgctttccatttgatgatggagttgacatggaggcagtgcttgcattgctttgttcgcctatcatctggccacatgaggctgtcaagcaaaagaataggagtgtagttgagtagctggttggccctacatctctgagaagtgacggcacactgggttggcataagatatcctaaaatcacgctggaaccttgggcaaggaagaatgtgagcaagagtagagagagtgcctggatttcatgtcagtgaagccaagtcaccatatcatatttttgaatgaactctgagtcagttgaaatagggtaccatctaggtcagtttaagaagagtcagctcagagaaagcaagcataagggaaaatgtcacgtaaactagatcagggaacaaaatcctctccttgtggaaatatcccatgcagtttgttgatacaacttagtatcttattgcctaaaaaaaaatttcttatcattgtttcaaaaaagcaaaatcatggaaaatttttgttgtccaggcaaataaaaggtcattttaatttagctgcaatttcagtgttcctcactaggtggcatttaaatgtcgcctgatgtcattaagcaccatccaaaaagtctgcttcataatctattttcaagacttggtgattctgaaagttttggtttttgtgactttgtttctcaggaaaaaaaatattcctacttaaattttaagtctataattcaatttaaatatgtgtgtgtctcatccaggataggataggttgtcttctattttccattttacctatttactttttttgtaagaaaagagaaaaatgaattctaaagatgttccccatgggttttgattgtgtctaagctatgatgaccttcatataatcagcataaacataaaacaaattttttacttaacatgagtgcactttactaatcctcatggcacagtggctcacgcctgtaatcccagcacttgggaggacaatgtgggtggatcacgaggtcaggagttcgagaacagcctggccaacatggtgaaaccccgtctccactaaaaatacaaaaattagccaggcatggtggcgtacacttgtaattccagctactcaagaggctgaggcaggaggattgcttgaaccctgaaggcagaggttacagagccaagatagcgccactgcactccagcctggatgacagagcaagactccgtctcaaaaaaaaaaaaaaaaaaaagcaagagagttcaactaagaaaggtcacatatgtgaaagcccaaggacactgtttgatatacagcaggtattcaatcagtgttatttgaaaccaaatctgaatttgaagtttgaatcttctgagttggaatgaatttttttctagctgagggaaactgtatttttctttccccaaagaggaatgtaatgtaaagtgaaataaaactataagctatgttaaataca

SEQ ID NO: 299333 - DNA, 1086 bp, Artificial Sequence
  derived and/or modified sequence
atgtgggtgctgacccccgccgccttcgccggcaagctgctgagcgtgttcagacagcccctgagcagcctgtggagaagcctggtgcccctgttctgctggctgagagccaccttctggctgctggccaccaagagaagaaagcagcagctggtgctgagaggccccgacgagaccaaggaggaggaggaggacccccccctgcccaccacccccaccagcgtgaactaccacttcaccagacagtgcaactacaagtgcggcttctgcttccacaccgccaagaccagcttcgtgctgcccctggaggaggccaagagaggcctgctgctgctgaaggaggccggcatggagaagatcaacttcagcggcggcgagcccttcctgcaggacagaggcgagtacctgggcaagctggtgagattctgcaaggtggagctgagactgcccagcgtgagcatcgtgagcaacggcagcctgatcagagagagatggttccagaactacggcgagtacctggacatcctggccatcagctgcgacagcttcgacgaggaggtgaacgtgctgatcggcagaggccagggcaagaagaaccacgtggagaacctgcagaagctgagaagatggtgcagagactacagagtggccttcaagatcaacagcgtgatcaacagattcaacgtggaggaggacatgaccgagcagatcaaggccctgaaccccgtgagatggaaggtgttccagtgcctgctgatcgagggcgagaactgcggcgaggacgccctgagagaggccgagagattcgtgatcggcgacgaggagttcgagagattcctggagagacacaaggaggtgagctgcctggtgcccgagagcaaccagaagatgaaggacagctacctgatcctggacgagtacatgagattcctgaactgcagaaagggcagaaaggaccccagcaagagcatcctggacgtgggcgtggaggaggccatcaagttcagcggcttcgacgagaagatgttcctgaagagaggcggcaagtacatctggagcaaggccgacctgaagctggactggtag

SEQ ID NO: 299334 - DNA, 765 bp, Artificial Sequence
  derived and/or modified sequence
atgctgcattcttctcattatcctgggatggagaaaatcaatttcagcggcggcgagcccttcctgcaggaccggggggagtacctggggaagctggtgaggttctgcaaagttgaactgcgcttacccagtgttagcattgtcagcaatggaagcttgatccgtgagcggtggttccagaattatggagagtacttggacatactggcaatctcctgcgatagcttcgacgaagaggtcaacgtcctgatcggcaggggccaggggaagaaaaatcacgtggagaatctgcaaaagttacggaggtggtgtcgagactaccgggtcgcatttaagattaacagcgtcatcaatcggttcaatgtggaagaagacatgactgaacagataaaagctctgaatcccgtacgttggaaagtgttccagtgtctgttaatagaaggcgagaactgtggtgaggatgcactgcgagaagcagaacgttttgtaatcggcgacgaggagttcgagaggtttctcgagcgccacaaagaggtctcctgtctagttcccgagtccaaccagaaaatgaaagactcataccttatcctggatgagtatatgagattcctgaattgccggaaggggcggaaggacccctctaagagcattttagacgtgggagttgaggaagctattaagtttagtgggttcgacgagaagatgttcctaaagcgcggggggaagtatatttggtcaaaagctgatctcaagctcgactggtag

SEQ ID NO: 299335 - DNA, 765 bp, Artificial Sequence
  derived and/or modified sequence
atgctgcacagcagccactacccaggcatggagaagatcaacttcagcggcggggagcccttcctgcaggacagaggagagtacctgggcaagctggtgcgcttctgcaaggtggagctgcggctgcccagcgtgtccatcgtgtccaatggcagcctcatccgggagcgctggttccagaactacggggagtacctggacatcctggccatcagctgtgacagctttgatgaggaggtgaatgtgctgattggccggggccagggcaagaagaaccacgtggagaacctgcagaagctgcggcgctggtgccgggactacagagtggccttcaagatcaacagcgtcatcaaccgcttcaacgtggaggaggacatgacagagcagatcaaggccctgaaccctgtgcgctggaaggtgttccagtgcctgctgattgaaggagagaactgtggagaagatgccctgcgggaggccgagagatttgtgattggagatgaggagtttgagcgcttcctggagcggcacaaggaggtgtcctgcctggtgcctgagagcaaccagaagatgaaggacagctacctgatcctggatgagtacatgaggttcctgaactgcaggaagggcaggaaggaccccagcaagagcatcctggatgtgggcgtggaggaggccatcaagttcagcggctttgatgagaagatgttcctgaagaggggcggcaagtacatctggagcaaggctgacctgaagctggactggtag

SEQ ID NO: 299336 - DNA, 765 bp, Artificial Sequence
  derived and/or modified sequence
atgctgcacagcagccactaccccggcatggagaagatcaacttctctggtggagaaccctttctgcaagacaggggggaatatctgggtaagctggtacggttctgcaaagttgagttaagactccccagtgttagcatcgtatcaaacgggtccctgatcagagaaaggtggttccagaactacggggaatatctggatatcttggccatttcgtgtgacagctttgacgaagaggtcaatgttcttattggccgcggacagggcaagaaaaatcacgtggaaaatctgcagaagcttcgcagatggtgtagagactatcgagtggcctttaaaattaactcagtgatcaatagattcaacgtagaagaggatatgacagagcagattaaggccctgaatcccgtcagatggaaagttttccaatgtttgctgatagaaggagaaaactgcggcgaagacgccctgagagaggcagagagattcgtgattggggatgaggagtttgaacgatttttagagagacacaaggaagttagctgtctggtgcctgaatcaaatcagaaaatgaaggattcctatctgattctggacgagtacatgcgcttcctaaactgtagaaagggacgcaaggacccatctaaatcaatccttgatgtgggagtggaggaggccatcaaattctccgggttcgacgagaagatgttcctgaagcgggggggcaagtatatttggagcaaggctgacctaaagctggattggtag

SEQ ID NO: 299337 - DNA, 765 bp, Artificial Sequence
  derived and/or modified sequence
atgctccactcttcccattaccccggaatggagaagattaatttttctggcggtgagccgttcctgcaggatcgtggcgagtacctggggaagcttgtccgcttttgtaaagtggaactgcggctccctagcgtttctattgtaagcaatggcagcctaattagagaacgctggttccagaactacggggagtatttggatatcctggccatctcctgcgacagtttcgatgaggaagtaaacgtcctgattggccgaggacagggcaaaaagaatcacgtggagaatttgcagaagctacggaggtggtgtcgtgactaccgggtggccttcaaaatcaactccgtgataaatagatttaacgttgaggaggacatgacggagcaaatcaaggctctgaatccggtcaggtggaaggtctttcagtgcttgttgattgaaggagagaactgcggcgaggacgccctgagggaagcagagcgcttcgtaatcggcgatgaagaatttgaacgattcctggagcggcacaaggaggtcagctgcctcgtccccgaatccaatcagaagatgaaggatagctacctgattctggatgagtatatgagatttttgaattgccgaaagggcagaaaagatcctagtaagtcaattttagacgtgggagtagaggaggctattaaatttagtggcttcgacgagaaaatgtttcttaagcggggagggaaatacatatggagcaaagcagatctcaagctggattggtag

SEQ ID NO: 299338 - DNA, 1355 bp, Artificial Sequence
  derived and/or modified sequence
gtccttgtcttcctgtctttcctagagtaccttctcaactagtaacttcagcaacatctctagcttctttccctccttgtttaactttttaacaaaagcatagcatacatgcaccagattacacatattctggatgtgcaccctgatgaatttcacaaagcaatcacagccaggtaaatagcctgcagattcagagagaaagcatcaccagcgccagaagtgcatgctgcactccagccactaccctggtatggagaagatcaacttttcaggtggagagccatttcttcaagaccggggagaatacctgggcaagttggtgaggttctgcaaagtagagttgcggctgcccagcgtgagcatcgtgagcaatggaagcctgatccgggagaggtggttccagaattatggtgagtatttggacattctcgctatctcctgtgacagctttgacgaggaagtcaatgtccttattggccgtggccaaggaaagaagaaccatgtggaaaaccttcaaaagctgaggaggtggtgtagggattatagagtcgctttcaagataaattctgtcattaatcgtttcaacgtggaagaggacatgacggaacagatcaaagcactaaaccctgtccgctggaaagtgttccagtgcctcttaattgagggtgagaattgtggagaagatgctctaagagaagcagaaagatttgttattggtgatgaagaatttgaaagattcttggagcgccacaaagaagtgtcctgcttggtgcctgaatctaaccagaagatgaaagactcctaccttattctggatgaatatatgcgctttctgaactgtagaaagggacggaaggacccttccaagtccatcctggatgttggtgtagaagaagctataaaattcagtggatttgatgaaaagatgtttctgaagcgaggaggaaaatacatatggagtaaggctgatctgaagctggattggtagagcggaaagtggaacgagacttcaacacaccagtgggaaaactcctagagtaactgccattgtctgcaatactatcccgttggtatttcccagtggctgaaaacctgattttctgctgcacgtggcatctgattacctgtggtcactgaacacacgaataacttggatagcaaatcctgagacaatggaaaaccattaactttacttcattggcttataaccttgttgttattgaaacagcacttctgtttttgagtttgttttagctaaaaagaaggaatacacacaggaataatgaccccaaaaatgcttagataaggcccctatacacaggacctgacatttagctcaatgatgcgtttgtaag

SEQ ID NO: 299339 - DNA, 765 bp, Artificial Sequence
  derived and/or modified sequence
atgctgcacagcagccactaccccggcatggagaagatcaacttcagcggcggcgagcccttcctgcaggacagaggcgagtacctgggcaagctggtgagattctgcaaggtggagctgagactgcccagcgtgagcatcgtgagcaacggcagcctgatcagagagagatggttccagaactacggcgagtacctggacatcctggccatcagctgcgacagcttcgacgaggaggtgaacgtgctgatcggcagaggccagggcaagaagaaccacgtggagaacctgcagaagctgagaagatggtgcagagactacagagtggccttcaagatcaacagcgtgatcaacagattcaacgtggaggaggacatgaccgagcagatcaaggccctgaaccccgtgagatggaaggtgttccagtgcctgctgatcgagggcgagaactgcggcgaggacgccctgagagaggccgagagattcgtgatcggcgacgaggagttcgagagattcctggagagacacaaggaggtgagctgcctggtgcccgagagcaaccagaagatgaaggacagctacctgatcctggacgagtacatgagattcctgaactgcagaaagggcagaaaggaccccagcaagagcatcctggacgtgggcgtggaggaggccatcaagttcagcggcttcgacgagaagatgttcctgaagagaggcggcaagtacatctggagcaaggccgacctgaagctggactggtag

SEQ ID NO: 299340 - DNA, 3891 bp, Artificial Sequence
  derived and/or modified sequence
atgccatttgttaataaacaatttaattataaagatcctgtaaatggtgttgatattgcttatataaaaattccaaatgcaggacaaatgcaaccagtaaaagcttttaaaattcataataaaatatgggttattccagaaagagatacatttacaaatcctgaagaaggagatttaaatccaccaccagaagcaaaacaagttccagtttcatattatgattcaacatatttaagtacagataatgaaaaagataattatttaaagggagttacaaaattatttgagagaatttattcaactgatcttggaagaatgttgttaacatcaatagtaaggggaataccattttggggtggaagtacaatagatacagaattaaaagttattgatactaattgtattaatgtgatacaaccagatggtagttatagatcagaagaacttaatctagtaataataggaccctcagctgatattatacagtttgaatgtaaaagctttggacatgaagttttgaatcttacgcgaaatggttatggctctactcaatacattagatttagcccagattttacatttggttttgaggagtcacttgaagttgatacaaatcctcttttaggtgcaggcaaatttgctacagatccagcagtaacattagcacatgaacttatacatgctggacatagattatatggaatagcaattaatccaaatagggtttttaaagtaaatactaatgcctattatgaaatgagtgggttagaagtaagctttgaggaacttagaacatttgggggacatgatgcaaagtttatagatagtttacaggaaaacgaatttcgtctatattattataataagtttaaagatatagcaagtacacttaataaagctaaatcaatagtaggtactactgcttcattacagtatatgaaaaatgtttttaaagagaaatatctcctatctgaagatacatctggaaaattttcggtagataaattaaaatttgataagttatacaaaatgttaacagagatttacacagaggataattttgttaagttttttaaagtacttaacagaaaaacatatttgaattttgataaagccgtatttaagataaatatagtacctaaggtaaattacacaatatatgatggatttaatttaagaaatacaaatttagcagcaaactttaatggtcaaaatacagaaattaataatatgaattttactaaactaaaaaattttactggattgtttgaattttataagttgctatgtgtaagagggataataacttctaaaactaaatcattagataaaggatacaataaggcattaaatgatttatgtatcaaagttaataattgggacttgttttttagtccttcagaagataattttactaatgatctaaataaaggagaagaaattacatctgatactaatatagaagcagcagaagaaaatattagtttagatttaatacaacaatattatttaacctttaattttgataatgaacctgaaaatatttcaatagaaaatctttcaagtgacattataggccaattagaacttatgcctaatatagaaagatttcctaatggaaaaaagtatgagttagataaatatactatgttccattatcttcgtgctcaagaatttgaacatggtaaatctaggattgctttaacaaattctgttaacgaagcattattaaatcctagtcgtgtttatacatttttttcttcagactatgtaaagaaagttaataaagctacggaggcagctatgtttttaggctgggtagaacaattagtatatgattttaccgatgaaactagcgaagtaagtactacggataaaattgcggatataactataattattccatatataggacctgctttaaatataggtaatatgttatataaagatgattttgtaggtgctttaatattttcaggagctgttattctgttagaatttataccagagattgcaatacctgtattaggtacttttgcacttgtatcatatattgcgaataaggttctaaccgttcaaacaatagataatgctttaagtaaaagaaatgaaaaatgggatgaggtctataaatatatagtaacaaattggttagcaaaggttaatacacagattgatctaataagaaaaaaaatgaaagaagctttagaaaatcaagcagaagcaacaaaggctataataaactatcagtataatcaatatactgaggaagagaaaaataatattaattttaatattgatgatttaagttcgaaacttaatgagtctataaataaagctatgattaatataaataaatttttgaatcaatgctctgtttcatatttaatgaattctatgatcccttatggtgttaaacggttagaagattttgatgctagtcttaaagatgcattattaaagtatatatatgataatagaggaactttaattggtcaagtagatagattaaaagataaagttaataatacacttagtacagatataccttttcagctttccaaatacgtagataatcaaagattattatctacatttactgaatatattaagaatattattaatacttctatattgaatttaagatatgaaagtaatcatttaatagacttatctaggtatgcatcaaaaataaatattggtagtaaagtaaattttgatccaatagataaaaatcaaattcaattatttaatttagaaagtagtaaaattgaggtaattttaaaaaatgctattgtatataatagtatgtatgaaaattttagtactagcttttggataagaattcctaagtattttaacagtataagtctaaataatgaatatacaataataaattgtatggaaaataattcaggatggaaagtatcacttaattatggtgaaataatctggactttacaggatactcaggaaataaaacaaagagtagtttttaaatacagtcaaatgattaatatatcagattatataaacagatggatttttgtaactatcactaataatagattaaataactctaaaatttatataaatggaagattaatagatcaaaaaccaatttcaaatttaggtaatattcatgctagtaataatataatgtttaaattagatggttgtagagatacacatagatatatttggataaaatattttaatctttttgataaggaattaaatgaaaaagaaatcaaagatttatatgataatcaatcaaattcaggtattttaaaagacttttggggtgattatttacaatatgataaaccatactatatgttaaatttatatgatccaaataaatatgtcgatgtaaataatgtaggtattagaggttatatgtatcttaaagggcctagaggtagcgtaatgactacaaacatttatttaaattcaagtttgtatagggggacaaaatttattataaaaaaatatgcttctggaaataaagataatattgttagaaataatgatcgtgtatatattaatgtagtagttaaaaataaagaatataggttagctactaatgcatcacaggcaggcgtagaaaaaatactaagtgcattagaaatacctgatgtaggaaatctaagtcaagtagtagtaatgaagtcaaaaaatgatcaaggaataacaaataaatgcaaaatgaatttacaagataataatgggaatgatataggctttataggatttcatcagtttaataatatagctaaactagtagcaagtaattggtataatagacaaatagaaagatctagtaggactttgggttgctcatgggaatttattcctgtagatgatggatggggagaaaggccactgtaa

SEQ ID NO: 299341 - protein, 457 aa, Artificial Sequence
  derived and/or modified sequence
MGNSYAGQLKTTRFEEVLHNSIEASLRSNNLVPRPIFSQLYLEAEQQLAALEGGSRVDNEEEEEEGEGGLETNGPPNPFQLHPLPEGCCTTDGFCQAGKDLRLVSISNEPMDVPAGFLLVGVKSPSLPDHLLVCAVDKRFLPDDNGHNALLGFSGNCVGCGKKGFCYFTEFSNHINLKLTTQPKKQKHLKYYLVRNAQGTLTKGPLICWKGSEFRSRQIPASTCSSSLFPALESTAAFPSEPVPGTNPSILMGAQQAGPASDHPSLNAAMGPAVFNGKDSPKCQQLAKNNLLALPRPSALGILSNSGPPKKRHKGWSPESPSAPDGGCPQGGGNRAKYESAGMSCVPQVGLVGPASVTFPVVASGEPVSVPDNLLKICKAKPVIFKGHGNFPYLCGNLNDVVVSPLLYTCYQNSQSVSRAYEQYGASAIQPISEEMQLLLTVYYLVQLAHQIRNPDV

SEQ ID NO: 299342 - DNA, 1374 bp, Artificial Sequence
  derived and/or modified sequence
atgggaaatagttacgccggtcaacttaagactacgcgcttcgaggaagtcctacacaattcgatcgaggccagcctccgttcaaataatttagtgcctcgtccaatcttttcccagctgtacttagaggccgagcagcagcttgctgccctggagggagggtcccgcgtggataatgaagaagaagaggaagagggcgagggaggactcgaaaccaatggtcctccaaacccttttcaattgcaccccttgccagaaggttgctgcacgacagacgggttctgccaggctggaaaagatcttaggctggtgtctatttcaaatgagcccatggacgtaccagctggtttcctgctggtgggggtcaaatctcccagccttcccgaccacctgctggtgtgcgccgttgacaagcgctttctgcctgatgataacgggcataacgccctgctggggttcagcggcaactgtgtaggctgcggaaaaaagggcttctgttactttaccgagttctctaaccatataaatctgaagttaactacacagcctaagaagcagaagcatctcaagtactatctggtacggaacgcacagggaactcttaccaaaggacctctgatctgttggaagggcagcgaattcaggagccgtcagatcccggcctcgacctgttcctctagtctgttcccggccttggaatctactgctgccttcccctcggagccggtccctggcacaaacccctctattctaatgggagcacaacaggccgggcctgcctctgaccatccttctctgaatgccgcgatgggcccagcagtgttcaacggtaaggattcgcccaaatgccagcagttagcgaagaacaacctgctggctttgccacggccctcggctctgggtatacttagtaatagcggcccacctaaaaagcgacacaaggggtggagtcctgagtcgccctcagcacccgacggaggctgtccccaaggcggcgggaatcgggctaaatatgagtccgccggaatgtcgtgtgtgccccaggtggggctcgtaggccccgcatccgtgacttttcctgttgtggcttccggtgagcctgtgagtgtgcccgataatctgttgaagatctgtaaggccaaaccagttatcttcaaagggcacgggaattttccgtatctgtgcggtaacctcaatgacgtggttgtaagcccccttctctacacatgctaccagaactcccaatctgtttctagggcgtacgaacagtacggcgccagcgccattcaaccaatatctgaagaaatgcagcttctactgacagtgtactatctggtccaactcgcgcaccaaatcagaaaccctgatgtctag

SEQ ID NO: 299343 - DNA, 2347 bp, Artificial Sequence
  derived and/or modified sequence
gaaagaatcaaagcgcacatcttgtactttgatgcccataggaagggctctcctctggcccctctggctttgtttggagcagaaaacaacaaactgcagctgaggacagccaccctttcttcgtctctgctgagcgaaggctacacggcccttcctccttgcagctgtttcaccttctaccttgcgtggagccaggcttttgcaccgaatctgagatgccattttaaacagaagactccatcctcttgaagatgggaaattcttacgctggacagctgaagacgacacgctttgaagaggtcttgcacaattccatcgaggcatccctgcggtccaacaacctggtgcccaggcccatcttttcccagctgtacctggaagctgagcagcagcttgccgctctagaaggtggtagccgagtggacaatgaggaagaggaagaagagggagaaggagggctggaaacaaatggccccccaaaccctttccagctgcaccctctgcctgaaggatgctgtaccacagacgggttttgccaggccgggaaggacctgcgccttgtctccatttccaacgagcccatggatgtccctgcgggctttctcctcgtgggggtcaagtcccccagcctgccggaccatctcctggtgtgcgccgttgacaagaggttcttgccagatgacaatggccacaatgctcttcttggtttctctgggaattgtgttggctgtggaaagaaaggcttctgttacttcacggaattctccaatcatataaatctgaaactgaccactcaacccaagaagcagaaacacttgaagtattacctggtccgtaatgcacaagggactctaaccaaaggacctttaatctgttggaaaggctcagagtttagaagccggcagatccccgccagtacttgttccagttccctcttcccagccctggagagcacggctgccttccccagcgagcccgttcctgggacgaaccccagcatcctgatgggagctcagcaggcaggaccagcttctgatcacccctcactaaacgcagcaatgggtccggctgttttcaacggcaaagattccccgaagtgccaacaactggcaaagaataacctgttggccctgccgcgaccatcggctttaggtatcttgtcaaactccgggccccccaaaaaacgccacaaagggtggtctccagaatctccatcagctccagatggtggctgcccccaaggtggtgggaacagagctaagtatgagagcgcaggcatgtcctgcgtgccgcaggttggcttggtgggaccagcttcagtcacctttccagtggtggcctctggagaaccagtgtctgttcctgacaacttgctgaaaatatgcaaggccaagccagtgatatttaaaggccatgggaacttcccttacctctgtgggaacctgaatgacgtcgtggtcagccccctcttgtacacgtgctaccagaattcccagtctgtctcacgggcatacgagcagtacggcgcctctgccatccagcccatctccgaggagatgcagctcctgcttaccgtctactacctggtccagctggcacatcaaatacgaaatccggacgtataaaccagacaattcataaaagagaaaataccagaaggaaacaaatattgaaaagtattcagtctcactcatcatcaaagacatgcaaatcacaaatcaagtcatctttttctgaattaataacccaaatgatggtacccagtggtgcttaggtgcggtaaaaccagcgcttgtccgatgcaccgttcgcgtggtaaactgacgcattcaggctcttgggaagcaatctgatgatatgtagtagctggttctgtaaatccacctttgagaatttaggcgaaggaagtaacgttctatatgtcaagatgtgcattgcagagggatttataaaggtgaatatttggaagaaataagagaatccacaatagagaccttgctaagtaaacggtggtgctcacgtatgatgggacattatggacacactaacagcactctttatgttggctgaaaatggcactgaaactgatgatagggtcatggttaaggaaagaatgcaagacccaaagtttatactgacaatcattgcagctatttgtaaggacagttttaatactaattccagcaatacatgtttttattccctgtcctggagtaggagaaagcctatattcccaggctgaatgttctacacatttaccactgtatatgcacatagggacagtgtaacctgtctataccaccgtagttccagtcctaactttctgaattctgtttaaagaccttct

SEQ ID NO: 299344 - DNA, 1374 bp, Artificial Sequence
  derived and/or modified sequence
atgggcaacagctatgccggccagctgaagaccaccaggtttgaggaggtgctgcacaacagcattgaggccagcctgcggagcaacaacctggtgccccggcccatcttcagccagctgtacctggaggccgagcagcagctggccgccctggagggcggcagccgggtggacaatgaggaggaggaggaggagggggagggcggcctggagaccaatggaccacccaaccccttccagctgcaccccctgcctgagggctgctgcaccacagatggcttctgccaggccggcaaggacctgcggctggtgtccatcagcaatgagcccatggatgtgcctgctggcttcctgctggtgggcgtgaagagccccagcctgcctgaccacctgctggtgtgtgctgtggacaagcgcttcctgcctgatgacaatggccacaatgccctgctgggcttcagcggcaactgtgtgggctgtgggaagaagggcttctgctacttcacagagttcagcaaccacatcaacctgaagctgaccacccagcccaagaagcagaagcacctgaagtactacctggtgagaaatgcccagggcaccctgaccaagggccccctcatctgctggaagggcagcgagttccgcagccggcagatcccagccagcacctgcagcagcagcctcttccctgccctggagagcacagctgccttccccagcgagcctgtgcccggcaccaaccccagcatcctgatgggcgcccagcaggccggccctgccagtgaccaccccagcctgaatgctgccatgggccctgctgtgttcaacgggaaggacagccccaagtgccagcagctggccaagaacaacctgctggccctgccccggcccagcgccctgggcatcctgagcaacagcggcccccccaagaagaggcacaagggctggagccctgagagccccagcgccccagatggcggctgcccccagggcggcggcaacagagccaagtatgagagcgctggcatgagctgtgtgccccaggtgggcctggtgggccctgcctctgtgaccttccctgtggtggccagcggggagcctgtgtctgtgcctgacaacctgctgaagatctgcaaggccaagcctgtgatcttcaagggccacggcaacttcccctacctgtgtggcaacctgaatgatgtggtggtgagccccctgctgtacacctgctaccagaacagccagagcgtgtcccgggcctatgagcagtacggggccagcgccatccagcccatcagcgaggagatgcagctgctgctgactgtgtactacctggtgcagctggcccaccagatcagaaatccagatgtgtag

SEQ ID NO: 299345 - DNA, 1374 bp, Artificial Sequence
  derived and/or modified sequence
atgggcaacagctacgccggccagctgaagaccacccggttcgaggaggtgctccataactctatcgaagccagcctgcgttccaataatctcgtgccacgacctatatttagtcagctgtacttagaagcagaacaacagctggccgccctcgagggtggttccagggtcgacaacgaggaagaggaggaggaaggagaagggggcctagaaacaaacgggcccccaaatccattccagttacatcctctccccgagggctgctgtaccacagacggattctgccaggccgggaaagacctcaggttggtgtccatctctaacgaaccaatggatgttccggccggcttcttattggtgggtgtcaaatcaccatctctgcctgaccatctgctggtgtgtgcagtggataagcgtttcctgccagacgacaatggacataatgccctgttggggttcagcgggaattgtgtgggctgcgggaagaaggggttctgttacttcacagaatttagcaatcacatcaacctgaaactgaccacacagcccaaaaagcagaagcatttgaagtattatctagtcagaaacgcacagggcactctgacaaaaggccctcttatttgctggaaaggttccgagtttcgctctaggcaaattcccgcctccacatgcagctcctctcttttccctgccctggagtccacagctgccttccccagcgaacctgtgcctgggaccaacccctctattttgatgggagcacagcaggctggacctgcctcagaccatccttccctgaatgcggcgatgggtcctgcagtcttcaacgggaaagacagccctaagtgccagcagcttgccaagaacaatttgcttgccctgccccgtccaagtgccctcggtattctaagcaacagcggtcctcccaagaagcgccataagggatggagtcccgaatctccaagtgcccccgacggcgggtgtccccaggggggaggaaaccgtgccaagtatgaatcagccgggatgtcatgtgtgccacaggtgggccttgtcgggccagcctctgtgactttcccagtggtggccagcggcgagccagtctctgtcccggacaatttgctgaagatctgcaaggctaagccagtgatttttaagggacacggaaactttccctatctttgcgggaatctcaatgacgtcgtggtatcacccctcctgtatacttgctaccaaaacagccagagtgtgtctcgtgcctacgaacagtatggcgcttccgctatccagcctatatctgaggaaatgcagttgctgttaaccgtgtactacctggttcagctagcacatcagattagaaatcctgacgtatag

SEQ ID NO: 299346 - DNA, 1374 bp, Artificial Sequence
  derived and/or modified sequence
atgggtaattcttacgctggccagctgaagacgactcgattcgaagaagtcctccacaatagtattgaagcatctcttcggtccaacaacctcgtcccgagaccaatctttagtcaactgtatttggaggctgagcagcagctcgctgctctcgaagggggatctcgggtggacaatgaggaggaagaagaagagggtgagggaggtctggagaccaacggccctccaaacccatttcagcttcatcccttgcccgagggatgttgtacgactgatgggttctgccaggccggtaaggacctcagactcgtaagtatatctaacgagcccatggacgtccctgccggtttcctccttgttggtgtcaagagtccctccctccccgaccaccttctggtgtgcgccgtcgacaaacgtttccttccagacgataatggacacaacgctctgttgggtttcagcggaaattgtgtcggttgtggcaagaaggggttttgttacttcacagagtttagcaatcacataaatcttaaactcaccacccaacccaaaaaacagaagcatctgaagtactacctggtgcgcaacgcacaggggactctgaccaaaggccctctgatctgttggaagggatctgagtttcgaagtcggcagattccagctagcacttgctcttcttctcttttcccagcgttggagtcaaccgctgcctttcccagtgagcctgttcctggcacgaatcctagtatcttgatgggggctcagcaggctgggcctgcttccgaccatccttccttgaatgcagctatgggccctgcagtgtttaatggcaaggattccccaaaatgccagcagcttgcaaagaataacttgctagctttgccacgtcccagcgcgctggggatcctgagtaattccggacctcctaagaaaagacataaaggctggtcgcctgagagccctagtgctcctgacggaggatgtcctcagggcggaggaaacagagccaagtacgagtctgctggaatgtcctgtgtgcctcaggtcggtctcgtgggtccagccagtgtgacgtttcccgtggtggcaagcggcgagcccgtatcagtcccagataatctgttgaaaatctgcaaggcgaagcccgtgatctttaaaggccacggcaacttcccttatttgtgtggcaacctaaacgacgtggttgtgtccccgttactgtacacatgttaccagaattctcaaagtgtgtccagagcctacgagcagtatggagctagcgcaatacagcccatttccgaagaaatgcagttactgctcactgtgtactacctggtccagctggcacaccagatcaggaatccagatgtctag

SEQ ID NO: 299347 - DNA, 1374 bp, Artificial Sequence
  derived and/or modified sequence
atgggcaacagctacgccggccagctgaagaccaccagattcgaggaggtgctgcacaacagcatcgaggccagcctgagaagcaacaacctggtgcccagacccatcttcagccagctgtacctggaggccgagcagcagctggccgccctggagggcggcagcagagtggacaacgaggaggaggaggaggagggcgagggcggcctggagaccaacggcccccccaaccccttccagctgcaccccctgcccgagggctgctgcaccaccgacggcttctgccaggccggcaaggacctgagactggtgagcatcagcaacgagcccatggacgtgcccgccggcttcctgctggtgggcgtgaagagccccagcctgcccgaccacctgctggtgtgcgccgtggacaagagattcctgcccgacgacaacggccacaacgccctgctgggcttcagcggcaactgcgtgggctgcggcaagaagggcttctgctacttcaccgagttcagcaaccacatcaacctgaagctgaccacccagcccaagaagcagaagcacctgaagtactacctggtgagaaacgcccagggcaccctgaccaagggccccctgatctgctggaagggcagcgagttcagaagcagacagatccccgccagcacctgcagcagcagcctgttccccgccctggagagcaccgccgccttccccagcgagcccgtgcccggcaccaaccccagcatcctgatgggcgcccagcaggccggccccgccagcgaccaccccagcctgaacgccgccatgggccccgccgtgttcaacggcaaggacagccccaagtgccagcagctggccaagaacaacctgctggccctgcccagacccagcgccctgggcatcctgagcaacagcggcccccccaagaagagacacaagggctggagccccgagagccccagcgcccccgacggcggctgcccccagggcggcggcaacagagccaagtacgagagcgccggcatgagctgcgtgccccaggtgggcctggtgggccccgccagcgtgaccttccccgtggtggccagcggcgagcccgtgagcgtgcccgacaacctgctgaagatctgcaaggccaagcccgtgatcttcaagggccacggcaacttcccctacctgtgcggcaacctgaacgacgtggtggtgagccccctgctgtacacctgctaccagaacagccagagcgtgagcagagcctacgagcagtacggcgccagcgccatccagcccatcagcgaggagatgcagctgctgctgaccgtgtactacctggtgcagctggcccaccagatcagaaaccccgacgtgtag

SEQ ID NO: 299348 - protein, 55 aa, Artificial Sequence
  derived and/or modified sequence
MTTTRYRPTWDLALDPLVSCKLCLGEYPVEQMTTIAQCQCIFCTLCLKQYVELLI

SEQ ID NO: 299349 - protein, 198 aa, Artificial Sequence
  derived and/or modified sequence
MTTTRYRPTWDLALDPLVSCKLCLGEYPVEQMTTIAQCQCIFCTLCLKQYVELLIKEGLETAISCPDAACPKQGHLQENEIECMVAAEIMQRYKKLQFEREVLFDPCRTWCPASTCQAVCQLQDVGLQTPQPVQCKACRMEFCSTCKASWHPGQGCPETMPITFLPGETSAAFKMEEDDAPIKRCPKCSKGDDDPLPT

SEQ ID NO: 299350 - DNA, 168 bp, Artificial Sequence
  derived and/or modified sequence
atgaccaccaccagatacagacccacctgggacctggccctggaccccctggtgagctgcaagctgtgcctgggcgagtaccccgtggagcagatgaccaccatcgcccagtgccagtgcatcttctgcaccctgtgcctgaagcagtacgtggagctgctgatctag

SEQ ID NO: 299351 - DNA, 597 bp, Artificial Sequence
  derived and/or modified sequence
atgaccaccaccagatacagacccacctgggacctggccctggaccccctggtgagctgcaagctgtgcctgggcgagtaccccgtggagcagatgaccaccatcgcccagtgccagtgcatcttctgcaccctgtgcctgaagcagtacgtggagctgctgatcaaggagggcctggagaccgccatcagctgccccgacgccgcctgccccaagcagggccacctgcaggagaacgagatcgagtgcatggtggccgccgagatcatgcagagatacaagaagctgcagttcgagagagaggtgctgttcgacccctgcagaacctggtgccccgccagcacctgccaggccgtgtgccagctgcaggacgtgggcctgcagaccccccagcccgtgcagtgcaaggcctgcagaatggagttctgcagcacctgcaaggccagctggcaccccggccagggctgccccgagaccatgcccatcaccttcctgcccggcgagaccagcgccgccttcaagatggaggaggacgacgcccccatcaagagatgccccaagtgcagcaagggcgacgacgaccccctgcccacctag

SEQ ID NO: 299352 - DNA, 168 bp, Artificial Sequence
  derived and/or modified sequence
atgactaccactcgctaccgaccgacttgggaccttgccctggaccctctggtgtcgtgcaagctatgcctcggagagtaccctgttgaacagatgacaaccatcgctcaatgtcaatgtatcttctgcaccttgtgtcttaagcagtatgtagagttgctgatctag

SEQ ID NO: 299353 - DNA, 597 bp, Artificial Sequence
  derived and/or modified sequence
atgacaaccacaaggtaccggcccacctgggatctggccctggacccactggtgtcctgcaagctgtgcctaggagagtatcccgttgagcaaatgaccacaattgcacagtgtcagtgcattttttgcacactctgtttaaaacagtatgtcgagttgctgattaaagaaggcctggaaaccgctatctcatgtccagatgcagcgtgccctaagcaagggcacttacaggagaatgaaatagagtgcatggtggcggctgagatcatgcagagatacaagaagctgcaatttgagcgagaagtgctgtttgatccttgcagaacctggtgccccgcttccacctgccaggccgtttgccagctgcaggatgtggggctccagactccacagccggtccagtgcaaggcttgcaggatggaattctgctctacttgcaaagcctcttggcaccctggccagggctgcccggagactatgccaatcactttcctgcctggggagacatcagcagccttcaagatggaagaggacgatgcaccgatcaagcggtgtcctaaatgctctaagggggatgacgatcctctgcctacttag

SEQ ID NO: 299354 - DNA, 168 bp, Artificial Sequence
  derived and/or modified sequence
atgaccacgacccgataccggccaacgtgggacctggcattggaccccctagtaagctgcaagctctgcctcggcgagtatcctgtcgaacaaatgaccactattgcccagtgtcaatgcattttctgcacactctgcttgaaacagtacgtggagcttctgatctag

SEQ ID NO: 299355 - DNA, 168 bp, Artificial Sequence
  derived and/or modified sequence
atgaccaccacccgctaccggcccacctgggacctggccctggaccccctggtgtcctgcaagctgtgcctgggggagtaccctgtggagcagatgaccaccatcgcccagtgccagtgcatcttctgcaccctgtgcctgaagcagtatgtggagctgctgatctag

SEQ ID NO: 299356 - DNA, 597 bp, Artificial Sequence
  derived and/or modified sequence
atgaccaccacccgctaccggcccacctgggacctggccctggaccccctggtgtcctgcaagctgtgcctgggggagtaccctgtggagcagatgaccaccatcgcccagtgccagtgcatcttctgcaccctgtgcctgaagcagtatgtggagctgctgatcaaggagggcctggagacagccatcagctgcccagatgctgcctgccccaagcagggccacctgcaggagaatgaaattgagtgcatggtggccgctgagatcatgcagcgctacaagaagctgcagtttgagcgggaggtgctgtttgacccctgcaggacctggtgcccagccagcacctgccaggccgtgtgccagctgcaggatgtgggcctgcagaccccccagcctgtgcagtgcaaggcctgcaggatggagttctgcagcacctgcaaggcctcctggcaccctggccagggctgcccagagaccatgcccatcaccttcctgcccggggagaccagcgctgccttcaagatggaggaggatgatgcccccatcaagcgctgccccaagtgcagcaaaggagatgatgaccccctgcccacctag

SEQ ID NO: 299357 - DNA, 168 bp, Artificial Sequence
  derived and/or modified sequence
atgaccaccacccggtaccggcccacctgggacctggccctggacccattggttagctgtaagctatgcctcggagagtacccggttgaacaaatgaccacgattgcccagtgccagtgtatattctgtacactctgcctgaagcagtatgtggaactgcttatttag

SEQ ID NO: 299358 - DNA, 597 bp, Artificial Sequence
  derived and/or modified sequence
atgaccaccacccggtaccggcccacctgggacctggccctggaccccttagtcagctgcaaactttgcttgggggagtacccagtcgagcagatgaccaccatcgcccagtgccagtgtattttttgcacactgtgcctgaagcaatacgtggagctgcttatcaaagagggactggagaccgcaataagctgtccagatgccgcctgtcccaagcaaggacatctgcaggaaaatgagattgaatgcatggtggctgccgagatcatgcagcgatataaaaagctgcagtttgaacgggaggtgctgtttgacccatgtaggacctggtgccccgcatctacctgccaggccgtctgccagctccaggacgtgggcctacagaccccacaaccggtgcagtgcaaagcttgtcggatggagttctgtagtacttgcaaggctagttggcacccagggcagggatgtccagagacaatgcctataacttttctgcccggtgagacttcagcggcttttaagatggaagaggatgacgcgccgattaaacgatgccccaaatgttctaaaggcgacgatgacccactccctacatag

SEQ ID NO: 299359 - DNA, 168 bp, Artificial Sequence
  derived and/or modified sequence
atgaccaccacccggtaccggcccacctgggacctggccctggaccccctggtgtcatgtaaattgtgtctcggagagtaccccgtggagcaaatgacaacgattgcacagtgtcagtgtattttctgcactctgtgtctgaaacagtatgttgagttgttgatctag

SEQ ID NO: 299360 - DNA, 168 bp, Artificial Sequence
  derived and/or modified sequence
atgacaactacccgctaccgccctacctgggacttagcactggaccctctggtaagctgcaagctgtgtttgggcgaataccccgtagagcaaatgaccacaattgcccagtgccagtgtatcttctgtaccttatgtctaaagcaatacgtggaattacttatctag

SEQ ID NO: 299361 - DNA, 597 bp, Artificial Sequence
  derived and/or modified sequence
atgaccactacacgttatcgtccaacctgggacctggccctcgacccattggtgtcatgtaaactgtgcttgggcgagtatcctgtggagcaaatgacgaccatcgcgcagtgccagtgcatcttctgcactctatgtctaaagcaatacgtggagctgctaataaaagaaggcttggagacggcgatttcttgtccagacgctgcctgtccaaaacagggacaccttcaggagaacgagatcgaatgcatggtggccgcagaaataatgcaaaggtacaagaagctccaattcgagcgggaggttctgttcgatccatgccggacctggtgtcccgcaagcacctgccaggccgtgtgccagctgcaggacgtggggctccagactcctcagccagtgcagtgcaaagcttgtcgtatggagttttgctctacatgcaaagctagctggcaccctggtcaagggtgccccgagaccatgcctattacgttcttgccaggcgagacctccgcggctttcaagatggaagaagacgatgccccaattaaacgctgtcccaaatgctccaagggcgatgatgaccccctgcctacttag

SEQ ID NO: 299362 - DNA, 168 bp, Artificial Sequence
  derived and/or modified sequence
atgactacaacaaggtaccgcccaacatgggatctggctttagacccattagtttcctgcaagctctgcctgggagaataccctgtggaacagatgacaactatcgctcaatgtcaatgcatattttgtactctgtgtctgaagcagtacgtcgagctgcttatctag

SEQ ID NO: 299363 - DNA, 564 bp, Artificial Sequence
  derived and/or modified sequence
gtgaaaacctccacttatagcggctgcataagcttaactgcgcagagctatactgctttttgaaatactaacttgcaagttcagcaacagctaagaaaacaatcctagacttggaaattgaaagattggaagagaagtggagggattcctttggaaccctttacgtacgtatgtgtaaggaattgtaggcatccagtaccctgctgactctgacatgcccccagcctcccccagctctgcagggagccctggtgccagagaccttctcccatttctccctatgggtgcctgacctgagggcagagacatctgagtgtgtataagcacagcaggacaccaggacctggcctgaagacatttcctctcctcccctctggatttctcagagactgttctgcgatgaccacaacaaggtaccggcccacctgggacctggccctcgacccgctggtgtcttgcaagctctgtcttggggagtacccagtggagcagatgacaaccatagcccagtgccaatgcatcttctgtactctgtgcctgaaacagtatgttgagctcttgatc

SEQ ID NO: 299364 - DNA, 1446 bp, Artificial Sequence
  derived and/or modified sequence
gcgcgggctctcggcaggcgggaggcggcagggctggcattgcagtgcgggccgtgcgggctgcgcgggcgcggggaggcgcgggcggcaaactgcgggcacccggcaccccgcagccagtaccgggcggaggcgtcagagccgcgcaccgcggacgagcaggcccaggcatccagtaccctgctgactctgacatgcccccagcctcccccagctctgcagggagccctggtgccagagaccttctcccatttctccctatgggtgcctgacctgagggcagagacatctgagtgtgtataagcacagcaggacaccaggacctggcctgaagacatttcctctcctcccctctggatttctcagagactgttctgcgatgaccacaacaaggtaccggcccacctgggacctggccctcgacccgctggtgtcttgcaagctctgtcttggggagtacccagtggagcagatgacaaccatagcccagtgccaatgcatcttctgtactctgtgcctgaaacagtatgttgagctcttgatcaaagaaggattagaaactgcaattagctgcccagatgctgcctgccctaaacagggccacctacaggagaacgagattgagtgcatggttgcagctgaaattatgcaaagatataaaaagctacaatttgaaagagaggtgctgtttgatccctgtcggacttggtgcccggcgtccacctgccaagctgtgtgtcagctccaggacgtggggctgcagaccccccagccagtgcagtgcaaagcctgccgtatggaattctgctccacctgcaaagccagctggcaccctggccagggctgcccggagaccatgccgatcaccttcctccccggggagaccagtgctgctttcaaaatggaagaagatgacgcgcccatcaagcgctgccccaagtgcagtaaaggtgacgacgacccgttacccacctagaggaagcgcgatgctggaacacatccctgcctccgggaagtgtggctctcccccaaccctccccaccgtccccccttcactaaacatctttcttgccttatgtgccccattgagcttcacagtgtcaggctggacgccgtgatttcagggacctatgtcacaatgttcgctgaggccccaggtgtggtggggaggggaggcaggtgtgggtagcgcacatccccacagatcaatctctgcagatgacagggaggtgctgtgagaagtgcaccaggcagctttctctctgtggtagactaggcatgtctggggatggcctaagagactttctgctccttggcttctagatggcaccatgttgtcagagaagtcttttaaggactgccactctcttcagacagaatctgattattccagcttgagagaagcactctgtttatgacaactgtttttattactaatggcattta

SEQ ID NO: 299365 - DNA, 392 bp, Artificial Sequence
  derived and/or modified sequence
aggaaaggttgcatcagtttatgtgatcatgttcaagtccctcgaggttggactcagaaccaagctgaatgctcaggaaacaagtaggctggttctgcagtctgagcctggaccctgtctgtttggaggctttccttctctctttgtgaatattctctttagaagagagctctctttctgcacctgtggggatcatcaccaccatgtcagaactgaactgttctgcgatgaccacaacaaggtaccggcccacctgggacctggccctcgacccgctggtgtcttgcaagctctgtcttggggagtacccagtggagcagatgacaaccatagcccagtgccaatgcatcttctgtactctgtgcctgaaacagtatgttgagctcttgatc

SEQ ID NO: 299366 - protein, 72 aa, Artificial Sequence
  derived and/or modified sequence
MAKQPSDVSSECDREGRQLQPAERPPQLRPGAPTSLQTEPQGNPEGNHGGEGDSCPHGSPQGPLAPPASPGP

SEQ ID NO: 299367 - protein, 122 aa, Artificial Sequence
  derived and/or modified sequence
MAKQPSDVSSECDREGRQLQPAERPPQLRPGAPTSLQTEPQGNPEGNHGGEGDSCPHGSPQGPLAPPASPGPFATRSPLFIFMRRSSLLSRSSSGYFSFDTDRSPAPMSCDKSTQTPSPPCQ

SEQ ID NO: 299368 - protein, 112 aa, Artificial Sequence
  derived and/or modified sequence
MAKQPSDVSSECDREGRQLQPAERPPQLRPGAPTSLQTEPQDRSPAPMSCDKSTQTPSPPCQAFNHYLSAMVVILEDIGDLSLCFGFIFTGLDLYGHHHSQDTEQLNHKDFS

SEQ ID NO: 299369 - DNA, 722 bp, Artificial Sequence
  derived and/or modified sequence
acttcgctccgcgcagccgcctggtctgcagtttgttggagctctgcgtccagcgccgctgccgctgccgccgccgccgccgccgccgccgccgccgccgccgccgccactaccaccacttgattcttgcagccaccctgcgaaccctgccacactgcgatcgcatcatcgcggtattcggttcgctgcgttcccgccgccaccgcctcggcgccctttcttggcccttgttcccccaaatgtctgactctgactctcggactgagaaacgcaagaaaaaaagaccaaatggcaaagcaaccttctgatgtaagttctgagtgtgaccgagaaggtagacaattgcagcctgcggagaggcctccccagctcagacctggggcccctacctccctacagacagagccacaagacaggagcccagcacccatgagttgtgacaaatcaacacaaaccccaagtcctccttgccaggccttcaaccactatctcagtgcaatggtagtcatcctagaggatataggtgatctttcactgtgctttggatttatatttactggcttagatttgtatggccaccaccatagtcaagatacagaacaactcaaccacaaggatttctcatgatacctttttatagccacagccacctctctccctcttccttgagcattttgtcatatggtcattggtgattaaataaaatgtattttaatattgac

SEQ ID NO: 299370 - protein, 96 aa, Artificial Sequence
  derived and/or modified sequence
KQPSDVSSECDREGRQLQPAERPPQLRPGAPTSLQTEPQDRSPAPMSCDKSTQTPSPPCQAFNHYLSAMDDSAGSSLRIALHREVQWPLKWLAKSS

SEQ ID NO: 299371 - DNA, 201 bp, Artificial Sequence
  derived and/or modified sequence
atgctgttctgggtgttgggactgctcatcctttgtggcttcttgtggactagaaaaggcaaacttaagatcgaggatataacagataaatacattttcattaccggatgtgattccggctttggaaatctcgccgcgcggactttcgataagaaaggtttccatgtgattgccgcttgcctgacggagagtggatcttag

SEQ ID NO: 299372 - DNA, 201 bp, Artificial Sequence
  derived and/or modified sequence
atgctgttctgggtgctgggcctgctgatcctgtgtggcttcctgtggaccaggaagggcaagctgaagattgaggacatcacagacaagtacatcttcatcaccggctgtgacagcggctttggaaacctggccgcccggacctttgacaagaagggcttccacgtgattgctgcctgcctgacagagagcggcagctag

SEQ ID NO: 299373 - DNA, 201 bp, Artificial Sequence
  derived and/or modified sequence
atgctgttctgggtgctgggcctgctgatcctgtgcggcttcctgtggacaaggaaggggaaactcaaaattgaagacatcacagacaaatacatcttcattaccgggtgcgattccgggttcgggaacctggctgcaagaacttttgacaaaaaaggttttcacgtgattgctgcctgcctgacagagtccggaagctag

SEQ ID NO: 299374 - DNA, 201 bp, Artificial Sequence
  derived and/or modified sequence
atgcttttctgggttctagggctcttgatactgtgcgggtttctttggacccgtaagggcaagcttaagatcgaggatatcaccgataaatacatttttatcacaggttgtgatagtggctttgggaatctggcagctcgcacttttgacaagaaggggttccacgtgatcgctgcttgcttgacagagtcaggatcttag

SEQ ID NO: 299375 - DNA, 201 bp, Artificial Sequence
  derived and/or modified sequence
atgctgttctgggtgctgggcctgctgatcctgtgcggcttcctgtggaccagaaagggcaagctgaagatcgaggacatcaccgacaagtacatcttcatcaccggctgcgacagcggcttcggcaacctggccgccagaaccttcgacaagaagggcttccacgtgatcgccgcctgcctgaccgagagcggcagctag

SEQ ID NO: 299376 - DNA, 1086 bp, Artificial Sequence
  derived and/or modified sequence
tccctcgagcgtttgggggtgcaagctgtagggctgtggccaacaggtgggtctacatcccctttcagcagccccatcacctccgacgaggaatacctgagccccccagaggagttcccagagcctggggagacctggccgcgaacccccaccatgaagcccagtcccagccagaaccgccgttcttctgacactggctccaaggcaccccccaccttcaaggtctcacttatggaccagtcagtaagagaaggccaagatgtcatcatgagcatccgcgtgcagggggagcccaagcctgtggtctcctggctgagaaaccgccagcccgtgcgcccagaccagcggcgctttgcggaggaggctgagggtgggctgtgccggctgcggatcctggctgcagagcgtggcgatgctggtttctacacttgcaaagcggtcaatgagtatggtgctcggcagtgcgaggcccgcttggaggtccgaggcgagtgagctcagggggccacctgtgctccccccgctaccctccgagccgcgcccctgtctcaggcacctctcggacctcgctgtgtttcactgcctcctgcccacagacccaggcctgccggcccggacccgtcccagcctcccctccccaccccatgcagcccccagggggatagcccatgggcccctgtggaccctccctccccaagtggacacatggctgtgcaggccaggaggcccacagatggactgagtgctgggaaggggcggctgcgaggggtatcaaccccccgagtctctccctgaaggggagcaccgggcgagtgcatgtgctactgctgctacaggcctgtctatctgtttgtctgtctgtgtgtctgtgacagtcagggaaggatgcctcggagctgaggtggggtgagacagagtgggagagattacggcatggcatggaggggcccaaggagcaggggctgttgacaaaggccttaccaggaagggttaggacactgaccattctagaaatgggtttcgaatggcacaacactttctatttcacaaaagaccaaaagccagaggccccaggctctgtgctga

SEQ ID NO: 299377 - DNA, 1274 bp, Artificial Sequence
  derived and/or modified sequence
ccgaggtcgggatgtgacttgtctgcggtgggtctacatcccctttcagcagccccatcacctccgacgaggaatacctgagccccccagaggagttcccagagcctggggagacctggccgcgaacccccaccatgaagcccagtcccagccagaaccgccgttcttctgacactggctccaaggcaccccccaccttcaaggtctcacttatggaccagtcagtaagagaaggccaagatgtcatcatgagcatccgcgtgcagggggagcccaagcctgtggtctcctggctgagaaaccgccagcccgtgcgcccagaccagcggcgctttgcggaggaggctgagggtgggctgtgccggctgcggatcctggctgcagagcgtggcgatgctggtttctacacttgcaaagcggtcaatgagtatggtgctcggcagtgcgaggcccgcttggaggtccgaggcgagtgagctcagggggccacctgtgctccccccgctaccctccgagccgcgcccctgtctcaggcacctctcggacctcgctgtgtttcactgcctcctgcccacagacccaggcctgccggcccggacccgtcccagcctcccctccccaccccatgcagcccccagggggatagcccatgggcccctgtggaccctccctccccaagtggacacatggctgtgcaggccaggaggcccacagatggactgagtgctgggaaggggcggctgcgaggggtatcaaccccccgagtctctccctgaaggggagcaccgggcgagtgcatgtgctactgctgctacaggcctgtctatctgtttgtctgtctgtgtgtctgtgacagtcagggaaggatgcctcggagctgaggtggggtgagacagagtgggagagattacggcatggcatggaggggcccaaggagcaggggctgttgacaaaggccttaccaggaagggttaggacactgaccattctagaaatgggtttcgaatggcacaacactttctatttcacaaaagaccaaaagccagaggccccaggctctgtgctgatgaacagcctggctgagccctggccctggcaggtttagggcccatttggggccccctccttctctgtcagggctggggtgctctgtctgggaatgagggagttaaccaagtttggtgcaggagcaggggcagggggccactgtagtgagcgtggagaaatttggaaacacctatttcttaactcaaataaagtccagtttgtaccta

SEQ ID NO: 299378 - DNA, 3211 bp, Artificial Sequence
  derived and/or modified sequence
atgaagaagctgtgggtgaagaagcgtttccagaaaaccggccattcccgccgggcctttggccgactcacccatgaaagcaaagttacgactcagagacggctgaggatgacatcagcgatgtgcagggaacccagcgcctggagcttcgggatgacggggccttcagcacccccacggggggttctgacaccctggtgggcacctccctggacacacccccgacctccgtgacaggcacctcagaggagcaagtgagctggtggggcagcgggcagacggtcctggagcaggaagcgggcagtgggggtggcacccgccgcctcccgggcagcccaagcagcgtccctcagagcgggttgcgcagggaggagcccgaccttcagcctcaactggccagcgaagccccacgccgccctgcccagccgcctccttccaaatccgcgctgctccccccaccgtcccctcgggtcgggaagcggtccccgccgggacccccggcccagcccgcggccacccccacgtcgccccaccgtcgcactcaggagcctgtgctgcccgaggacaccaccaccgaagagaagcgagggaagaagtccaagtcgtccgggccctccctggcgggcaccgcggaatcccgaccccagacgccactgagcgaggcctcaggccgcctgtcggcgttgggccgatcgcctaggctggtgcgcgccggctcccgcatcctggacaagctgcagttcttcgaggagcgacggcgcagcctggagcgcagcgactcgccgccggcgcccctgcggccctgggtgcccctgcgcaaggcccgctctctggagcagcccaagtcggagcgcggcgcaccgtggggcacccccggggcctcgcaggaagaactgcgggcgccaggcagcgtggccgagcggcgccgcctgttccagcagaaagcggcctcgctggacgagcgcacgcgtcagcgcagcccggcctcagacctcgagctgcgcttcgcccaggagctgggccgcatccgccgctccacgtcgcgggaggagctggtgcgctcgcacgagtccctgcgcgccacgctgcagcgtgccccatcccctcgagagcccggcgagcccccgctcttctctcggccctccacccccaagacatcgcgggccgtgagccccgccgccgcccagccgccctctccgagcagcgcggagaagccgggggacgagcctgggaggcccaggagccgcgggccggcgggcaggacagagccgggggaaggcccgcagcaggaggttaggcgtcgggaccaattcccgctgacccggagcagagccatccaggagtgcaggagccctgtgccgccccccgccgccgatcccccagaggccaggacgaaagcaccccccggtcggaagcgggagcccccggcgcaggccgtgcgcttcctgccctgggccacgccgggcctggagggcgctgctgtaccccagaccttggagaagaacagggcggggcctgaggcagagaagaggcttcgcagagggccggaggaggacggtccctgggggccctgggaccgccgaggggcccgcagccagggcaaaggtcgccgggcccggcccacctcccctgagctcgagtcttcggatgactcctacgtgtccgctggagaagagcccctagaggcccctgtgtttgagatccccctgcagaatgtggtggtggcaccaggggcagatgtgctgctcaagtgtatcatcactgccaaccccccgccccaagtgtcctggcacaaggatgggtcagcgctgcgcagcgagggccgcctcctcctccgggctgagggtgagcggcacaccctgctgctcagggaggccagggcagcagatgccgggagctatatggccaccgccaccaacgagctgggccaggccacctgtgccgcctcactgaccgtgagacccggtgggtctacatcccctttcagcagccccatcacctccgacgaggaatacctgagccccccagaggagttcccagagcctggggagacctggccgcgaacccccaccatgaagcccagtcccagccagaaccgccgttcttctgacactggctccaaggcaccccccaccttcaaggtctcacttatggaccagtcagtaagagaaggccaagatgtcatcatgagcatccgcgtgcagggggagcccaagcctgtggtctcctggctgagaaaccgccagcccgtgcgcccagaccagcggcgctttgcggaggaggctgagggtgggctgtgccggctgcggatcctggctgcagagcgtggcgatgctggtttctacacttgcaaagcggtcaatgagtatggtgctcggcagtgcgaggcccgcttggaggtccgaggcgagtgagctcagggggccacctgtgctccccccgctaccctccgagccgcgcccctgtctcaggcacctctcggacctcgctgtgtttcactgcctcctgcccacagacccaggcctgccggcccggacccgtcccagcctcccctccccaccccatgcagcccccagggggatagcccatgggcccctgtggaccctccctccccaagtggacacatggctgtgcaggccaggaggcccacagatggactgagtgctgggaaggggcggctgcgaggggtatcaaccccccgagtctctccctgaaggggagcaccgggcgagtgcatgtgctactgctgctacaggcctgtctatctgtttgtctgtctgtgtgtctgtgacagtcagggaaggatgcctcggagctgaggtggggtgagacagagtgggagagattacggcatggcatggaggggcccaaggagcaggggctgttgacaaaggccttaccaggaagggttaggacactgaccattctagaaatgggtttcgaatggcacaacactttctatttcacaaaagaccaaaagccagaggccccaggctctgtgctgatgaacagcctggctgagccctggccctggcaggtttagggcccatttggggccccctccttctctgtcagggctggggtgctctgtctgggaatgagggagttaaccaagtttggtgcaggagcaggggcagggggccactgtagtgagcgtggagaaatttggaaacacctatttcttaactcaaataaagtccagtttgtacct

SEQ ID NO: 299379 - DNA, 911 bp, Artificial Sequence
  derived and/or modified sequence
aaggggtcgtagctggaggggcctaggtgaggctgccgggaagggacgatgtggttggtggagtgcacaggcagggacctcactggactttcctgtctgctcagcatggacaggcagcccaggagaaggcagcacgtggccgggtgcagggacgtaccacccccacttccccaggggagctggggtcagacgagtcccaggcactccatcctctgcagcaagtcaggttgtgatttactagggggtggtgaatataatggagagacttctggggaggaattcctggctcccgcgtggacttgcagagctcaacaggcagccacgtggctgagtgtccagcaaacatcacataaggctttgggtcctgcaggtggggctgccatgagcagcaagctcagtccagaagaacagttcctctccaggatccacttcctgcgcacttttatgtgcagtgtagctggagcagagctccccggaattccacaggcaactgagaacggagagggatgcaggccagccagggatccagcgtcttccccatcgtcactctccatggcctccgtctacacacagtgttcgtctgcacagcttgtcagcgcgttatcatgacttctatttggcaccggcccgtctgtccactgtcctggcttgttccaagcgctgccttctccaactggggtcctggctgcagagctgtctgctccccacgttgggcaactccagccaagattcctacacccaaatgtgaccgtgttgctcacgaagaaggctcagctttgcgtgtgcccagccgtgtgcacagctcgtcccaactcctgcgggtggcacctgcctctcccacctccagtctttcccctgtgatgagcagatgaccaccgccctccagggtcagcgtttggctgtttgtgtgc

SEQ ID NO: 299380 - DNA, 1457 bp, Artificial Sequence
  derived and/or modified sequence
caacctcctccttcccctcctcaggcgccttcccctcccccagggccttctccgtgcagggcctcagctgggtcagccgagtgagtggggctgggcaggctggacaggctgggctcctgctccctggggagccacgctggggtgggcagtgggcaggcagcaggagggcctggtgccagggcagagccttcaggacaggcacaggctggggtctgtgtgcagagcctcggggtgggtctacatcccctttcagcagccccatcacctccgacgaggaatacctgagccccccagaggagttcccagagcctggggagacctggccgcgaacccccaccatgaagcccagtcccagccagaaccgccgttcttctgacactggctccaaggcaccccccaccttcaaggtctcacttatggaccagtcagtaagagaaggccaagatgtcatcatgagcatccgcgtgcagggggagcccaagcctgtggtctcctggctgagaaaccgccagcccgtgcgcccagaccagcggcgctttgcggaggaggctgagggtgggctgtgccggctgcggatcctggctgcagagcgtggcgatgctggtttctacacttgcaaagcggtcaatgagtatggtgctcggcagtgcgaggcccgcttggaggtccgaggcgagtgagctcagggggccacctgtgctccccccgctaccctccgagccgcgcccctgtctcaggcacctctcggacctcgctgtgtttcactgcctcctgcccacagacccaggcctgccggcccggacccgtcccagcctcccctccccaccccatgcagcccccagggggatagcccatgggcccctgtggaccctccctccccaagtggacacatggctgtgcaggccaggaggcccacagatggactgagtgctgggaaggggcggctgcgaggggtatcaaccccccgagtctctccctgaaggggagcaccgggcgagtgcatgtgctactgctgctacaggcctgtctatctgtttgtctgtctgtgtgtctgtgacagtcagggaaggatgcctcggagctgaggtggggtgagacagagtgggagagattacggcatggcatggaggggcccaaggagcaggggctgttgacaaaggccttaccaggaagggttaggacactgaccattctagaaatgggtttcgaatggcacaacactttctatttcacaaaagaccaaaagccagaggccccaggctctgtgctgatgaacagcctggctgagccctggccctggcaggtttagggcccatttggggccccctccttctctgtcagggctggggtgctctgtctgggaatgagggagttaaccaagtttggtgcaggagcaggggcagggggccactgtagtgagcgtggagaaatttggaaacacctatttcttaactcaa

SEQ ID NO: 299381 - DNA, 651 bp, Artificial Sequence
  derived and/or modified sequence
atgttagccagccctgcccgcccaacactgcgtatgcttgcaaaccatgctctgtccactccccattgtgcctgcagtccagcccctgcaccgcgaacggcttcggcgtctaggagacgatgcgttcctgtggaggcacgggccgccggcgtgttcggagaccggctcgccggggtctttgggagcagggggctaaagcatggaggcgtgcaggccccacgtccaagggtggtaagggccgagcctagagctggctttgccgtggtgagaagccctcgcaggctgtgcggcaggagccatgccccccagcctcctgctcacctcggtctgggccccggctgtttcccagcagtggccgtggtggtacctgtacctggctctagagcacatagaccttttgctgccttactggttgagggcagtttccttggcgatcctccaatcccccccagacgttcaggggtgctagcgagaggctctgctggcgcagattgtctggccagtagcgtgacgcctgggccatccctatggatccccctcctcttagtcgcgggctgcgtatcatgctttgtcggcctggcagtttgtgtgtggatgcaggcacgcgtttctccagcctggcctgctggactctttttactgccacgatag

SEQ ID NO: 299382 - DNA, 180 bp, Artificial Sequence
  derived and/or modified sequence
atgatgatgaagatgatgatgaggatgaagatcaggaagattcgctaccattgccagcgcaagcagaatctcatccacaacaatggcaacggactgggatccgtgcccgtggaaaagctcgtgctgcacccctcaccaatccagaatcctcagcaaagtgctgtggttagctgtgagtag

SEQ ID NO: 299383 - DNA, 513 bp, Artificial Sequence
  derived and/or modified sequence
atggcaacagctactaacgaactaggacaggcgacctgtgcggcaagccttaccgtgcggcccgggggtagtaccagtccgttcagctctcctatcacctcagacgaggaatacttatctccccccgaggagttccccgagccaggggagacctggccccggacacccacaatgaaacctagccctagccagaaccgccgcagttccgacacaggctcaaaggctccaccaactttcaaggtgagtctgatggaccaaagtgtgcgagaagggcaagatgtgattatgtcaatacgtgtgcaaggcgaacccaagcctgtggtgagttggctgcgaaacagacagccggttaggcctgatcagaggcggttcgccgaggaagcggaaggagggctctgtcgcctgcgtattttggctgccgaacgaggggatgcaggtttttacacttgtaaagctgtgaatgaatacggcgcacgccagtgcgaagcacgtctcgaggtgagaggagaatag

SEQ ID NO: 299384 - DNA, 513 bp, Artificial Sequence
  derived and/or modified sequence
atggccacagccaccaatgagctgggccaggccacctgtgccgccagcctgactgtgcggcctgggggcagcaccagccccttcagcagccccatcaccagtgatgaggagtacctgagccccccagaggagttccctgagcccggggagacctggcccaggacccccaccatgaagcccagccccagccagaacagaagaagcagtgacaccggcagcaaggccccacccaccttcaaggtgtccctgatggaccagagcgtgcgggagggccaggatgtgatcatgagcatccgggtgcagggcgagcccaagcctgtggtgtcctggctgaggaaccggcagcctgtgcggccagaccagaggagatttgctgaggaggccgagggcggcctgtgccgcctgcgcatcctggccgctgagagaggagatgctggcttctacacctgcaaggctgtgaatgaatatggagcccggcagtgtgaggcccggctggaggtgcggggggagtag

SEQ ID NO: 299385 - DNA, 513 bp, Artificial Sequence
  derived and/or modified sequence
atggccaccgccaccaacgagctgggccaggccacctgcgccgcctccctgaccgttagacccgggggtagtacgagcccattctcctcccccattacctccgacgaagagtatctgagccccccagaggagtttcctgagccaggcgagacttggccgcggactccaacaatgaaaccaagcccctcccagaaccgtagatcttccgacaccgggtctaaggccccgcctacgttcaaggtttccctgatggaccagagcgtgagagagggccaggacgtgattatgtctatacgggtccagggtgagcccaagcccgtagtcagctggctgcgcaaccgtcagcccgtgcgaccagatcaacggagattcgctgaggaagcggagggagggctgtgcaggcttcggatactggcagccgaacgaggtgacgctggtttctacacttgtaaggcagttaatgagtacggagctaggcaatgcgaggccaggcttgaggtaaggggtgagtag

SEQ ID NO: 299386 - DNA, 513 bp, Artificial Sequence
  derived and/or modified sequence
atggcgactgccacaaacgagttagggcaggccacctgtgcagcatcactcactgtccgccctgggggaagcaccagccctttctccagccctatcacctctgatgaagagtatttgtcaccccctgaggagttccccgagcccggtgagacatggcccaggactccaaccatgaaacccagtccctcccagaaccggcgtagcagcgacactggctctaaagcaccacccacctttaaagtcagcttgatggaccagtctgtcagagagggccaggacgtgatcatgagtatcagagttcagggcgagcccaaacctgtggtgtcttggctgcgcaacaggcagccagttcggccagaccagaggcgattcgccgaggaggctgagggagggctatgtaggctgcggatcctggcagctgaacggggtgatgctgggttttacacatgcaaagccgtgaacgagtacggggctcggcagtgtgaagcgaggctggaggtgaggggtgagtag

SEQ ID NO: 299387 - DNA, 513 bp, Artificial Sequence
  derived and/or modified sequence
atggccaccgccaccaacgagctgggccaggccacctgcgccgccagcctgaccgtgagacccggcggcagcaccagccccttcagcagccccatcaccagcgacgaggagtacctgagcccccccgaggagttccccgagcccggcgagacctggcccagaacccccaccatgaagcccagccccagccagaacagaagaagcagcgacaccggcagcaaggccccccccaccttcaaggtgagcctgatggaccagagcgtgagagagggccaggacgtgatcatgagcatcagagtgcagggcgagcccaagcccgtggtgagctggctgagaaacagacagcccgtgagacccgaccagagaagattcgccgaggaggccgagggcggcctgtgcagactgagaatcctggccgccgagagaggcgacgccggcttctacacctgcaaggccgtgaacgagtacggcgccagacagtgcgaggccagactggaggtgagaggcgagtag

SEQ ID NO: 299388 - protein, 823 aa, Artificial Sequence
  derived and/or modified sequence
MKINNEEIVSDPIYIEVQGLPHFTKQPESMNVTRNTAFNLTCQAVGPPEPVNIFWVQNSSRVNEQPEKSPSVLTVPGLTEMAVFSCEAHNDKGLTVSKGVQINIKAIPSPPTEVSIRNSTAHSILISWVPGFDGYSPFRNCSIQVKEADPLSNGSVMIFNTSALPHLYQIKQLQALANYSIGVSCMNEIGWSAVSPWILASTTEGAPSVAPLNVTVFLNESSDNVDIRWMKPPTKQQDGELVGYRISHVWQSAGISKELLEEVGQNGSRARISVQVHNATCTVRIAAVTRGGVGPFSDPVKIFIPAHGWVDYAPSSTPAPGNADPVLIIFGCFCGFILIGLILYISLAIRKRVQETKFGNAFTEEDSELVVNYIAKKSFCRRAIELTLHSLGVSEELQNKLEDVVIDRNLLILGKILGEGEFGSVMEGNLKQEDGTSLKVAVKTMKLDNSSQREIEEFLSEAACMKDFSHPNVIRLLGVCIEMSSQGIPKPMVILPFMKYGDLHTYLLYSRLETGPKHIPLQTLLKFMVDIALGMEYLSNRNFLHRDLAARNCMLRDDMTVCVADFGLSKKIYSGDYYRQGRIAKMPVKWIAIESLADRVYTSKSDVWAFGVTMWEIATRGMTPYPGVQNHEMYDYLLHGHRLKQPEDCLDELYEIMYSCWRTDPLDRPTFSVLRLQLEKLLESLPDVRNQADVIYVNTQLLESSEGLAQGSTLAPLDLNIDPDSIIASCTPRAAISVVTAEVHDSKPHEGRYILNGGSEEWEDLTSAPSAAVTAEKNSVLPGERLVRNGVSWSHSSMLPLGSSLPDELLFADDSSEGSEVLM

SEQ ID NO: 299389 - DNA, 1671 bp, Artificial Sequence
  derived and/or modified sequence
atgaagccccccaccaagcagcaggacggcgagctggtgggctacagaatcagccacgtgtggcagagcgccggcatcagcaaggagctgctggaggaggtgggccagaacggcagcagagccagaatcagcgtgcaggtgcacaacgccacctgcaccgtgagaatcgccgccgtgaccagaggcggcgtgggccccttcagcgaccccgtgaagatcttcatccccgcccacggcgagagctacacccacgcccagatcgccagaaacctgcacaaggtgagacccgcctacatcagcctgaccatctgcagcagcctgctgcaggccagcgtgagccacatcttccagaccatgaccggcctgctggtgagcaccagactgggcagactgtgccccctgttcaacagcggcgcctggcagagaagaagctgcgcccaccacctgtggctgctgctgtggatcctgatcggcctgatcctgtacatcagcctggccatcagaaagagagtgcaggagaccaagttcggcaacgccttcaccgaggaggacagcgagctggtggtgaactacatcgccaagaagagcttctgcagaagagccatcgagctgaccctgcacagcctgggcgtgagcgaggagctgcagaacaagctggaggacgtggtgatcgacagaaacctgctgatcctgggcaagatcctgggcgagggcgagttcggcagcgtgatggagggcaacctgaagcaggaggacggcaccagcctgaaggtggccgtgaagaccatgaagctggacaacagcagccagagagagatcgaggagttcctgagcgaggccgcctgcatgaaggacttcagccaccccaacgtgatcagactgctgggcaccagcgagaagtgcagatgggtggccaagagagccctgctgatctgcagcgtgcccaaggagaagatcagcggcgtggacaagaactgcctgcagatccacatccccctgcagaccctgctgaagttcatggtggacatcgccctgggcatggagtacctgagcaacagaaacttcctgcacagagacctggccgccagaaactgcatgctgagagacgacatgaccgtgtgcgtggccgacttcggcctgagcaagaagatctacagcggcgactactacagacagggcagaatcgccaagatgcccgtgaagtggatcgccatcgagagcctggccgacagagtgtacaccagcaagagcgacgtgtgggccttcggcgtgaccatgtgggagatcgccaccagaggcatgaccccctaccccggcgtgcagaaccacgagatgtacgactacctgctgcacggccacagactgaagcagcccaccgcctggatgaactgcgaccaggtgggcatgtgcagaggcgtggagcccaccgacacccccgcccaggagcccttcctgatgtgggagatcgtgtacgagtgcaccctggccggcgagcccatccccgacagacccaccttcagcgtgctgagactgcagctggagaagctgctggagagcctgcccgacgtgagaaaccaggccgacgtgatctacgtgaacacccagctgctggagagcagcgagggcctggccctgcacccctgcagcaccggcctggagcacagaccctag

SEQ ID NO: 299390 - DNA, 1671 bp, Artificial Sequence
  derived and/or modified sequence
atgaaacctcccactaagcagcaggatggggaacttgtgggctatagaatctctcatgtctggcagtccgcaggcatatcgaaagagctccttgaggaggtcggtcagaacggctcacgggcccgcatctcggtccaggtccataacgcaacctgcactgtcagaattgcagccgtgacacgtggaggcgtaggcccattttcagaccctgtgaagatcttcattcccgctcacggggaatcttacacacatgcccaaatagcacgaaatctgcataaggtgagacccgcttacatcagtttaacgatatgcagtagtctcctgcaggcgagtgtttctcacatctttcagacaatgactgggctgttggtttctacacggcttggtaggctgtgtcctctctttaatagcggcgcctggcagcgcagaagttgtgctcaccacttatggttgctcctctggatccttatcggtctcatactgtatatctccctggccattcggaagcgggtgcaagaaaccaagttcggcaacgcctttacggaggaagattcagagctggttgttaattatattgccaagaagtcgttttgtcgtcgggccatcgaactgacactccatagtctgggggtgagtgaggagttgcagaacaaattggaagatgtagttatcgaccgtaacctactgatccttggcaagattctgggagaaggagaatttggttctgtgatggaaggcaatctgaagcaggaggatggtacctctctaaaagtggccgtgaaaaccatgaagctggataactcgagccagagagaaatagaggagttcttatcagaagccgcatgtatgaaggatttttcccatcccaacgtgattcgtcttctgggcacttcggagaaatgcaggtgggtggctaagcgggcgctattgatttgcagcgtcccaaaagaaaagatctctggtgtcgacaagaattgccttcaaatacacattcccctgcagacacttctgaaatttatggttgacatcgcgctgggcatggagtacctgtcaaacagaaactttctgcacagggatcttgctgcgcgcaactgtatgttgagagatgacatgaccgtgtgtgtcgctgactttggactttcgaagaaaatatattcaggggattattatcggcagggaagaatcgccaagatgcccgtgaaatggatcgctatcgaaagcttagccgaccgggtgtatacttcgaagtcagatgtgtgggcctttggtgtgaccatgtgggaaatcgccacgaggggcatgaccccctatcccggtgtgcagaatcacgagatgtacgattacttgctacatggccaccggcttaagcaaccaactgcttggatgaattgtgatcaggtcggcatgtgtagaggggtggaacctacagacacccccgcacaggaaccatttctcatgtgggaaattgtctatgaatgcactctagcgggagaacccatccccgacagaccaaccttctctgttctgcgcctgcaattggagaagctcttagagagcctaccagatgtgcgcaaccaggctgacgtcatctacgtcaatacccagctcctggagtcctctgaagggctggccctgcacccatgctctactggcctcgagcacagaccctag

SEQ ID NO: 299391 - DNA, 1671 bp, Artificial Sequence
  derived and/or modified sequence
atgaagccacccaccaagcagcaggatggagagctggtgggctaccgcatcagccacgtgtggcagagcgctggcatcagcaaggagctgctggaggaggtgggccagaatggcagccgggcccgcatctctgtgcaggtgcacaatgccacctgcaccgtgagaattgctgctgtgacccggggcggcgtgggccccttcagtgaccctgtgaagatcttcatcccagcccacggggagagctacacccacgcccagatcgccaggaacctgcacaaggtgcggcctgcctacatcagcctgaccatctgcagcagcctgctgcaggcctctgtgagccacatcttccagaccatgacaggcctgctggtgtccacccggctgggccgcctgtgccccctcttcaacagcggggcctggcagaggaggagctgtgcccaccacctgtggctgctgctgtggatcctgattggcctcatcctgtacatcagcctggccatcaggaagagggtgcaggagaccaagtttggaaatgccttcacagaagaagattctgagctggtggtgaactacatcgccaagaagagcttctgcagaagagccatcgagctgaccctgcacagcctgggcgtgtctgaggagctgcagaacaagctggaggatgtggtgattgacaggaacctgctgatcctgggcaagatcctgggggagggggagtttggatctgtgatggagggcaacctgaagcaggaggatggcaccagcctgaaggtggccgtgaagaccatgaagctggacaacagcagccagcgggagattgaggagttcctgtctgaggccgcctgcatgaaggacttcagccaccccaacgtcatccggctgctgggcaccagcgagaagtgccgctgggtggccaagagggccctgctgatctgcagcgtgcccaaggagaagatcagcggcgtggacaagaactgcctgcagatccacatccccctgcagaccctgctgaagttcatggtggacatcgccctgggcatggagtacctgagcaacagaaacttcctgcaccgggacctggccgccaggaactgcatgctgagagatgacatgacagtgtgtgtggccgactttggcctgagcaagaagatctacagcggggactactaccggcagggcagaattgccaagatgcctgtgaagtggatcgccatcgagagcctggccgacagagtgtacaccagcaagagtgatgtgtgggccttcggcgtgaccatgtgggagatcgccacccggggcatgaccccctacccaggagtgcagaaccacgagatgtatgactacctgctgcacggccaccggctgaagcagcccacagcctggatgaactgtgaccaggtgggcatgtgccggggcgtggagcccacagacaccccagcccaggagcccttcctgatgtgggagatcgtgtatgagtgcaccctggccggggagcccatcccagaccggcccaccttctctgtgctgcggctgcagctggagaagctgctggagagcctgcctgatgtgaggaaccaggctgatgtgatctacgtgaacacccagctgctggagagcagcgagggcctggccctgcacccctgcagcacaggcctggagcaccggccctag

SEQ ID NO: 299392 - DNA, 1671 bp, Artificial Sequence
  derived and/or modified sequence
atgaagccccccaccaagcagcaggacggcgagctggtgggctaccggatcagccatgtctggcagtccgcaggtataagtaaggagctgctagaagaggtcggccaaaatggtagcagagcacgcataagcgtgcaggtccacaatgctacctgtacggttcgcatcgcagcggtgactagaggcggcgtgggacctttcagtgacccagtgaagatttttatcccagctcatggcgaatcttatacccatgctcagatcgccagaaacttacataaagtgcgacccgcctacatatctttgaccatttgttcatctctgctgcaggcttccgttagccacatttttcaaacaatgaccgggctgttagtttctacaaggctgggccgattatgcccactttttaattcaggagcctggcagaggcggagttgcgcccaccacctctggttgttactatggatccttataggcctgatcttgtatatctctctagctatcaggaagagagtccaggaaacaaaattcgggaatgcttttaccgaagaggacagtgagctggttgtcaattacatcgcaaagaagtcattctgccggcgggctattgagcttaccctccacagcctgggggtgagcgaggagctgcaaaacaaactcgaggacgtggtgatagatcgaaacctgctcatactgggaaagatcttaggggaaggagagttcggatccgtaatggaggggaatcttaaacaggaggatggcacttcacttaaggttgcagtcaagaccatgaagctcgataattcttcgcagcgcgagattgaagaatttctaagcgaagctgcgtgtatgaaggacttctcccacccaaacgtgatacggttgctcgggactagcgagaagtgtcggtgggtcgccaagagagcccttctaatttgctccgtcccaaaggagaagatttccggcgttgacaagaactgcctacagattcatatccctctgcagactctgctgaaattcatggtagacatcgcattagggatggaatatctttctaacagaaatttcttgcatagagatctggccgccaggaactgcatgctaagggacgatatgacagtttgtgtcgcagacttcgggctttccaagaaaatctattccggggactactatcgacaggggcggatcgcaaagatgcctgttaagtggattgctatagagtcccttgctgatcgcgtgtatactagtaagagcgacgtttgggcattcggcgtgacgatgtgggagatcgcgactcggggcatgacaccgtaccctggcgtgcagaaccacgagatgtacgactatctgctccatgggcacaggctcaagcagcccacagcttggatgaattgtgatcaagtcgggatgtgtagaggggtggaacctactgatacccctgctcaggaaccattcctgatgtgggaaatagtgtacgaatgcaccctagcaggagagcctatccccgacagaccaaccttcagtgtgttgaggctgcaactcgagaagttgctggagagcctgccagacgtgagaaaccaagctgatgtcatctacgtcaacacccaactacttgaatcatctgaagggctggcattgcatccctgctcaaccggcctagagcaccgcccatag

SEQ ID NO: 299393 - DNA, 1671 bp, Artificial Sequence
  derived and/or modified sequence
atgaagccaccaacaaaacagcaagatggcgagctggtggggtacagaatttcgcacgtctggcaaagcgctgggatctccaaggaactcctagaggaggtagggcagaacggcagcagggccaggatctccgtgcaagtccacaatgccacttgtactgtcaggatcgccgctgttacccgcggaggggttggcccattctctgatcccgtcaagatcttcatacctgcacacggagaatcatacacacatgcccagattgccaggaatctgcataaagtgagaccggcatacatctcccttaccatatgtagcagcttgttacaggcatctgtgtctcacatattccagacgatgaccggcctcttagtctctaccaggcttgggagactgtgcccactgtttaactccggcgcttggcagaggcgatcctgcgcgcaccacttgtggctgctgctgtggatcttaatcggactgatcctatatatttctctggctatcagaaaaagagtccaggaaaccaagtttggcaatgcttttacggaggaggatagcgaactggttgtgaattacatcgcaaaaaaatctttttgtcgacgcgcaatagaattaacgctacactccctgggggtgtcggaagaactccagaataagctggaggatgtggtaattgataggaatcttctaatcttaggaaagattctcggtgagggagaatttggcagtgtgatggaggggaacctcaagcaggaggatggcacgtccctgaaggtcgccgttaagacaatgaagctggataactctagtcagagggagatagaggaattcctaagcgaggcggcttgtatgaaggacttctctcaccctaacgtgattaggctactcggaacttccgagaaatgtaggtgggttgccaagcgggctctgctgatctgttcagtccccaaggagaaaatcagcggcgtggataaaaactgcctacagatccacatccctctccagaccctccttaagtttatggtggatattgccctggggatggagtatctcagtaaccgcaatttccttcacagggatcttgctgcgcgaaactgtatgcttcgggatgatatgactgtttgcgtggcagatttcggacttagtaaaaaaatttactccggagattattaccgacaaggtaggatagcaaaaatgccagtcaaatggattgccattgagtcactggcggatcgcgtgtatacctctaagtcggacgtatgggctttcggcgtcaccatgtgggagatcgcaacccgcggtatgactccatatccaggcgtgcagaatcatgaaatgtacgactacctgctccacggccacaggttgaagcagcccactgcctggatgaactgtgatcaggttggaatgtgccggggagtggagccaaccgacacccccgctcaggaacccttccttatgtgggaaattgtctacgagtgtactctcgccggagagccaattcctgaccgcccaacattctccgttctgcgcttacaactggaaaagcttcttgaaagcctgcctgatgtgcgcaatcaggctgatgtgatctatgtaaatacccagctcctggagtcttctgaggggcttgcgctccatccttgctccacagggttggaacatcgcccatag

SEQ ID NO: 299394 - protein, 332 aa, Artificial Sequence
  derived and/or modified sequence
MEYLGGGSALDLLKPGPLEETYIATILREILKGLDYLHSERKIHRDIKAANVLLSEQGDVKLADFGVAGQLTDTQIKRNTFVGTPFWMAPEVIKQSAYDFKADIWSLGITAIELAKGEPPNSDLHPMRVLFLIPKNSPPTLEGQHSKPFKEFVEACLNKDPRFRPTAKELLKHKFITRYTKKTSFLTELIDRYKRWKSEGHGEESSSEDSDIDGEAEDGEQGPIWTFPPTIRPSPHSKLHKGTALHSSQKPAEPVKRQPRSQCLSTLVRPVFGELKEKHKQSGGSVGALEELENAFSLAEESCPGISDKLMVHLVERVQRFSHNRNHLTSTR

SEQ ID NO: 299395 - DNA, 459 bp, Artificial Sequence
  derived and/or modified sequence
atggcccacctgagaggcttcgccaaccagcacagcagagtggaccccgaggagctgttcaccaagctggacagaatcggcaagggcagcttcggcgaggtgtacaagggcatcgacaaccacaccaaggaggtggtggccatcaagatcatcgacctggaggaggccgaggacgagatcgaggacatccagcaggagatcaccgtgctgagccagtgcgacagcccctacatcaccagatacttcggcagctacctgaagagcaccaagctgtggatcatcatggagtacctgggcggcggcagcgccctggacctgctgaagcccggccccctggaggagacctacatcgccaccatcctgagagagatcctgaagggcctggactacctgcacagcgagagaaagatccacagagacatcaaggccgccaacgtgctgctgagcgagcagggctag

SEQ ID NO: 299396 - DNA, 459 bp, Artificial Sequence
  derived and/or modified sequence
atggctcacctgcggggcttcgcaaatcagcattctcgtgtggaccctgaggagttatttacaaaactggaccggatcggtaaggggagttttggcgaagtgtataagggaatcgataatcacacaaaggaggttgttgcaatcaagattattgatctggaggaggcggaggacgagatcgaggacatccagcaggaaatcactgtgctaagtcagtgtgactccccttacatcactaggtactttggctcttatctgaagagcacgaagctttggattatcatggaatatttggggggaggatccgctcttgacctgctgaaaccgggtccattagaggaaacatacatcgctaccatcctgagagaaatccttaaaggactggattatctgcactctgagagaaaaatccatcgcgatattaaggccgctaatgtgcttctgtccgaacaaggctag

SEQ ID NO: 299397 - DNA, 459 bp, Artificial Sequence
  derived and/or modified sequence
atggcccacctgcggggctttgccaaccagcacagccgggtggaccctgaggagctgttcaccaagctggaccgcatcggcaagggcagctttggagaggtgtacaagggcatcgacaaccacaccaaggaggtggtggccatcaagatcatcgacctggaggaggctgaagatgaaattgaggacatccagcaggagatcaccgtgctgagccagtgtgacagcccctacatcacccgctacttcggcagctacctgaagagcaccaagctgtggatcatcatggagtacctgggcggcggcagcgccctggacctgctgaagccaggccccctggaggagacctacatcgccaccatcctgcgggagatcctgaagggcctggactacctgcacagcgagaggaagatccaccgggacatcaaggccgccaacgtgctgctgtctgagcagggctag

SEQ ID NO: 299398 - DNA, 459 bp, Artificial Sequence
  derived and/or modified sequence
atggcccacctgcggggcttcgccaaccagcacagccgggtggacccggaggagctgtttaccaaactggatcgcattgggaagggcagctttggggaagtgtacaagggcatcgacaatcacaccaaagaagtagtagcaattaagattatcgacctcgaagaggccgaggacgaaatcgaggatattcagcaagagataactgttctctctcagtgcgactcaccttacattaccagatatttcggctcttacctcaagtctacaaagctctggatcattatggagtacctgggcggtggcagtgcattggacctattgaagcctggcccactcgaggagacttatatagccactatactgcgggagatcctgaaggggttggattacctgcatagtgaaagaaaaatccatcgggatatcaaagccgctaacgttctgctaagtgaacaaggttag

SEQ ID NO: 299399 - DNA, 459 bp, Artificial Sequence
  derived and/or modified sequence
atggcgcacttgaggggcttcgccaaccagcattctcgcgttgaccccgaagagctgttcaccaagctcgaccgcattggcaagggatccttcggggaagtttataaaggcattgacaaccacacaaaggaggttgtcgctattaagataatcgacttggaggaggcagaagatgaaatcgaggatatccagcaggaaatcacggtgttatctcaatgtgatagcccatacatcactaggtacttcgggagctacctcaaatctaccaagctatggatcataatggagtacttgggaggaggttcggcgttagatctgttgaagcccggacctcttgaagagacctacatcgccactattctgcgagagatcctgaaaggccttgattatttacatagtgagagaaaaatacaccgcgatattaaggctgccaacgttcttctgagtgagcaggggtag

SEQ ID NO: 299400 - DNA, 600 bp, Artificial Sequence
  derived and/or modified sequence
gggacaccggggcgggggcaccgggaggaagctgccttggaagagtggactgacgccgcaggggcgagctagccggctccgcgcctctccgcgggatccagacgcctcctggggctgctggcggagggtctgaggcggcgcggccatggctcacctccggggatttgccaaccagcactctcgagtggaccctgaggagctcttcaccaagctcgaccgcattggcaagggctcgtttggggaggtctacaagggcatcgataaccacacaaaggaggtggtggccatcaagatcatcgacctggaggaggccgaggatgagatcgaggacatccagcaggagatcactgtcctcagtcagtgcgacagcccctacatcacccgctactttggctcctacctaaagagcaccaagctatggatcatcatggagtacctgggcggcggctcagcactggacttgcttaaaccaggtcccctggaggagacatacattgccacgatcctgcgggagattctgaagggcctggattatctgcactccgaacgcaagatccaccgagacatcaaagctgccaacgtgctactctcggagcaggg

SEQ ID NO: 299401 - DNA, 4303 bp, Artificial Sequence
  derived and/or modified sequence
ggggcagacggccggagagccaggtgtgccagggacctatggcagcagggctgaacgtgcccgctccagcctctccagtgctgggagagacctctagatggtgcaggtgagtttgcaatgagggaaagcccctcggcaaggactgagtttccaaacttgcagacagggcagggagcggtcaaggaagagttcccgggaagccctttaaacggaaaggaagcggggctagtgtcagagaggtgtgccaggtcccaggcagccctgctggcccctaaggacatagagtacctgcttctgagagggctgccacggtggccacctgtgaagcctgtcacccagaactggatggtacctgactttcttcatagacccatcttctgctgggactgaagctgacctccaacagaagccaggtgagcccttgggagaggatggcccatgtgggggactgcacgcagacgccctggctccccgtcctggtggtgtctctgatgtgctcagcccgagcggaatactcaaactgcggtgagaacgagtactacaaccagactacggggctgtgccaggagtgccccccgtgtgggccgggagaggagccctacctgtcctgtggctacggcaccaaagacgaggactacggctgcgtcccctgcccggcggagaagttttccaaaggaggctaccagatatgcaggcgtcacaaagactgtgagggcttcttccgggccaccgtgctgacaccaggggacatggagaatgacgctgagtgtggcccttgcctccctggctactacatgctggagaacagaccgaggaacatctatggcatggtctgctactcctgcctcctggcaccccccaacaccaaggaatgtgtgggagccacttcaggagcttctgccaacttccctggcacctcgggcagcagcaccctgtctcccttccagcacgcccacaaagaactctcaggccaaggacacctggccactgccctgatcattgcaatgtccaccatcttcatcatggccatcgccatcgtcctcatcatcatgttctacatcctgaagacaaagccctctgccccaggtgacggcccccatgcgccggtgccctgcttcctggactctccgtcaactccccctgtcggagagcctggctgctcactccctcctctctccccagcctgttgcaccagccacccggggaagagcgtggaggcccaagtgagcaaggacgaggagaagaaagaggccccagacaacgtggtgatgttctccgagaaggatgaatttgagaagctgacagcaactccagcaaagcccaccaagagcgagaacgatgcctcatccgagaatgagcagctgctgagccggagcgtcgacagtgatgaggagcccgcccctgacaagcagggctccccggagctgtgcctgctgtcgctggttcacctggccagggagaagtctgccaccagcaacaagtcagccgggattcaaagccggaggaaaaagatcctcgatgtgtatgccaacgtgtgtggagtcgtggaaggtcttagccccacggagctgccatttgattgcctcgagaagactagccgaatgctcagctccacgtacaactctgagaaggctgttgtgaaaacgtggcgccacctcgccgagagcttcggcctgaagagggatgagattgggggcatgacagacggcatgcaactctttgaccgcatcagcacggcaggctacagcatccctgagctactcacaaaactggtgcagattgagcggctggatgctgtggagtccttgtgtgcagacatactggagtgggcgggggttgtgccacctgcctcccagccacatgctgcatcctgaaaagcatgcctgtgggctgtcctcccaggacaagccaaggagccaacgagggctctggagctgtgagtggtgccaaaagactgccaagaatcaaggcttttgtgatatgtcaccgtatgccttaggatgttcaaggagccagacgaaataaggcctgtcttccaatttaaccaaagataaaggactagagccgggatactttcagatgctcgcctgtacctcaccaggcagagtaaatatctactcactcatacagccagcccaccagcccaccattaactcactgaacaatgagacaatgttgaggactcaaatgaatcaaaccccgtgggaatgacagaagtgaagaatctggtccctgtctttaaggagtttgcactccagtagaagacagaaggaacgtatgtttacaaaccacttcactggaagacgtcaaacaagctgaatgaaggggcgcttagaaaacgttaatagaagttctaagcgggagatgactccctactgggatgatgaaggatggcatcctagtgaagaagcagctcaaacattttgataaaatggcaacaaaatgcagacaccctgctccaggtattatttcaggtttagtacaagtctgttaataccctatgtggtttcattaggataactttttacctatccttgaggtcatccatattcttacaggccttccagtcaataatggaagagctcactctatacaaaaccaatatgcaaggcatgtgtttgtccaagcaattggatgtgtgcagtagccaatttcatttactgcattactctttggcctgggaaccctgtggtctgcactacatgtgaatggccttccacttcagtcttaggcagatttgaccttttaggggcagcaatgctgaaggacacagcaatttaaattataatgtgtcaggctgtgttttcacttcaaacatgtatgagtagtcagctgtaattagagaaatgatgacttcctaagagttcagccacgcataattctagatttcaagagcatctaagacttgtggattagcctcatggcatgagagtttcagactcagccttctgagccagtcagggaaagtggagttctgcagcgcaaatgagagcctgggcttgatgtcgagggagctggcttctagttgtgccaccttgggccttgtcttttcctctctctgcctcagtttctcgtctgccaatgagatgttagttagtgattctataattggggcaggtagggttcaggtgagcaaaaagaaagtggagctataggaaatgccaggcctttgaggtgctctatggaagtcaacacagtgtggtttgtccatttaaatgggaataaaaacagaaaaactcagacttggcattttcacaataactgcaatggtttgacataacatttataggcagaaagttaataaactggcattgttcttggcatattattgtactatccctgtaactgccaagagctcaggagccaggctagtgatcacaccaggggttagagttcactgctgaactccctgatggcaggtctgtgtttattactacattaaaacaaagtctctgacttataaagcgaggttgtaaaaattacaagttgcatgactgaaaaaatgctttagggggaaaatcagtcatatctttaacaccaacaagcaatttcccaccaacgaatgtagtacatactgtgagaggatcataatgaggtcctgaatatttaatatcatcatttactgtgtctgtttgctgctgtttttcgaacctatttggtttaccctgcaagctaaatactccacggcagagcttaattatccttttaattcctctttgaaatcctgtggtgcccccttccccctgccttgtgatgatgatgagtgagtctccccttaattagactgcaaatgtcacttgtgatgagtgtgccattccaggataacagcttgcaccctcctcagaatgttttcagcgaaagagtggggtggctgttctctgctcctggtgctttggcctcatttcacactattagaattctggggctgtaaggccagccagtgtcagctcatgttccattggctctccacctgccatttttagggagctattccttatatagttacaaattcccttgtcatttacttatttggaaacatgggatttactctgacaagctttagcctatgttatgggattcagaacaatgagatcataataattctcactgaccaaagctgggactccatcctgccatttttgtgtggagatattcataattctgcaatactttaaaacatttagaaaacaccccagggtaggtctgtggcccttagacagtgaagtcttaattgtcaatattatttttgtctaattctgtatatatataacttattatattttataatctcaataaacacatt

SEQ ID NO: 299402 - DNA, 4323 bp, Artificial Sequence
  derived and/or modified sequence
caggtgagtttgcaatgagggaaagcccctcggcaaggactgagtttccaaacttgcagacagggcagggagcggtcaaggaagagttcccgggaagccctttaaacggaaaggaagcggggctagtgtcagagaggtgtgccaggtcccaggcagccctgctggcccctaaggacatagagtacctgcttctgagagggctgccacggtggccacctgtgaagcctgtcacccagaactggatggtacctgactttcttcatagacccatcttctgctgggactgaagctgacctccaacagaagccagaccatccgagccatcctgggaggctcagcctccaccacccatgtgggcaccttctgcattacctacaatagccagcctgagaggagcagcaagccctctgcaggccctcgggacacgtgagcccttgggagaggatggcccatgtgggggactgcacgcagacgccctggctccccgtcctggtggtgtctctgatgtgctcagcccgagcggaatactcaaactgcggtgagaacgagtactacaaccagactacggggctgtgccaggagtgccccccgtgtgggccgggagaggagccctacctgtcctgtggctacggcaccaaagacgaggactacggctgcgtcccctgcccggcggagaagttttccaaaggaggctaccagatatgcaggcgtcacaaagactgtgagggcttcttccgggccaccgtgctgacaccaggggacatggagaatgacgctgagtgtggcccttgcctccctggctactacatgctggagaacagaccgaggaacatctatggcatggtctgctactcctgcctcctggcaccccccaacaccaaggaatgtgtgggagccacttcaggagcttctgccaacttccctggcacctcgggcagcagcaccctgtctcccttccagcacgcccacaaagaactctcaggccaaggacacctggccactgccctgatcattgcaatgtccaccatcttcatcatggccatcgccatcgtcctcatcatcatgttctacatcctgaagacaaagccctctgccccaggtgacggcccccatgcgccggtgccctgcttcctggactctccgtcaactccccctgtcggagagcctggctgctcactccctcctctctccccagcctgttgcaccagccacccggggaagagcgtggaggcccaagtgagcaaggacgaggagaagaaagaggccccagacaacgtggtgatgttctccgagaaggatgaatttgagaagctgacagcaactccagcaaagcccaccaagagcgagaacgatgcctcatccgagaatgagcagctgctgagccggagcgtcgacagtgatgaggagcccgcccctgacaagcagggctccccggagctgtgcctgctgtcgctggttcacctggccagggagaagtctgccaccagcaacaagtcagccgggattcaaagccggaggaaaaagatcctcgatgtgtatgccaacgtgtgtggagtcgtggaaggtcttagccccacggagctgccatttgattgcctcgagaagactagccgaatgctcagctccacgtacaactctgagaaggctgttgtgaaaacgtggcgccacctcgccgagagcttcggcctgaagagggatgagattgggggcatgacagacggcatgcaactctttgaccgcatcagcacggcaggctacagcatccctgagctactcacaaaactggtgcagattgagcggctggatgctgtggagtccttgtgtgcagacatactggagtgggcgggggttgtgccacctgcctcccagccacatgctgcatcctgaaaagcatgcctgtgggctgtcctcccaggacaagccaaggagccaacgagggctctggagctgtgagtggtgccaaaagactgccaagaatcaaggcttttgtgatatgtcaccgtatgccttaggatgttcaaggagccagacgaaataaggcctgtcttccaatttaaccaaagataaaggactagagccgggatactttcagatgctcgcctgtacctcaccaggcagagtaaatatctactcactcatacagccagcccaccagcccaccattaactcactgaacaatgagacaatgttgaggactcaaatgaatcaaaccccgtgggaatgacagaagtgaagaatctggtccctgtctttaaggagtttgcactccagtagaagacagaaggaacgtatgtttacaaaccacttcactggaagacgtcaaacaagctgaatgaaggggcgcttagaaaacgttaatagaagttctaagcgggagatgactccctactgggatgatgaaggatggcatcctagtgaagaagcagctcaaacattttgataaaatggcaacaaaatgcagacaccctgctccaggtattatttcaggtttagtacaagtctgttaataccctatgtggtttcattaggataactttttacctatccttgaggtcatccatattcttacaggccttccagtcaataatggaagagctcactctatacaaaaccaatatgcaaggcatgtgtttgtccaagcaattggatgtgtgcagtagccaatttcatttactgcattactctttggcctgggaaccctgtggtctgcactacatgtgaatggccttccacttcagtcttaggcagatttgaccttttaggggcagcaatgctgaaggacacagcaatttaaattataatgtgtcaggctgtgttttcacttcaaacatgtatgagtagtcagctgtaattagagaaatgatgacttcctaagagttcagccacgcataattctagatttcaagagcatctaagacttgtggattagcctcatggcatgagagtttcagactcagccttctgagccagtcagggaaagtggagttctgcagcgcaaatgagagcctgggcttgatgtcgagggagctggcttctagttgtgccaccttgggccttgtcttttcctctctctgcctcagtttctcgtctgccaatgagatgttagttagtgattctataattggggcaggtagggttcaggtgagcaaaaagaaagtggagctataggaaatgccaggcctttgaggtgctctatggaagtcaacacagtgtggtttgtccatttaaatgggaataaaaacagaaaaactcagacttggcattttcacaataactgcaatggtttgacataacatttataggcagaaagttaataaactggcattgttcttggcatattattgtactatccctgtaactgccaagagctcaggagccaggctagtgatcacaccaggggttagagttcactgctgaactccctgatggcaggtctgtgtttattactacattaaaacaaagtctctgacttataaagcgaggttgtaaaaattacaagttgcatgactgaaaaaatgctttagggggaaaatcagtcatatctttaacaccaacaagcaatttcccaccaacgaatgtagtacatactgtgagaggatcataatgaggtcctgaatatttaatatcatcatttactgtgtctgtttgctgctgtttttcgaacctatttggtttaccctgcaagctaaatactccacggcagagcttaattatccttttaattcctctttgaaatcctgtggtgcccccttccccctgccttgtgatgatgatgagtgagtctccccttaattagactgcaaatgtcacttgtgatgagtgtgccattccaggataacagcttgcaccctcctcagaatgttttcagcgaaagagtggggtggctgttctctgctcctggtgctttggcctcatttcacactattagaattctggggctgtaaggccagccagtgtcagctcatgttccattggctctccacctgccatttttagggagctattccttatatagttacaaattcccttgtcatttacttatttggaaacatgggatttactctgacaagctttagcctatgttatgggattcagaacaatgagatcataataattctcactgaccaaagctgggactccatcctgccatttttgtgtggagatattcataattctgcaatactttaaaacatttagaaaacaccccagggtaggtctgtggcccttagacagtgaagtcttaattgtcaatattatttttgtctaattctgtatatatataacttattatattttataatctcaataaacacattaataaga

SEQ ID NO: 299403 - DNA, 4214 bp, Artificial Sequence
  derived and/or modified sequence
ggggcagacggccggagagccaggtgtgccagggacctatggcagcagggctgaacgtgcccgctccagcctctccagtgctgggagagacctctagatggtgcaggtgagtttgcaatgagggaaagcccctcggcaaggactgagtttccaaacttgcagacagggcagggagcggtcaaggaagagttcccgggaagccctttaaacggaaaggaagcggggctagtgtcagagaggtgtgccaggtcccaggcagccctgctggcccctaaggacatagagtacctgcttctgagagggctgccacggtggccacctgtgaagcctgtcacccagaactggatggtacctgactttcttcatagacccatcttctgctgggactgaagctgacctccaacagaagccaggtgagcccttgggagaggatggcccatgtgggggactgcacgcagacgccctggctccccgtcctggtggtgtctctgatgtgctcagcccgagcggaatactcaaactgcggtgagaacgagtactacaaccagactacggggctgtgccaggagtgccccccgtgtgggccgggagaggagccctacctgtcctgtggctacggcaccaaagacgaggactacggctgcgtcccctgcccggcggagaagttttccaaaggaggctaccagatatgcaggcgtcacaaagactgtgagggcttcttccgggccaccgtgctgacaccaggggacatggagaatgacgctgagtgtggcccttgcctccctggctactacatgctggagaacagaccgaggaacatctatggcatggtctgctactcctgcctcctggcaccccccaacaccaaggaatgtgtgggagccacttcaggagcttctgccaacttccctggcacctcgggcagcagcaccctgtctcccttccagcacgcccacaaagaactctcaggccaaggacacctggccactgccctgatcattgcaatgtccaccatcttcatcatggccatcgccatcgtcctcatcatcatgttctacatcctgaagacaaagccctctgccccagcctgttgcaccagccacccggggaagagcgtggaggcccaagtgagcaaggacgaggagaagaaagaggccccagacaacgtggtgatgttctccgagaaggatgaatttgagaagctgacagcaactccagcaaagcccaccaagagcgagaacgatgcctcatccgagaatgagcagctgctgagccggagcgtcgacagtgatgaggagcccgcccctgacaagcagggctccccggagctgtgcctgctgtcgctggttcacctggccagggagaagtctgccaccagcaacaagtcagccgggattcaaagccggaggaaaaagatcctcgatgtgtatgccaacgtgtgtggagtcgtggaaggtcttagccccacggagctgccatttgattgcctcgagaagactagccgaatgctcagctccacgtacaactctgagaaggctgttgtgaaaacgtggcgccacctcgccgagagcttcggcctgaagagggatgagattgggggcatgacagacggcatgcaactctttgaccgcatcagcacggcaggctacagcatccctgagctactcacaaaactggtgcagattgagcggctggatgctgtggagtccttgtgtgcagacatactggagtgggcgggggttgtgccacctgcctcccagccacatgctgcatcctgaaaagcatgcctgtgggctgtcctcccaggacaagccaaggagccaacgagggctctggagctgtgagtggtgccaaaagactgccaagaatcaaggcttttgtgatatgtcaccgtatgccttaggatgttcaaggagccagacgaaataaggcctgtcttccaatttaaccaaagataaaggactagagccgggatactttcagatgctcgcctgtacctcaccaggcagagtaaatatctactcactcatacagccagcccaccagcccaccattaactcactgaacaatgagacaatgttgaggactcaaatgaatcaaaccccgtgggaatgacagaagtgaagaatctggtccctgtctttaaggagtttgcactccagtagaagacagaaggaacgtatgtttacaaaccacttcactggaagacgtcaaacaagctgaatgaaggggcgcttagaaaacgttaatagaagttctaagcgggagatgactccctactgggatgatgaaggatggcatcctagtgaagaagcagctcaaacattttgataaaatggcaacaaaatgcagacaccctgctccaggtattatttcaggtttagtacaagtctgttaataccctatgtggtttcattaggataactttttacctatccttgaggtcatccatattcttacaggccttccagtcaataatggaagagctcactctatacaaaaccaatatgcaaggcatgtgtttgtccaagcaattggatgtgtgcagtagccaatttcatttactgcattactctttggcctgggaaccctgtggtctgcactacatgtgaatggccttccacttcagtcttaggcagatttgaccttttaggggcagcaatgctgaaggacacagcaatttaaattataatgtgtcaggctgtgttttcacttcaaacatgtatgagtagtcagctgtaattagagaaatgatgacttcctaagagttcagccacgcataattctagatttcaagagcatctaagacttgtggattagcctcatggcatgagagtttcagactcagccttctgagccagtcagggaaagtggagttctgcagcgcaaatgagagcctgggcttgatgtcgagggagctggcttctagttgtgccaccttgggccttgtcttttcctctctctgcctcagtttctcgtctgccaatgagatgttagttagtgattctataattggggcaggtagggttcaggtgagcaaaaagaaagtggagctataggaaatgccaggcctttgaggtgctctatggaagtcaacacagtgtggtttgtccatttaaatgggaataaaaacagaaaaactcagacttggcattttcacaataactgcaatggtttgacataacatttataggcagaaagttaataaactggcattgttcttggcatattattgtactatccctgtaactgccaagagctcaggagccaggctagtgatcacaccaggggttagagttcactgctgaactccctgatggcaggtctgtgtttattactacattaaaacaaagtctctgacttataaagcgaggttgtaaaaattacaagttgcatgactgaaaaaatgctttagggggaaaatcagtcatatctttaacaccaacaagcaatttcccaccaacgaatgtagtacatactgtgagaggatcataatgaggtcctgaatatttaatatcatcatttactgtgtctgtttgctgctgtttttcgaacctatttggtttaccctgcaagctaaatactccacggcagagcttaattatccttttaattcctctttgaaatcctgtggtgcccccttccccctgccttgtgatgatgatgagtgagtctccccttaattagactgcaaatgtcacttgtgatgagtgtgccattccaggataacagcttgcaccctcctcagaatgttttcagcgaaagagtggggtggctgttctctgctcctggtgctttggcctcatttcacactattagaattctggggctgtaaggccagccagtgtcagctcatgttccattggctctccacctgccatttttagggagctattccttatatagttacaaattcccttgtcatttacttatttggaaacatgggatttactctgacaagctttagcctatgttatgggattcagaacaatgagatcataataattctcactgaccaaagctgggactccatcctgccatttttgtgtggagatattcataattctgcaatactttaaaacatttagaaaacaccccagggtaggtctgtggcccttagacagtgaagtcttaattgtcaatattatttttgtctaattctgtatatatataacttattatattttataatctcaataaacacattaataaga

SEQ ID NO: 299404 - protein, 768 aa, Artificial Sequence
  derived and/or modified sequence
MAQQGQQGQMASGDSNLNFRMVAEIQNVEGQNLQEQVCPEPIFRFFRENKVEIASAITRPFPFLMGLRDRSFISEQMYEHFQEAFRNLVPVTRVMYCVLSELEKTFGWSHLEALFSRINLMAYPDLNEIYRSFQNVCYEHSPLQMNNVNDLEDRPRLLPYGKQENSNACHEMDDIAVPQEALSSSPRCEPGFSSESCEQLALPKAGGGDAEDAPSLLPGGGETFDLKTPQVTNEGEPEKGLCLLPGEGEEGSDDCSEMCDGEEPQEASSSLARCGSVSCLSAETFDLKTPQVTNEGEPEKELSLLPGEGEEGSDDCSEMCDGEERQEASSSLARRGSVSSELENHPMNEEGESEELASSLLYDNVPGAEQSAYENEKCSCVMCFSEEVPGSPEARTESDQACGTMDTVDIANNSTLGKPKRKRRKKRGHGWSRMRMRRQENSQQNDNSKADGQVVSSEKKANVNLKDLSKIRGRKRGKPGTRFTQSDRAAQKRVRSRASRKHKDETVDFKAPLLPVTCGGVKGILHKKKLQQGILVKCIQTEDGKWFTPTEFEIKGGHARSKNWRLSVRCGGWPLRWLMENGFLPDPPRIRYRKKKRILKSQNNSSVDPCMRNLDECEVCRDGGELFCCDTCSRVFHEDCHIPPVEAERTPWNCIFCRMKESPGSQQCCQESEVLERQMCPEEQLKCEFLLLKVYCCSESSFFAKIPYYYYIREACQGLKEPMWLDKIKKRLNEHGYPQVEGFVQDMRLIFQNHRASYKAVHGRPGCR

SEQ ID NO: 299405 - DNA, 2307 bp, Artificial Sequence
  derived and/or modified sequence
atggcgcaacagggccagcaggggcagatggcatccggcgactcgaacctcaacttccgaatggtagccgaaattcagaatgtggagggtcaaaacctccaagagcaggtatgcccagaacccatttttcgatttttccgcgagaataaggtagaaatcgcctctgctatcaccagacctttcccattcttgatgggacttagggatcggagttttataagcgaacagatgtatgaacatttccaggaagcttttcggaacctcgtgccggtaacaagagtgatgtattgcgttctgtctgagttagaaaagaccttcggatggtcacatctagaggccttgttcagtcggatcaacctgatggcataccccgatttaaatgaaatttatcgatcattccagaacgtgtgctacgagcattcaccactccagatgaataacgtcaacgatcttgaggaccgcccaagattgctgccttacggtaaacaggaaaattcgaacgcctgccatgaaatggacgatatagcagtcccgcaagaggcgctgagttcgtcgcccaggtgtgaaccaggattcagctcagaaagctgtgagcagctcgcgttgcctaaagccgggggaggggatgctgaggacgcaccctccctgctgcccgggggcggagagaccttcgatctgaaaactcctcaggtcacaaacgagggggaacccgagaagggattatgcctcctaccgggagagggcgaagagggctccgatgactgttcagaaatgtgcgacggcgaggaaccccaggaggcaagtagttccctggctagatgtggatccgtctcctgcctgtccgctgaaacttttgacctgaagacaccacaggttacaaatgaaggcgagccagagaaggaactgagcctgttaccaggagaaggtgaggagggctccgatgactgcagtgagatgtgtgatggggaagaaaggcaggaggctagctctagcctggccagacggggcagtgtgtctagcgagttagagaatcatcctatgaacgaggaaggagaatctgaggaactggcttcttctctcctttatgataacgttcctggggccgaacagtcggcctacgagaacgaaaagtgctcatgtgtgatgtgcttcagcgaggaagtgcccggaagtccagaagcgcggaccgagtcagaccaggcgtgcggaactatggatacggtggacatagccaacaactccactctggggaaacccaagcggaagcgccgcaagaaacgtggccacggctggagcagaatgagaatgcggcggcaggagaatagtcagcaaaatgataacagcaaggccgatgggcaggtcgtaagtagtgaaaagaaggccaatgtgaatttgaaagacttgtctaagatccgcggaaggaaacgcggcaaaccaggaacacgcttcactcaatccgaccgggcggcccagaaaagggtgagatcacgagcctcccggaaacacaaggacgaaacagtggattttaaggcccccttactgccagttacatgcgggggggtgaagggaatcctgcacaaaaagaagctccagcaggggattttggtcaagtgtatacagaccgaggacgggaagtggttcactcccaccgaattcgaaattaagggcggacacgctagaagcaagaactggagattgtcagtccggtgcggagggtggcccctcaggtggctcatggaaaatgggtttctccctgatccaccacgcattcggtaccgtaaaaaaaagcgcatcctcaagtcccagaacaattcgagtgtggacccgtgtatgaggaatctggacgaatgtgaggtgtgcagagatgggggtgaactgttctgctgtgatacatgttcccgagtgtttcatgaggactgccacatcccccccgtggaggctgagcgtaccccatggaattgtatcttttgtcggatgaaagaaagccccgggagtcagcagtgctgccaggagtctgaagtcctggagcgtcagatgtgccccgaggaacagctcaagtgcgagttcttgttgttgaaagtgtattgttgtagtgaatctagcttttttgccaaaattccatactactattatatccgcgaggcatgccaagggctgaaagagcctatgtggctggacaagatcaagaagagactcaacgaacatggatacccacaggtggagggctttgtccaagatatgagacttatctttcagaaccacagagcctcctacaaggccgtgcacgggagacctggctgccggtag

SEQ ID NO: 299406 - DNA, 2307 bp, Artificial Sequence
  derived and/or modified sequence
atggcccagcagggccagcagggccagatggccagcggggacagcaacctgaacttcaggatggtggccgagatccagaatgtggagggccagaacctgcaggagcaggtgtgcccagagcccatcttccgcttcttccgggagaacaaggtggagatcgccagcgccatcacccggcccttccccttcctgatgggcctgcgggaccgctccttcatcagcgagcagatgtatgagcacttccaggaggccttcaggaacctggtgcctgtgaccagggtgatgtactgtgtgctgtctgagctggagaagaccttcggctggagccacctggaggccctcttcagccgcatcaacctgatggcctacccagacctgaatgagatctaccgctccttccagaatgtgtgctatgagcacagccccctgcagatgaacaacgtgaatgacctggaggaccggccccggctgctgccctacggcaagcaggagaacagcaatgcctgccacgagatggatgacattgctgtgccccaggaggccctgagcagcagcccccgctgtgagcccggcttcagcagcgagagctgtgagcagctggccctgcccaaggccggcggcggagatgctgaagatgcccccagcctgctgcccggcggcggggagacctttgacctgaagaccccccaggtgaccaatgaaggagagcctgagaagggcctgtgcctgctgcctggagagggggaggagggcagtgatgactgcagcgagatgtgtgatggagaggagccccaggaggccagcagcagcctggcccgctgtggctctgtgtcctgcctgtctgctgagacctttgacctgaagaccccccaggtgaccaatgaaggagagcctgagaaggagctgagcctgctgcccggggagggggaggagggcagtgatgactgcagcgagatgtgtgatggagaggagcggcaggaggccagcagcagcctggcccggcggggctctgtgagcagcgagctggagaaccaccccatgaatgaggagggggagagcgaggagctggccagcagcctgctgtatgacaacgtgcctggagctgagcagagcgcctatgaaaatgagaagtgcagctgtgtgatgtgcttcagcgaggaggtgcccggcagccctgaggccaggacagaaagtgaccaggcctgtggcaccatggacacagtggacatcgccaacaacagcaccctgggcaagcccaagaggaagaggaggaagaagaggggccacggctggagcaggatgaggatgaggcggcaggagaacagccagcagaatgacaacagcaaggcagatggccaggtggtgtcctctgagaagaaggccaacgtgaacctgaaggacctgagcaagatccggggcaggaagaggggcaagccaggcacccgcttcacccagagcgacagagctgcccagaagagggtgcgcagccgggccagcaggaagcacaaggatgagaccgtggacttcaaggcccccctgctgcctgtgacctgtggcggcgtgaagggcatcctgcacaagaagaagctgcagcagggcatcctggtgaagtgcatccagacagaagatggcaagtggttcacccccacagaatttgagatcaagggcggccacgcccggagcaagaactggaggctgtctgtgcgctgtggcggctggcccctgcgctggctgatggagaatggcttcctgcctgaccccccacgcatccgctacaggaagaagaagaggatcctgaagagccagaacaacagctctgtggacccctgcatgaggaacctggatgaatgtgaggtgtgcagagatggaggagagctgttctgctgtgacacctgcagcagggtcttccacgaggactgccacatcccccctgtggaggccgagaggaccccctggaactgcatcttctgcaggatgaaggagagccctggcagccagcagtgctgccaggagagcgaggtgctggagcggcagatgtgcccagaggagcagctgaagtgtgagttcctgctgctgaaggtgtactgctgcagcgagagcagcttctttgccaagatcccctactactactacatccgggaggcctgccagggcctgaaggagcccatgtggctggacaagatcaagaagaggctgaatgaacatggctacccccaggtggagggctttgtgcaggacatgaggctcatcttccagaaccaccgggccagctacaaggctgtgcacggccggcccggctgcaggtag

SEQ ID NO: 299407 - DNA, 2307 bp, Artificial Sequence
  derived and/or modified sequence
atggcccagcagggccagcagggccagatggccagcggcgacagcaacttaaattttcggatggtggcagagatccagaacgtcgaaggtcagaatctgcaggagcaggtgtgcccggaacccatcttcagattttttcgggaaaacaaggtggagatcgcctcagccataacaagaccatttccattcctgatgggactacgagatagaagtttcatttccgagcagatgtatgagcattttcaggaggcgtttaggaacttggtcccagttacacgggtgatgtattgtgtgctatccgagctggaaaagaccttcggatggtcccacctggaagcgctgttcagccggatcaatttaatggcttaccctgatttgaatgaaatttatcggagtttccagaacgtgtgctacgagcactctcccctacagatgaataacgtcaatgacctcgaggaccggccgcgactcctgccttacggtaagcaggaaaacagcaatgcatgtcacgagatggacgatatagctgttccccaggaggcactgagcagctccccgaggtgcgaaccaggatttagctcagagtcctgcgaacagctggcattaccaaaagctggcgggggcgacgccgaagatgcaccatctcttctccctgggggtggcgagaccttcgatctcaaaactccacaggtgacaaacgaaggcgaaccagaaaagggtctctgcctgctgcccggggagggagaggaaggatccgacgattgttcagagatgtgcgacggggaagaaccacaggaagcctctagctcactggccaggtgtggcagtgtctcatgtctaagcgcagagacatttgacttgaagacacctcaagtcactaacgagggggaacctgaaaaagaactgagcctgctgcctggagaaggggaagaaggatccgacgactgctccgagatgtgtgatggagaggaaaggcaagaggcctcatcctccctggcgcggaggggttctgtgagttccgaactcgagaatcacccgatgaacgaggaaggcgaatctgaagagctggccagttcactcttatacgataatgtaccaggggccgaacagtcagcctacgaaaacgaaaagtgctcctgtgtgatgtgcttcagcgaggaagtaccaggtagccctgaagctcgcacagaatctgatcaggcctgcgggaccatggacactgttgacatcgccaacaatagcactctgggaaaacctaaacgaaagaggcgcaaaaagaggggtcatggatggtcacgcatgcgaatgcgaaggcaggagaattctcagcagaacgacaattctaaggccgatggtcaagttgtgtcctcagaaaagaaggcaaacgtgaatttgaaagatctgtccaaaatccgcggtagaaaacggggtaagcccgggaccaggttcacacagagtgaccgggccgctcagaagcgagtgcggtcacgggcctcccgcaaacacaaggacgaaaccgtggatttcaaggctccactactcccagttacctgcggaggagtcaagggaatactgcataagaagaaactccagcaggggatcttggtgaaatgcatccagacggaggacggcaaatggtttactcctactgaatttgagatcaaaggcggacacgcgcggtctaaaaactggcggctatctgtgagatgtgggggttggcccctccggtggctgatggagaacggatttctgcctgacccccctcgtattagataccgtaaaaaaaagagaatcctcaagagccaaaacaactctagcgtggacccatgtatgcggaacctggacgagtgcgaagtatgcagagatggcggggaactgttctgctgcgatacttgttccagggtcttccatgaagactgccacattccccccgtggaggctgaaagaacaccctggaattgcattttttgtaggatgaaagaatccccaggctcccagcagtgttgccaggaaagcgaggtgctggagagacagatgtgccccgaggaacagctgaaatgcgagttcctcctgctcaaagtgtactgctgctccgaaagttcattctttgctaagattccctattattattatattagggaagcatgccaaggactcaaggagcctatgtggctcgacaaaattaagaaacgcttaaacgaacatggttacccgcaagttgagggtttcgtccaggacatgagactaatcttccagaatcaccgcgcctcatacaaagcagtgcacggacgtcctggttgccgctag

SEQ ID NO: 299408 - DNA, 2639 bp, Artificial Sequence
  derived and/or modified sequence
acttttcttttcctctttgactgagcaccgaggggcagttggcagcttcacctcagagctgcaggaaggaacggggcagtgaaaatcgaatcgggtgtgatcctaggccaagctcatggcccagcagggccagcaggggcagatggcaagtggagacagcaatctcaacttcaggatggtcgcagagatccagaacgtagagggtcagaacctgcaggagcaggtttgccctgagcccattttcaggttcttcagagaaaacaaggtggagattgcaagtgcaataacaaggccatttcctttccttatgggcctccgagaccgctccttcatctccgagcagatgtatgaacattttcaagaagcttttagaaacctggtcccagtgacaagagtgatgtattgtgtactcagtgaactggagaagacatttggctggtcacatctggaagcattgttcagcaggattaacctgatggcctatcctgatttaaacgagatttacagaagcttccagaatgtatgctatgaacactcacctctccaaatgaataatgtaaacgatttagaagatagacccagattactaccatatggtaaacaagagaacagcaatgcctgtcatgaaatggatgatatagcagtgcctcaggaagccttgagctcctcgccaaggtgtgagccaggtttctcttcagagtcttgtgagcagttagctctcccaaaggctggtggaggagatgctgaagatgcacccagcctactaccaggtgggggagagacctttgatctaaaaactccccaagtcactaatgaaggagaaccagagaaggggctctgtctactaccaggtgaaggagaagagggcagtgatgactgttcagaaatgtgtgatggagaagagccccaggaagcctctagctccctagcaagatgtgggtcagtttcttgtttatctgcagagacctttgatctaaagactccccaagtcactaatgaaggagaaccagagaaggagctcagtctactaccaggtgaaggagaagagggcagtgatgactgttcggaaatgtgtgatggagaagagcgccaggaagcctctagctccctagcaagacgtgggtcagtgtctagtgaactagaaaatcacccaatgaatgaagaaggagaatcagaagagcttgcttctagcctgctatatgataatgtaccaggagcggagcaatcagcatatgaaaatgagaagtgttcctgtgtcatgtgtttctcagaagaggtgccaggaagcccagaagcaaggacggaaagtgatcaagcgtgtggcacaatggatactgtggatattgcaaacaactccactttgggaaaacccaagaggaaaagaagaaaaaagagggggcatggctggagcagaatgagaatgagaaggcaggaaaacagccaacaaaatgataatagcaaagccgacggccaggtggtctccagtgaaaagaaggcgaacgtgaatctgaaagacctttccaagattagggggagaaagagaggcaaacctggaacccgcttcactcagagtgacagagctgcacagaaaagagtccgatcaagagcttcaagaaagcacaaagatgaaactgtggattttaaggctcctttgcttccagtgacctgtggtggggtgaagggaattttacataagaagaaattgcagcaaggaatcttggtgaagtgtatacagactgaggatggaaaatggttcacccccacggaatttgaaatcaaaggaggccatgcaagatcaaagaactggaggctgagtgtgcgctgtggcgggtggcccctacgatggctgatggagaatggatttctgcctgatcctccaagaatacgttacaggaaaaaaaagagaatactgaagtctcaaaacaatagctcagttgacccttgtatgagaaacctggatgagtgtgaggtgtgccgggacggaggggagctgttctgttgcgacacttgttcaagagtcttccatgaggactgtcacatcccgcctgtggaagctgagaggaccccgtggaattgcatcttctgcaggatgaaggagtctccgggaagccaacagtgttgtcaggaatctgaggtcctggagaggcagatgtgtcctgaggaacagttgaaatgtgagttcctcctcttgaaagtctattgctgttctgagagctccttttttgccaagattccatactattattatattagagaggcgtgtcaaggcctgaaggagcccatgtggttggataaaatcaagaaaaggctgaatgagcacggttacccccaagtggaggggtttgtacaagacatgcgcctcatcttccagaaccacagggcctcttacaaggctgttcacggaagaccaggatgtagatgagggacttgtctatgacactgtattcaagcacttcaaaagacataagctggagatatcaaatgcaataaaaaagacatttccattccttgagggcctccgcgatcgggaactcatcacaaataaaatgtttgaagattctgaagattcttgtagaaacctggtccctgtacaaagagtggtgtacaatgttctcagtgaactggagaagacatttaac

SEQ ID NO: 299409 - DNA, 2307 bp, Artificial Sequence
  derived and/or modified sequence
atggcccagcagggtcagcagggacagatggcatccggagattccaaccttaatttcaggatggttgcagaaattcaaaatgtggagggtcagaacctccaggagcaggtttgcccagagcccatctttcggtttttcagggagaacaaggtagagatcgcctcagctatcacacggccatttccgttcctgatgggccttagagatcgctcttttatctccgagcaaatgtatgagcacttccaagaggcttttagaaatctggtgcctgtgacaagagtgatgtattgtgtgctgtctgaactggaaaagacattcggctggagccaccttgaagcactattttcaagaatcaatctgatggcgtaccccgacttgaacgaaatttaccgcagttttcagaatgtttgctatgagcactctcccctgcaaatgaataacgtcaacgacctggaggatcggccaagactgctaccctatggaaagcaagagaactccaatgcatgccacgagatggatgacattgccgtgcctcaggaggccctctctagctcacccaggtgcgagcctggattctcctccgaaagctgcgaacagctagccttgccaaaggccggaggaggtgatgcggaagacgccccttcactgcttccgggagggggagaaactttcgacttgaagacgccacaggtgacgaatgagggcgaacccgagaaagggctctgtcttctccccggagaaggggaagaaggatctgacgattgttctgagatgtgcgacggagaggaaccccaggaggccagctccagtctggcaagatgtggtagcgtgtcttgcttatcggccgagacttttgatctgaagaccccgcaagtgaccaatgagggcgagcctgagaaagaactgagtttgctgcctggagagggggaggaaggatccgacgattgcagcgagatgtgtgatggagaggagcgtcaggaggcatcaagttcactagccaggcggggtagtgtcagtagcgaactcgagaaccacccgatgaatgaggagggagagagcgaagagctggctagtagtctcctgtacgataacgtgccaggcgctgagcagtccgcctatgagaatgaaaagtgcagttgtgtgatgtgcttctctgaggaggtgcctgggtcccctgaagccagaacagagagtgaccaggcatgtgggaccatggatactgtggatattgctaacaacagcacgctcggcaagcctaagaggaagagaagaaaaaagagggggcatggctggtctcgcatgcgcatgaggcgccaggagaattcccagcagaacgacaactcaaaagccgacgggcaggtcgtgtccagtgaaaaaaaggcaaacgtgaacctgaaggacctgtcaaaaatccgtggtcgcaaaaggggaaagcctggtacccgatttacccagtctgaccgcgctgcacagaaacgtgtccggtccagagcctcgcggaagcacaaggatgaaaccgtcgactttaaggctcccctactcccagtcacatgcgggggtgtgaaggggatcctacataagaagaagttgcagcaggggatccttgtcaagtgcatccagacagaagacggaaagtggtttacccctacagagtttgaaatcaagggtggtcacgctcggtcaaagaactggcgcctcagcgtgagatgcgggggttggccactgagatggctcatggaaaacgggttcctccctgatccacccagaatcaggtatagaaaaaaaaaaagaatcttaaaaagtcaaaacaattcttccgtagatccgtgtatgaggaatctcgacgagtgtgaagtgtgtcgagacggaggggaactgttctgctgtgacacatgttcgcgtgtgtttcatgaagattgccacattccccctgtggaggctgaaagaactccgtggaattgtatcttctgtcgcatgaaggagagccctggcagccagcagtgctgtcaggaaagtgaagttttggagcgccagatgtgccctgaggaacagttaaagtgcgaatttctgctgctcaaggtatattgttgttccgaaagtagcttctttgctaaaatcccctactattactatattcgggaagcttgccaaggacttaaagagccaatgtggcttgataaaatcaagaaaaggttgaatgagcacggctaccctcaggttgagggcttcgtgcaggacatgcggctcatctttcagaaccaccgcgcaagttataaggccgtacacgggaggcctggttgccggtag

SEQ ID NO: 299410 - DNA, 2307 bp, Artificial Sequence
  derived and/or modified sequence
atggcccagcagggccagcagggccagatggccagcggcgacagcaacctgaacttcagaatggtggccgagatccagaacgtggagggccagaacctgcaggagcaggtgtgccccgagcccatcttcagattcttcagagagaacaaggtggagatcgccagcgccatcaccagacccttccccttcctgatgggcctgagagacagaagcttcatcagcgagcagatgtacgagcacttccaggaggccttcagaaacctggtgcccgtgaccagagtgatgtactgcgtgctgagcgagctggagaagaccttcggctggagccacctggaggccctgttcagcagaatcaacctgatggcctaccccgacctgaacgagatctacagaagcttccagaacgtgtgctacgagcacagccccctgcagatgaacaacgtgaacgacctggaggacagacccagactgctgccctacggcaagcaggagaacagcaacgcctgccacgagatggacgacatcgccgtgccccaggaggccctgagcagcagccccagatgcgagcccggcttcagcagcgagagctgcgagcagctggccctgcccaaggccggcggcggcgacgccgaggacgcccccagcctgctgcccggcggcggcgagaccttcgacctgaagaccccccaggtgaccaacgagggcgagcccgagaagggcctgtgcctgctgcccggcgagggcgaggagggcagcgacgactgcagcgagatgtgcgacggcgaggagccccaggaggccagcagcagcctggccagatgcggcagcgtgagctgcctgagcgccgagaccttcgacctgaagaccccccaggtgaccaacgagggcgagcccgagaaggagctgagcctgctgcccggcgagggcgaggagggcagcgacgactgcagcgagatgtgcgacggcgaggagagacaggaggccagcagcagcctggccagaagaggcagcgtgagcagcgagctggagaaccaccccatgaacgaggagggcgagagcgaggagctggccagcagcctgctgtacgacaacgtgcccggcgccgagcagagcgcctacgagaacgagaagtgcagctgcgtgatgtgcttcagcgaggaggtgcccggcagccccgaggccagaaccgagagcgaccaggcctgcggcaccatggacaccgtggacatcgccaacaacagcaccctgggcaagcccaagagaaagagaagaaagaagagaggccacggctggagcagaatgagaatgagaagacaggagaacagccagcagaacgacaacagcaaggccgacggccaggtggtgagcagcgagaagaaggccaacgtgaacctgaaggacctgagcaagatcagaggcagaaagagaggcaagcccggcaccagattcacccagagcgacagagccgcccagaagagagtgagaagcagagccagcagaaagcacaaggacgagaccgtggacttcaaggcccccctgctgcccgtgacctgcggcggcgtgaagggcatcctgcacaagaagaagctgcagcagggcatcctggtgaagtgcatccagaccgaggacggcaagtggttcacccccaccgagttcgagatcaagggcggccacgccagaagcaagaactggagactgagcgtgagatgcggcggctggcccctgagatggctgatggagaacggcttcctgcccgacccccccagaatcagatacagaaagaagaagagaatcctgaagagccagaacaacagcagcgtggacccctgcatgagaaacctggacgagtgcgaggtgtgcagagacggcggcgagctgttctgctgcgacacctgcagcagagtgttccacgaggactgccacatcccccccgtggaggccgagagaaccccctggaactgcatcttctgcagaatgaaggagagccccggcagccagcagtgctgccaggagagcgaggtgctggagagacagatgtgccccgaggagcagctgaagtgcgagttcctgctgctgaaggtgtactgctgcagcgagagcagcttcttcgccaagatcccctactactactacatcagagaggcctgccagggcctgaaggagcccatgtggctggacaagatcaagaagagactgaacgagcacggctacccccaggtggagggcttcgtgcaggacatgagactgatcttccagaaccacagagccagctacaaggccgtgcacggcagacccggctgcagatag

SEQ ID NO: 299411 - protein, 189 aa, Artificial Sequence
  derived and/or modified sequence
MAQQGQQGQMASGDSNLNFRMVAEIQNVEGQNLQEQVCPEPIFRFFRENKVEIASAITRPFPFLMGLRDRSFISEQMYEHFQEAFRNLVPVTRVMYCVLSELEKTFGWSHLEALFSRINLMAYPDLNEIYRSFQNVCYEHSPLQMNNVNDLEDRPRLLPYGKQENSNACHEMDFCLILQEYVTGKKREY

SEQ ID NO: 299412 - DNA, 570 bp, Artificial Sequence
  derived and/or modified sequence
atggcgcagcagggtcagcaaggacagatggctagtggagacagcaatctgaattttcgtatggtcgctgagatccagaatgtggaaggacagaatctccaggaacaggtttgcccagagcccatcttcaggttctttagagagaacaaggtggagatagcaagcgccattacccgcccatttccattcctgatgggcctccgggaccgctccttcattagcgaacagatgtacgagcactttcaggaggccttcaggaatcttgtgcccgtgacccgcgttatgtactgcgtgctgagcgagttggagaagaccttcgggtggagtcacttagaagcccttttcagccgaattaacctcatggcataccccgatctgaatgaaatctatagatctttccagaatgtgtgttacgaacacagcccactgcagatgaataacgtcaatgatctggaagatagacctaggctgctgccctacggaaaacaggagaactccaacgcatgccatgagatggatttctgcttgatactccaggaatacgttacaggtaagaagagagagtactag

SEQ ID NO: 299413 - DNA, 570 bp, Artificial Sequence
  derived and/or modified sequence
atggcccagcagggccagcagggccagatggccagcggggacagcaacctgaacttcaggatggtggccgagatccagaatgtggagggccagaacctgcaggagcaggtgtgcccagagcccatcttccgcttcttccgggagaacaaggtggagatcgccagcgccatcacccggcccttccccttcctgatgggcctgcgggaccgctccttcatcagcgagcagatgtatgagcacttccaggaggccttcaggaacctggtgcctgtgaccagggtgatgtactgtgtgctgtctgagctggagaagaccttcggctggagccacctggaggccctcttcagccgcatcaacctgatggcctacccagacctgaatgagatctaccgctccttccagaatgtgtgctatgagcacagccccctgcagatgaacaacgtgaatgacctggaggaccggccccggctgctgccctacggcaagcaggagaacagcaatgcctgccacgagatggacttctgcctgatcctgcaggagtatgtgacaggcaagaagcgggagtactag

SEQ ID NO: 299414 - DNA, 570 bp, Artificial Sequence
  derived and/or modified sequence
atggcccagcagggccagcagggccagatggccagcggcgacagcaacttgaacttcaggatggtggccgaaatccagaatgtggaggggcagaatctgcaggagcaggtgtgccctgagcctatcttcagatttttccgagagaataaggtggagatcgccagtgcaatcactcggccattcccttttctaatggggcttcgggacaggtcatttattagcgagcagatgtacgagcactttcaggaggctttcagaaacctggtgccagtaactcgggtgatgtactgtgtgctctcagagttggagaaaacattcggttggagtcatctggaggccctctttagcaggattaacctgatggcctaccccgacctaaatgaaatctatcgctctttccagaacgtttgctatgagcatagtccactgcaaatgaataatgtgaacgatctggaggatcggccacggctgctgccttatgggaaacaggaaaactctaatgcttgtcacgagatggatttttgtttaatactgcaagagtacgtgactggcaagaaacgcgagtattag

SEQ ID NO: 299415 - DNA, 1047 bp, Artificial Sequence
  derived and/or modified sequence
cacttttcttttcctctttgactgagcaccgaggggcagttggcagcttcacctcagagctgcaggaaggaacggggcagtgaaaatcgaatcgggtgtgatcctaggccaagctcatggcccagcagggccagcaggggcagatggcaagtggagacagcaatctcaacttcaggatggtcgcagagatccagaacgtagagggtcagaacctgcaggagcaggtttgccctgagcccattttcaggttcttcagagaaaacaaggtggagattgcaagtgcaataacaaggccatttcctttccttatgggcctccgagaccgctccttcatctccgagcagatgtatgaacattttcaagaagcttttagaaacctggtcccagtgacaagagtgatgtattgtgtactcagtgaactggagaagacatttggctggtcacatctggaagcattgttcagcaggattaacctgatggcctatcctgatttaaacgagatttacagaagcttccagaatgtatgctatgaacactcacctctccaaatgaataatgtaaacgatttagaagatagacccagattactaccatatggtaaacaagagaacagcaatgcctgtcatgaaatggatttctgcctgatcctccaagaatacgttacaggaaaaaaaagagaatactgaagtctcaaaacaatagctcagttgacccttgtatgagaaacctggatgagtgtgaggtgtgccgggacggaggggagctgttctgttgcgacacttgttcaagagtcttccatgaggactgtcacatcccgcctgtggaagctgagaggaccccgtggaattgcatcttctgcaggatgaaggagtctccgggaagccaacagtgttgtcaggaatctgaggtcctggagaggcagatgtgtcctgaggaacagttgaaatgtgagttcctcctcttgaaagtctattgctgttctgagagctccttttttgccaagattccatactattattatattagagaggcgtgtcaaggcctgaa

SEQ ID NO: 299416 - DNA, 570 bp, Artificial Sequence
  derived and/or modified sequence
atggctcagcaaggacagcaggggcagatggcttctggcgacagtaaccttaacttccgtatggtcgccgagattcagaacgtggaaggccaaaacctgcaggagcaagtctgtccggagccaattttccgcttcttccgcgaaaacaaagtagaaatcgcttcagctatcactaggcctttcccattccttatgggtttaagggatcgttccttcatctcggagcagatgtacgagcacttccaggaggccttccgaaacctggtgcccgtaacccgtgtgatgtactgcgttttaagcgagcttgagaagaccttcgggtggagccacctggaggcgttgtttagtagaatcaatctcatggcctaccccgacttaaacgaaatctaccgaagcttccagaacgtgtgctacgaacactctcctttacagatgaacaatgtgaatgaccttgaggataggccaagactgctcccatatggtaaacaggaaaatagcaatgcttgccacgagatggacttttgcctgattctgcaagagtacgtgactgggaagaaacgggagtactag

SEQ ID NO: 299417 - DNA, 570 bp, Artificial Sequence
  derived and/or modified sequence
atggcccagcagggccagcagggccagatggccagcggcgacagcaacctgaacttcagaatggtggccgagatccagaacgtggagggccagaacctgcaggagcaggtgtgccccgagcccatcttcagattcttcagagagaacaaggtggagatcgccagcgccatcaccagacccttccccttcctgatgggcctgagagacagaagcttcatcagcgagcagatgtacgagcacttccaggaggccttcagaaacctggtgcccgtgaccagagtgatgtactgcgtgctgagcgagctggagaagaccttcggctggagccacctggaggccctgttcagcagaatcaacctgatggcctaccccgacctgaacgagatctacagaagcttccagaacgtgtgctacgagcacagccccctgcagatgaacaacgtgaacgacctggaggacagacccagactgctgccctacggcaagcaggagaacagcaacgcctgccacgagatggacttctgcctgatcctgcaggagtacgtgaccggcaagaagagagagtactag

SEQ ID NO: 299418 - protein, 645 aa, Artificial Sequence
  derived and/or modified sequence
RFGSAPQRPVAMTTAQRDSLLWKLAGLLRESGDVVLSGCSTLSLLTPTLQQLNHVFELHLGPWGPGQTGFVALPSHPADSPVILQLQFLFDVLQKTLSLKLVHVAGPGPTGPIKIFPFKSLRHLELRGVPLHCLHGLRGIYSQLETLICSRSLQALEELLSACGGDFCSALPWLALLSANFSYNALTALDSSLRLLSALRFLNLSHNQVQDCQGFLMDLCELHHLDISYNRLHLVPRMGPSGAALGVLILRGNELRSLHGLEQLRNLRHLDLAYNLLEGHRELSPLWLLAELRKFLLDGKVLSLTDFQTHTSLGLSPMGPPLPWPVGSTPETSGGPDLSDSLSSGGVVTQPLLHKVKSRVRVRRASISEPSDTDPEPRTLNPSPAGWFVQQHPELELMSSFRERFGRNWLQYRSHLEPSGNPLPATPTTSAPSAPPASSQGPDTAPRPSPPQEEARGPQESPQKMSEEVRAEPQEEEEEKEGKEEKEEGEMVEQGEEEAGEEEEEEQDQKEVEAELCRPLLVCPLEGPEGVRGRECFLRVTSAHLFEVELQAARTLERLELQSLEAAEIEPEAQAQRSPRPTGSDLLPGAPILSLRFSYICPDRQLRRYLVLEPDAHAAVQVMAPRVGAQEAVGIKRARGKWQQA

SEQ ID NO: 299419 - DNA, 1938 bp, Artificial Sequence
  derived and/or modified sequence
cgattcggctccgccccccagcgccctgtcgcaatgacaactgcccagagggactccctgctgtggaagctggccggtctgctgagggagagcggcgatgtggtgttgtctggttgctccaccctcagcctcctgacgcctaccctgcaacagctgaatcatgtatttgaacttcatctggggccgtgggggccaggccagacgggtttcgtggccctgccttcccaccccgccgactctcctgttatccttcagctgcagttcctgtttgacgtgctccaaaaaactctcagccttaagcttgtccatgtggccggccccggaccaactggacctattaagatctttccatttaagagtcttaggcatttagaattgagaggggtgcctctccactgcctacatgggttgagaggcatttatagtcaattagaaactttaatttgctcccggagccttcaggcacttgaggagctgctgagtgcttgtggcggtgacttttgctcagcccttccttggctagctctgctttccgccaacttctcctataatgccctgacagccctcgactctagcctccgcttgctgagtgccctgcgatttctaaatctgtcccacaatcaagtgcaggactgtcaaggattcctcatggacctgtgtgaattacaccacctcgatatttcctataatcgactgcacctggtaccgcggatgggaccaagcggagctgcccttggggtgttaatcttgcgaggaaacgagcttcgaagccttcatggcctggagcagcttagaaacctgagacatctggatcttgcatacaatctgttagaaggccaccgggaactcagccctctgtggttgctggccgaactgcgcaaatttctcctggatggtaaagtcctaagtctcacagatttccagactcatacatctctgggactgtccccaatgggtcctccgctcccctggcccgtgggcagtactccagagacctctggtggacctgacttgtccgacagtctttcttcaggaggggtggtgacacagcccctccttcacaaagtgaaaagccgcgtgagggtccggagggcttcaatctccgaacccagcgacaccgaccctgaacccaggacactgaatccttctcctgctggctggtttgtgcagcagcatcctgagctagagctgatgtccagctttagggagagatttggcaggaattggctgcaatacagatcacaccttgagccaagtggcaatcccctgccggccaccccgaccactagtgctccgtctgcccctccagcatctagtcagggcccagatacagcccctcggccctccccacctcaggaagaagcacgcggaccccaagagagccctcagaagatgagcgaagaggttagagccgagccccaggaggaagaagaagagaaggagggcaaagaagagaaggaagagggtgaaatggtggaacagggggaggaggaggcaggagaagaggaggaggaagagcaggaccagaaagaagttgaggcagaactgtgtcgaccactcttggtttgcccccttgaggggcccgagggtgtgcggggaagagaatgttttcttcgagtcacttccgcacacctgtttgaggtagagttgcaggctgccaggacgctcgaacggttggagctgcagtcattggaggctgccgaaattgaaccagaagcgcaggctcagcggagcccacggccaacaggctccgacctgctcccaggcgcaccaatcctcagcttgcggttttcttatatttgccctgaccgccaattacggagatatctcgtgcttgagcctgatgcccacgctgccgtccaggtgatggcgccacgagtaggcgctcaggaagccgttgggatcaaacgcgccagagggaaatggcagcaggcatag

SEQ ID NO: 299420 - DNA, 1938 bp, Artificial Sequence
  derived and/or modified sequence
cgcttcggcagcgccccccagaggcctgtggccatgaccacagcccagagggacagcctgctgtggaagctggccggcctgctgcgggagagcggagatgtggtgctgagcggctgcagcaccctgagcctgctgacccccaccctgcagcagctgaaccacgtgtttgagctgcacctgggcccctggggccctggccagacaggctttgtggccctgcccagccaccctgctgacagccctgtgatcctgcagctgcagttcctgtttgatgtgctgcagaagaccctgagcctgaagctggtgcacgtggccggccctggccccaccggccccatcaagatcttccccttcaagagcctgcggcacctggagctgcggggcgtgcccctgcactgcctgcacggcctgcggggcatctacagccagctggagaccctcatctgcagccgcagcctgcaggccctggaggagctgctgagcgcctgtggcggggacttctgcagcgccctgccctggctggccctgctgagcgccaacttctcctacaatgccctgacagccctggacagcagcctgcggctgctgagcgccctgcgcttcctgaacctgagccacaaccaggtgcaggactgccagggcttcctgatggacctgtgtgagctgcaccacctggacatctcctacaaccggctgcacctggtgcccaggatgggccccagcggggccgccctgggcgtgctgatcctgcggggaaatgagctgcggagcctgcacggcctggagcagctgaggaacctgcggcacctggacctggcctacaacctgctggagggccaccgggagctgagccccctgtggctgctggccgagctgaggaagttcctgctggatggcaaggtgctgagcctgacagacttccagacccacaccagcctgggcctgagccccatgggcccccccctgccctggcctgtgggcagcaccccagagaccagcggcggccctgacctgagtgacagcctgagcagcggcggcgtggtgacccagcccctgctgcacaaggtgaagagccgggtgcgggtgagaagagccagcatcagcgagcccagcgacacagatcctgagcccaggaccctgaaccccagccctgctggctggtttgtgcagcagcaccctgagctggagctgatgagcagcttccgggagagatttggaagaaactggctgcagtaccgcagccacctggagcccagcggcaaccccctgcctgccacccccaccaccagcgcccccagcgcccccccagccagcagccagggccctgacacagccccccggcccagccccccccaggaggaggcccggggcccccaggagagcccccagaagatgtctgaggaggtgcgggcagagccccaggaggaggaggaggagaaggagggcaaggaggagaaggaggagggggagatggtggagcagggcgaggaggaggccggggaggaggaggaggaggagcaggaccagaaggaggtggaggccgagctgtgccggcccctgctggtgtgccccctggagggccctgagggcgtgcggggccgggagtgcttcctgcgggtgaccagcgcccacctgtttgaggtggagctgcaggccgcccggaccctggagcggctggagctgcagagcctggaggccgctgagattgagcctgaggcccaggcccagaggagcccccggcccaccggcagtgacctgctgcccggggcccccatcctgagcctgcgcttctcctacatctgcccagaccggcagctgcggcgctacctggtgctggagccagatgcccacgccgctgtgcaggtgatggccccccgggtgggcgcccaggaggccgtgggcatcaagagggcccggggcaagtggcagcaggcctag

SEQ ID NO: 299421 - DNA, 1938 bp, Artificial Sequence
  derived and/or modified sequence
cggttcggcagcgccccccagcggcccgtggccatgaccaccgcccagagggattcgctcctgtggaagctggcaggcctgctccgtgaatctggcgacgtggtactcagcggctgctccaccctcagtttattaactcctacccttcagcagctcaaccatgttttcgagctccacctgggaccatgggggcctggtcaaacgggatttgtggcccttccttcccatccagcagacagcccagtgattctacagctgcaattcctgttcgacgttctgcagaaaaccctgtccttgaaactggttcacgtggctgggcccggacccaccggccctatcaagatcttcccttttaagtcccttcggcacttggagttacgcggcgtgcccctgcactgtcttcacggactccgaggaatctacagccaactggaaacccttatttgtagccggagcctgcaggctctcgaggaattgctgtcagcgtgtggcggggacttctgctcagcgttgccctggctcgcgttgctgtctgccaacttttcttataacgccctgacagcattggatagctctctcaggctgttatccgccctgcgattcctgaacttaagccacaatcaagtccaagattgccaaggctttcttatggatctgtgcgagctgcatcacttagatatctcttataatcggctgcatctagtccccagaatggggcctagtggagccgccctcggcgtgctgatcctgcggggcaacgaactgcggtccctgcatggcctcgaacagttgcgcaaccttcggcacttagacctggcctataatcttctggagggtcatagagagttgagtcctctgtggcttctggcagagctgaggaaattcctgcttgatggaaaagtgctgtccctaacagatttccagactcatacgtcactgggcctgagccctatggggcctcctttgccatggccagtgggctctaccccagagacatccggtggcccagatctctcagattccttatctagcggaggggtcgtgacacagcccctattgcacaaagtgaagagccgcgtccgagtgaggagagcttccatctccgaaccatcggacaccgaccccgagccacgtaccctgaacccaagtcccgcaggttggtttgttcagcaacatcccgaactggagctgatgtcctcttttcgcgagcggtttggccgaaactggctgcaatacagatctcaccttgaaccctctggcaacccactgccagcgacaccaaccacatcggctccatcagcgccacccgcgagtagtcagggtccggatacagctccccgcccatctcctccacaagaggaagcgcggggaccccaggaatcaccccaaaagatgtctgaggaggttcgggcagaaccgcaggaagaggaggaagaaaaggaggggaaagaggagaaagaggagggtgagatggtggaacagggagaggaggaagctggcgaggaggaggaggaggaacaggaccagaaggaagtggaagctgagctttgtagacccctgcttgtctgtcccctcgagggacccgagggagtcaggggccgtgaatgtttcttgcgcgtgacctccgctcacctctttgaggtggagctacaggccgcccggactctggagcggctggagttgcagagcctggaagcggcagaaatcgaacctgaggctcaggcccagcggtcacctagacccaccgggtcggacctgttgccaggggcccctatcctatccctgcggttctcctatatctgtccagatcgccagctgcgaagatacctcgttctggaaccagacgcacacgccgccgtgcaggtgatggcccctagagtgggcgcccaagaagcagtcggcataaagcgagccagaggaaagtggcagcaagcatag

SEQ ID NO: 299422 - DNA, 1938 bp, Artificial Sequence
  derived and/or modified sequence
aggtttggctctgcccctcaacggcctgtggccatgactaccgctcagagagattccctgctctggaagttagccggacttctccgggagagcggtgacgttgtcctctctgggtgttctaccctcagcctcctgacaccaacactacagcaactgaatcacgtgtttgagctgcatctggggccatggggccctggccagactggctttgtggcattgccttctcacccagctgactcccctgtaattttgcagttgcagtttctctttgatgtgctccaaaagactctctccctcaaactcgtacacgtcgctggcccaggtccaacgggaccaatcaagatctttccattcaagtcactcagacatttagagttgagaggtgtcccattacactgtctgcacggactaaggggcatctactctcaactcgagacattaatctgcagtcgctcccttcaggctctagaggagctcttgagtgcctgcggcggagatttctgtagcgcactgccttggttggcactgttatctgctaatttctcttacaatgcgctgaccgcgttggactcatcactgaggcttctttctgcgctcagatttctgaatctgagccacaatcaggtgcaagactgtcagggatttttgatggacctctgtgaacttcatcacttagatattagttataaccggctgcacctggtgcccagaatggggcctagcggtgcagcactcggagttttgattctgcgtggtaacgaacttcgcagcctgcacggccttgagcaactaagaaatttaagacacctggacctcgcctataacctgcttgagggtcacagggagttgagtccactatggctactggcggagttgaggaagttcttgttggatggcaaggtcctttctctgacagatttccagacccacaccagtctgggtctgtctcctatggggcctccactaccttggcccgtcggtagcactcccgaaacatccggcggtccggatctgtccgacagcctttcaagtggtggagttgttacacagccactgttgcacaaggtgaagtcacgtgtgcgcgtgcgacgcgctagcatttccgaaccctctgacacagaccctgagccacgaacactgaatcctagtcctgctggctggtttgtgcagcagcatcccgagctggaattaatgagctccttcagagagagattcgggagaaattggttgcaataccggagccatcttgaaccatctggcaatccgctgccggctactcctactacttccgcgcctagtgcacctccagccagcagtcagggcccagataccgcccctagacccagccctccgcaggaggaggccagaggccctcaggaatctcctcagaaaatgtctgaggaggtcagggcggaaccgcaggaggaagaagaggagaaggaagggaaagaagaaaaggaggagggtgaaatggtggaacagggtgaagaggaggctggcgaggaagaagaagaggagcaggaccagaaggaagttgaggccgaactctgcaggcccctcttagtgtgtccactggaggggcctgaaggagtaaggggtcgagagtgttttcttcgcgtgacatccgcacacttatttgaggtggagctccaggctgctaggacattggagagactggagctacagtctctggaagctgccgaaattgaaccagaagctcaagcgcaaaggagcccccgaccaaccggttccgatttactgccgggtgcacccattctgagtctgagatttagttacatttgccccgataggcagctgcgcaggtatctggttttagaacctgacgcacacgcagccgtgcaggttatggctcccagggttggcgctcaagaagctgtgggcatcaaacgcgcaagggggaagtggcaacaggcatag

SEQ ID NO: 299423 - DNA, 2211 bp, Artificial Sequence
  derived and/or modified sequence
atcattgataggcgccgggcagctgagctggtaggaggaccagacggggaggttcggctccgccccccagcgtcccgtggccatgacgaccgctcagagggactccctgttgtggaagctcgcggggttgctgcgggagtccggggatgtggtcctgtctggctgtagcaccctgagcctgctgactcccacactgcaacagctgaaccacgtatttgagctgcacctggggccatggggccctggccagacaggctttgtggctctgccctcccatcctgccgactcccctgttattcttcagcttcagtttctcttcgatgtgctgcagaaaacactttcactcaagctggtccatgttgctggtcctggccccacagggcccatcaagattttccccttcaaatcccttcggcacctggagctccgaggtgttcccctccactgtctgcatggcctccgaggcatctactcccagctggagaccctgatttgcagcaggagcctccaggcattagaggagctcctctcagcctgcggcggcgacttctgctctgccctcccttggctggctctgctttctgccaacttcagctacaatgcactgaccgccttagacagctccctgcgcctcttgtcagctctgcgtttcttgaacctaagccacaatcaagtccaggactgtcagggattcctgatggatttgtgtgagctccaccatctggacatctcctataatcgcctgcatttggtgccaagaatgggaccctcaggggctgctctgggggtcctgatactgcgaggcaatgagcttcggagcctgcatggcctagagcagctgaggaatctgcggcacctggatttggcatacaacctgctggaaggacaccgggagctgtcaccactgtggctgctggctgagctccgcaagttccttctcgatggcaaggtcttgtcactgacagattttcagactcacacatccttggggctcagccccatgggcccacctttgccctggccagtggggagtactcctgaaacctcaggtggccctgacctgagtgacagcctctcctcagggggtgttgtgacccagcccctgcttcataaggttaagagccgagtccgtgtgaggcgggcaagcatctctgaacccagtgatacggacccggagccccgaactctgaacccctctccggctggatggttcgtgcagcagcacccggagctggagctcatgagcagcttccgggaacggttcggccgcaactggctgcagtacaggagtcacctggagccctccggaaaccctctgccggccacccccactacttctgcacccagtgcacctccagccagctcccagggccccgacactgcacccagaccttcacccccgcaggaggaagccagaggcccccaggagtcaccacagaaaatgtcagaggaggtcagggcggagccacaggaggaggaagaggagaaggaggggaaggaggagaaggaggagggggagatggtggaacagggagaagaggaggcaggagaggaggaagaagaggagcaggaccagaaggaagtggaagcggaactctgtcgccccttgttggtgtgtcccctggaggggcctgagggcgtacggggcagggaatgctttctcagggtcacttctgcccacctgtttgaggtggaactccaagcagctcgcaccttggagcgactggagctccagagtctggaggcagctgagatagagccggaggcccaggcccagaggtcgcccaggcccacgggctcagatctgctccctggagcccccatcctcagtctgcgcttctcctacatctgccctgaccggcagttgcgtcgctatttggtgctggagcctgatgcccacgcagctgtccaggtgatggcgcccagagtgggggcccaggaggctgtggggattaagagagccagagggaagtggcagcaggcctgagggccgggggcctgtgggaggtgtccgtctggggtccgcctgctcacagctgcctctgatccaccctctgtcaggagctgcttgccgtgttgaccccagtcaccaatgtggctcgggaacagcttggggaggccagggacctcctgctgggtagattccagtgtctacgctgtggccatgagttcaagccagaggagcccaggatgggattagacagtgaggaa

SEQ ID NO: 299424 - DNA, 1938 bp, Artificial Sequence
  derived and/or modified sequence
agattcggcagcgccccccagagacccgtggccatgaccaccgcccagagagacagcctgctgtggaagctggccggcctgctgagagagagcggcgacgtggtgctgagcggctgcagcaccctgagcctgctgacccccaccctgcagcagctgaaccacgtgttcgagctgcacctgggcccctggggccccggccagaccggcttcgtggccctgcccagccaccccgccgacagccccgtgatcctgcagctgcagttcctgttcgacgtgctgcagaagaccctgagcctgaagctggtgcacgtggccggccccggccccaccggccccatcaagatcttccccttcaagagcctgagacacctggagctgagaggcgtgcccctgcactgcctgcacggcctgagaggcatctacagccagctggagaccctgatctgcagcagaagcctgcaggccctggaggagctgctgagcgcctgcggcggcgacttctgcagcgccctgccctggctggccctgctgagcgccaacttcagctacaacgccctgaccgccctggacagcagcctgagactgctgagcgccctgagattcctgaacctgagccacaaccaggtgcaggactgccagggcttcctgatggacctgtgcgagctgcaccacctggacatcagctacaacagactgcacctggtgcccagaatgggccccagcggcgccgccctgggcgtgctgatcctgagaggcaacgagctgagaagcctgcacggcctggagcagctgagaaacctgagacacctggacctggcctacaacctgctggagggccacagagagctgagccccctgtggctgctggccgagctgagaaagttcctgctggacggcaaggtgctgagcctgaccgacttccagacccacaccagcctgggcctgagccccatgggcccccccctgccctggcccgtgggcagcacccccgagaccagcggcggccccgacctgagcgacagcctgagcagcggcggcgtggtgacccagcccctgctgcacaaggtgaagagcagagtgagagtgagaagagccagcatcagcgagcccagcgacaccgaccccgagcccagaaccctgaaccccagccccgccggctggttcgtgcagcagcaccccgagctggagctgatgagcagcttcagagagagattcggcagaaactggctgcagtacagaagccacctggagcccagcggcaaccccctgcccgccacccccaccaccagcgcccccagcgccccccccgccagcagccagggccccgacaccgcccccagacccagccccccccaggaggaggccagaggcccccaggagagcccccagaagatgagcgaggaggtgagagccgagccccaggaggaggaggaggagaaggagggcaaggaggagaaggaggagggcgagatggtggagcagggcgaggaggaggccggcgaggaggaggaggaggagcaggaccagaaggaggtggaggccgagctgtgcagacccctgctggtgtgccccctggagggccccgagggcgtgagaggcagagagtgcttcctgagagtgaccagcgcccacctgttcgaggtggagctgcaggccgccagaaccctggagagactggagctgcagagcctggaggccgccgagatcgagcccgaggcccaggcccagagaagccccagacccaccggcagcgacctgctgcccggcgcccccatcctgagcctgagattcagctacatctgccccgacagacagctgagaagatacctggtgctggagcccgacgcccacgccgccgtgcaggtgatggcccccagagtgggcgcccaggaggccgtgggcatcaagagagccagaggcaagtggcagcaggcctag

SEQ ID NO: 299425 - DNA, 60 bp, Artificial Sequence
  derived and/or modified sequence
atgagaagattcgtgtactgcaaggtggtgctggccaccagcctgatgtgggtgctgtag

SEQ ID NO: 299426 - DNA, 60 bp, Artificial Sequence
  derived and/or modified sequence
atgcgtagattcgtgtattgcaaagtcgtgctggccacatccctcatgtgggtgctgtag

SEQ ID NO: 299427 - DNA, 60 bp, Artificial Sequence
  derived and/or modified sequence
atgagaagatttgtgtactgcaaggtggtgctggccaccagcctgatgtgggtgctgtag

SEQ ID NO: 299428 - DNA, 60 bp, Artificial Sequence
  derived and/or modified sequence
atgcggcggttcgtgtactgcaaggtggtgctggccaccagcctgatgtgggtgctgtag

SEQ ID NO: 299429 - DNA, 60 bp, Artificial Sequence
  derived and/or modified sequence
atgcgacggtttgtttattgtaaggtcgttttggctacaagcctgatgtgggtcttgtag

SEQ ID NO: 299430 - protein, 104 aa, Artificial Sequence
  derived and/or modified sequence
MPEAHMQPAKLQTSLPTTDHGSKKPVSCYLPPLSNAHPMCIEVQNAQNCSSAAATLEPSIISDTCFYKPITKDQLSSRSELNTVRLKCLNSLRGWKILNQLSLT

SEQ ID NO: 299431 - DNA, 315 bp, Artificial Sequence
  derived and/or modified sequence
atgccagaggcccacatgcaaccggcaaaacttcagacatcactgccaaccacagaccatggttccaagaagccagtaagctgttatctcccccccctctccaatgcccatcctatgtgcatcgaagttcagaacgcacaaaattgttcctccgctgcagccacgctggagccatcaattatctccgatacttgtttttacaaaccaatcaccaaagatcaactgtccagccgctctgagctcaatacagtacggttgaagtgtctgaacagcctgagaggctggaagatcttgaatcagctttccctgacctag

SEQ ID NO: 299432 - DNA, 315 bp, Artificial Sequence
  derived and/or modified sequence
atgcctgaggcccacatgcagcctgccaagctgcagaccagcctgcccaccacagaccacggcagcaagaagcctgtgtcctgctacctgccccccctgagcaatgcccaccccatgtgcatcgaggtgcagaatgcccagaactgcagcagcgctgctgccaccctggagcccagcatcatcagtgacacctgcttctacaagcccatcaccaaggaccagctgagcagccgctctgagctgaacacagtgcggctgaagtgcctgaacagcctgcggggctggaagatcctgaaccagctgagcctgacctag

SEQ ID NO: 299433 - DNA, 315 bp, Artificial Sequence
  derived and/or modified sequence
atgcccgaggcccacatgcagcccgccaagctgcagaccagcctgcccaccacggaccatggcagtaagaaacctgtttcttgttaccttccaccgctctctaacgctcatcccatgtgcatcgaagtgcagaacgcacagaactgtagtagcgccgcggcaaccctagagccaagcataatttctgacacatgcttttacaagcccatcactaaggaccagctcagcagcagaagcgaactgaatacggtgaggctgaagtgtctcaatagccttcggggatggaaaatcctaaatcagctctcactaacgtag

SEQ ID NO: 299434 - DNA, 315 bp, Artificial Sequence
  derived and/or modified sequence
atgcccgaggcccatatgcagcccgctaagctccagacatccctgccaaccactgatcacggaagcaagaagcccgtgagctgctatttgccccctctgtccaacgctcatcccatgtgcattgaggtgcagaatgctcagaactgttcctcagccgctgccacactggagcccagtatcatctctgatacctgcttctacaaacctattaccaaggaccagctgagttcacgctcagagctgaataccgtccgcctcaaatgcctgaattctcttcgcggttggaaaattctcaatcaactgtcccttacatag

SEQ ID NO: 299435 - DNA, 315 bp, Artificial Sequence
  derived and/or modified sequence
atgcccgaggcccacatgcagcccgccaagctgcagaccagcctgcccaccaccgaccacggcagcaagaagcccgtgagctgctacctgccccccctgagcaacgcccaccccatgtgcatcgaggtgcagaacgcccagaactgcagcagcgccgccgccaccctggagcccagcatcatcagcgacacctgcttctacaagcccatcaccaaggaccagctgagcagcagaagcgagctgaacaccgtgagactgaagtgcctgaacagcctgagaggctggaagatcctgaaccagctgagcctgacctag

SEQ ID NO: 299436 - DNA, 1037 bp, Artificial Sequence
  derived and/or modified sequence
tgacatgggcagagtttctcttgcccttaaagtcttactttccacttctaaataccttccaagatgttttcctccacaaacacaatatcttccttaaaagatagaccctgcatcagttgttaagctaacacatctttctcctcactacaaatgtatcactattgaatttctctccacaagtgtgaagatggctggagtagaaattctggcattgcttctcatcaccagaaggaaaaattcagagaaacagcccgaccacccaccctgacaaatgcctgaggcccacatgcagcctgcaaaactgcaaacatcactgcccaccacagaccacggaagcaagaagcctgtttcctgttacttgccaccactcagcaatgcccaccccatgtgtatagaggtccagaatgctcaaaattgttcttctgctgctgcaacattggagccttccatcatctcagacacatgcttttataaaccaataacaaaggatcaactttcttctaggtctgaattgaatactgtgaggctaaagtgtcttaactcattgagggggtggaaaatattaaaccaactaagccttacctaattacaatgccctgctgctgctcatctccctttattcgtttgtactcatactcaaaagaggttgtgtttttttcccttcattcaataacgattttccttgattcttagataagtccattccataatgtactccttaactgttctgaatttctttcagagaaaaactggaaaagacattaaatcatgttgaaatatttgactgactttcatctaggaaaaaatataaagttaaatctctacactaaaatataaacaaaataaaaagaaatttcagtaagaccaaaacatttacttttaaaaacctatatcatgttatatgtataactgaggaatgtaatcataattttgatttgtagaactgaagacaatatcaagtaaccctcaaaatgtaaattcaagaaacaaggtagttacgttagcctgcattaaaataaaaatatctgtgtgacaat

SEQ ID NO: 299437 - DNA, 2091 bp, Artificial Sequence
  derived and/or modified sequence
atggccaactacagaaacaccagcgagatccccctggtgctggtgggcacccaggacgccatcagcagcgccaaccccagagtgatcgacgacgccagagccagaaagctgagcaacgacctgaagagatgcacctactacgagacctgcgccacctacggcctgaacgtggagagagtgttccaggacgtggcccagaagatcgtggccaccagaaagaagcagcagctgagcatcggcccctgcaagagcctgcccaacagccccagccacagcagcgtgtgcagcgcccaggtgagcgccgtgcacatcagccagaccagcaacggcggcggcagcctgagcgactacagcagcagcgtgcccagcacccccagcaccagccagaaggagctgagaatcgacgtgccccccaccgccaacacccccacccccgtgagaaagcagagcaagagaagaagcaacctgttcaccagcagaaagggcagcgaccccgacaaggagaagaagggcctggagagcagagccgacagcatcggcagcggcagagccatccccatcaagcagggcatgctgctgaagagaagcggcaagagcctgaacaaggagtggaagaagaagtacgtgaccctgtgcgacaacggcgtgctgacctaccaccccagcctgcacgactacatgcagaacgtgcacggcaaggagatcgacctgctgagaaccaccgtgaaggtgcccggcaagagaccccccagagccaccagcgcctgcgcccccatcagcagccccaagaccaacggcctgagcaaggacatgagcagcctgcacatcagccccaacagcggcaacgtgaccagcgccagcggcagccagatggccagcggcatcagcctggtgagcttcaacagcagacccgacggcatgcaccagagaagctacagcgtgagcagcgccgaccagtggagcgaggccaccgtgatcgccaacagcgccatcagcagcgacaccggcctgggcgacagcgtgtgcagcagccccagcatcagcagcaccaccagccccaagctggaccccccccccagcccccacgccaacagaaagaagcacagaagaaagaagagcaccagcaacttcaaggccgacggcctgagcggcaccgccgaggagcaggaggagaacttcgagttcatcatcgtgagcctgaccggccagacctggcacttcgaggccaccacctacgaggagagagacgcctgggtgcaggccatcgagagccagatcctggccagcctgcagagctgcgagagcagcaagaacaagagcagactgaccagccagagcgaggccatggccctgcagagcatcagaaacatgagaggcaacagccactgcgtggactgcgagacccagaaccccaactgggccagcctgaacctgggcgccctgatgtgcatcgagtgcagcggcatccacagaaacctgggcacccacctgagcagagtgagaagcctggacctggacgactggcccgtggagctgatcaaggtgatgagcagcatcggcaacgagctggccaacagcgtgtgggaggagagcagccagggcagaaccaagcccagcgtggacagcaccagagaggagaaggagagatggatcagagccaagtacgagcagaagctgttcctggcccccctgccctgcaccgagctgagcctgggccagcacctgctgagagccaccgccgacgaggacctgagaaccgccatcctgctgctggcccacggcagcagagacgaggtgaacgagacctgcggcgagggcgacggcagaaccgccctgcacctggcctgcagaaagggcaacgtggtgctggcccagctgctgatctggtacggcgtggacgtgaccgccagagacgcccacggcaacaccgccctggcctacgccagacaggccagcagccaggagtgcatcgacgtgctgctgcagtacggctgccccgacgagagattcgtgctgatggccacccccaacctgagcagaagaaacaacaacagaaacaacagcagcggcagagtgcccaccatcatctag

SEQ ID NO: 299438 - DNA, 2091 bp, Artificial Sequence
  derived and/or modified sequence
atggcgaactacaggaatacatctgaaattccactcgtgttagttggaacacaggacgcgatttcttccgctaaccctcgcgtgatcgacgacgcaagggccagaaagctgagtaatgatctgaagcgctgcacctactacgagacttgtgccacgtacggcctaaatgtggagagggtgtttcaagacgtagcccaaaagattgtagccacacgcaagaagcagcaactgagtatcggtccttgcaagtctctgccgaattcacccagccattctagtgtttgttcagctcaggtatctgccgtccatatcagtcaaacctccaatggaggcggctccctgagcgattattcctcatcggtaccaagcactcccagtacttctcaaaaggagctacggattgatgtgccgcctactgcgaacactccaacaccggtcaggaagcaaagcaagcgcagaagtaatctctttacaagtaggaagggctctgatcctgataaggagaagaaaggcctcgagtctcgggctgatagtattggatctggcagggccatccccatcaaacagggaatgctactcaagcgctcaggtaagtccctcaacaaggaatggaaaaaaaaatatgtgacactgtgcgacaatggagtgcttacttatcatcccagcttacatgactacatgcagaacgtgcacggtaaagaaattgatctcctacgcacaaccgtgaaggtgcccggcaaacggccccctcgtgcaactagcgcctgtgcccctatttcctcccctaagacaaacgggctgtctaaagacatgtcctccctccacatttctccgaacagtggtaacgtcacttccgcctcggggtcacaaatggcctccggaatatcactggtgagcttcaattcaagacctgacggtatgcatcagagatcttatagcgttagcagcgcagatcagtggtccgaagctacggtcattgccaacagcgccatctcgtccgataccggcctgggggattccgtgtgttcatcgccctctatttcatccactacaagccccaagctggaccccccccctagtccacatgccaacagaaaaaagcaccgccgaaaaaagtccacatctaattttaaagccgatggtttatctgggacagcagaggagcaagaggagaacttcgaattcataatagttagtctgaccgggcagacttggcacttcgaagctactacctacgaggaaagagacgcatgggtccaagccatcgaatcacagatccttgcatccctgcagtcttgcgagtcctcaaaaaataaaagcagactgacgtctcagagcgaagcaatggctcttcagagtataaggaacatgcgcggaaacagccactgcgtagactgcgagacccaaaacccgaactgggctagcctgaatcttggagctttgatgtgcatcgagtgttcaggaattcataggaacctggggacccacctgtcgcgcgtacgatccctggacctggacgactggcccgtggaacttattaaggtcatgtcatctataggcaacgaactggccaactccgtatgggaagaatccagtcagggccgtacaaaaccctctgttgattctacacgagaagagaaagaaaggtggataagggcaaagtatgagcagaagctttttctggctccgttgccatgcacggagcttagcctgggccagcaccttctgagagcgaccgccgacgaggacctgcggactgctatcttattacttgctcacgggtcaagggacgaagttaatgaaacttgtggcgagggcgacggacggactgccttacatctggcctgtcggaagggaaatgtggtgctggctcaactgctgatctggtatggggtagatgtgaccgctcgggacgcgcacggcaatactgctttagcttatgcgagacaagcctctagtcaggaatgtatcgatgtactgcttcagtatggttgtcccgatgagcgttttgtacttatggcaacacccaatctgagccgcaggaacaacaatagaaataactccagcggacgggtgccaacaataatatag

SEQ ID NO: 299439 - DNA, 2091 bp, Artificial Sequence
  derived and/or modified sequence
atggccaactacagaaacaccagcgagatccccctggtgctggtgggcacccaggatgccatcagcagcgccaacccccgggtgattgatgatgcccgggccaggaagctgagcaatgacctgaagcgctgcacctactatgagacctgtgccacctacggcctgaatgtggagagggtcttccaggatgtggcccagaagatcgtggccaccaggaagaagcagcagctgagcatcggcccctgcaagagcctgcccaacagccccagccacagctctgtgtgcagcgcccaggtgtctgctgtgcacatcagccagaccagcaatggaggcggcagcctgagtgactacagcagctctgtgcccagcacccccagcaccagccagaaggagctgagaattgatgtgcccccaacagccaacacccccacccctgtgaggaagcagagcaagaggaggagcaacctcttcaccagcaggaaaggaagtgaccctgacaaggagaagaagggcctggagagcagagctgacagcatcggcagcggccgggccatccccatcaagcagggcatgctgctgaagaggtctgggaagagcctgaacaaggagtggaagaagaagtatgtgaccctgtgtgacaacggggtgctgacctaccaccccagcctgcatgactacatgcagaatgtgcacggcaaggagattgacctgctgcggaccaccgtgaaggtgcctgggaagaggcctccccgggccaccagcgcctgtgcccccatcagcagccccaagaccaacggcctgagcaaggacatgagcagcctgcacatcagccccaacagcggaaatgtgaccagcgccagcggcagccagatggccagcggcatcagcctggtgtccttcaacagcaggccagatggcatgcaccagaggagctacagcgtgagcagcgctgaccagtggagcgaggccaccgtcatcgccaacagcgccatcagcagtgacaccggcctgggggacagcgtgtgcagcagccccagcatcagcagcaccaccagccccaagctggaccccccacccagcccccacgccaacaggaagaagcacaggaggaagaagagcaccagcaacttcaaggcagatggcctgtctggaacagctgaggagcaggaggagaactttgagttcatcatcgtgtccctgaccggccagacctggcactttgaggccaccacctatgaggagagagatgcctgggtgcaggccatcgagagccagatcctggccagcctgcagagctgtgagagcagcaagaacaagagccggctgaccagccagagcgaggccatggccctgcagagcatccggaacatgaggggcaacagccactgtgtggactgtgagacccagaaccccaactgggccagcctgaacctgggcgccctgatgtgcattgaatgttctggcatccacaggaacctgggcacccacctgagccgggtgcgcagcctggacctggatgactggcctgtggagctgatcaaggtgatgagcagcattggaaatgagctggccaacagcgtgtgggaggagagcagccagggccgcaccaagcccagcgtggacagcacccgggaggagaaggagcgctggatccgggccaagtatgagcagaagctgttcctggcccccctgccctgcacagagctgagcctgggccagcacctgctgcgggccacagcagatgaggacctgaggacagccatcctgctgctggcccacggcagcagagatgaggtgaatgagacctgtggggagggagatggccgcacagccctgcacctggcctgcaggaaaggaaatgtggtgctggcccagctgctgatctggtacggcgtggatgtgacagccagagatgcccacggcaacacagccctggcctatgcccggcaggccagcagccaggagtgcattgatgtgctgctgcagtatggctgcccagatgaaagatttgtgctgatggccacccccaacctgagcagaagaaacaacaacagaaacaacagcagcggccgggtgcccaccatcatctag

SEQ ID NO: 299440 - DNA, 2091 bp, Artificial Sequence
  derived and/or modified sequence
atggccaactaccggaacaccagcgagatccccctggtgctggtgggcacccaagatgccatcagtagcgcaaaccccagagtgatcgacgatgcccgagctcgaaagctctccaatgatcttaagcgctgcacctattacgaaacgtgcgccacctatggtctcaatgtcgagcgcgtgttccaagatgtggctcagaaaatcgtggcaacccgtaaaaagcagcaactgtccatcggcccctgtaagtctcttccaaatagtccttctcacagctccgtctgtagcgcacaggtatccgccgtacatatttcccagacatcaaatggaggcggcagcttaagcgattacagctcttcggtcccgagcacaccctccacttcgcagaaagaacttagaatcgatgtgccccccacagccaacaccccaacacctgttaggaagcagagtaagagaaggtcaaatctcttcacgagccgcaaaggctcggatcctgacaaagagaaaaaaggccttgagagtcgggcagatagcattgggtccggcagagctattccgatcaagcaggggatgctactgaaaaggtctgggaagagcttgaataaggagtggaagaaaaaatatgtgaccctctgtgacaacggggtcctgacctaccatccatcacttcatgattacatgcaaaacgtgcacgggaaggagattgatttgctgcgaaccacagtgaaagtgccaggcaagaggccaccccgtgctacatcagcctgcgcccccattagctcaccaaagactaacggacttagtaaggatatgagtagtctccacatttctcctaattcgggcaacgtaacaagcgcatctgggtcacaaatggcatcggggataagcctggtctcttttaacagtcgcccagatggcatgcatcagcgatcttattctgtttcatctgccgatcagtggtctgaagccaccgttattgccaacagtgctatctctagtgacacaggcttaggtgactcagtttgttcaagtccatccatttcaagcacaaccagtcccaagctcgaccccccaccttccccccatgcaaatcgcaagaagcacaggcggaagaagagcaccagcaacttcaaagccgatggattgagtggcacggctgaagagcaggaggagaactttgagttcattattgtatcgctcacaggccagacctggcacttcgaggcaacaacctatgaagagcgtgatgcctgggtgcaggcgatcgaaagccagatcttggcatcgcttcaatcttgcgaatcaagcaagaacaaatcgcgcctcacttcccaaagtgaagccatggccttgcagtctataaggaacatgcgagggaatagccactgcgtggattgcgaaacacagaatccaaactgggcctcactcaacttaggcgcactaatgtgcatcgagtgcagcggcattcatcgaaacctcggaacccatttgagccgggtgaggtctctggatctggacgattggccagttgagctgattaaggtgatgagctctatcggcaatgagctggcaaatagcgtctgggaagagtcatcacaaggcagaacgaagccctccgttgattctactagggaagaaaaggagagatggatcagggcaaagtatgaacagaaactgtttctcgccccactgccttgcactgagctgtcccttggtcaacacctgctgagagccactgctgacgaagatcttagaaccgctatactgttgctggcccacgggtcgagggacgaggtgaacgaaacctgcggtgagggggacggtcggaccgccctgcatttggcctgcaggaagggaaacgtggttctagctcagctcctcatttggtatggggtagatgtgacagcacgcgacgcacatggaaacactgccctggcctacgcaagacaggccagcagccaggaatgcattgacgtactgttgcagtacggctgccccgacgaacggttcgtgcttatggcaaccccaaatctgtccagacggaacaataaccgcaataacagctctggtcgggtgcctacgatcatctag

SEQ ID NO: 299441 - DNA, 2091 bp, Artificial Sequence
  derived and/or modified sequence
atggcgaactatcggaatacttccgaaatacctctggttctggtcggaacccaggacgcaatctcatctgcaaacccaagggtcatcgacgatgcaagggccagaaaactgagtaacgacttaaagcgctgcacttattacgagacctgtgccacgtatgggctgaatgtggagcgggtattccaggatgtagcgcagaagatcgtggccacgcggaagaaacaacaactctctatagggccttgcaagtctctgccaaattcaccatcgcactctagtgtgtgttctgcacaagtgagtgcagtgcacatcagtcaaacctccaacggtggcggatcattgtcagactactcaagctcagtgccatccactccgagcacatcacagaaagaactgagaatcgacgtgccccctacagccaacactcctacccctgttcgcaagcagtctaagaggcgctctaacctttttacctctaggaagggctcggacccggataaggagaaaaaaggattggagtcccgagccgactccattgggtctggacgtgccattcctattaaacagggcatgttgctgaagagatcaggcaaatcccttaataaagagtggaagaagaagtatgtgacactgtgtgacaacggcgtgttgacataccacccttcactgcacgactatatgcagaatgtgcatggaaaggagattgacctcttgaggacaacggtgaaggtgcccggaaagaggccccctcgggctaccagcgcatgcgcccctatttcctccccaaaaaccaacggcctgtccaaagacatgtcttctctgcacatttctccaaattctgggaatgtcactagtgcctctggttcccagatggcttcaggaatttccctcgtcagcttcaactctagacccgatggcatgcaccagagatcctactccgtatcaagtgctgaccagtggagtgaggctacggtgatagctaactctgctatcagttcagacacaggtctcggggatagcgtctgttccagcccaagcatttcaagcacgacgagccccaagttagatccccctcccagtccccacgccaacaggaagaagcacaggcgcaaaaagtctacgagcaacttcaaagctgatggtctaagcggaaccgccgaagaacaggaagagaacttcgagtttatcatcgtgagcctgacagggcagacttggcacttcgaggcaaccacctacgaagagagggacgcctgggtccaggccattgaatcacagattctcgcgtcactccagtcatgcgaatctagtaaaaacaagagtcgcttgaccagccagagcgaggcaatggccctgcagtcaatccggaacatgagagggaattcccattgcgtggattgcgaaacccaaaacccaaactgggcatcactgaatctcggcgctctcatgtgcattgaatgttctggaatccataggaacctcggaactcatctcagccgtgttcgctccctggacttggatgattggcccgtagaactgattaaggtgatgagttcaataggcaacgagctggcaaactcggtttgggaagagtcctcccagggacgcaccaagccgtccgtcgattccacccgcgaggaaaaggaacgctggatccgcgctaaatacgagcagaaactctttctggctccactaccatgtacagagctgtcattaggccagcatttacttagggcgacggccgacgaagatctacgcacagccatcctactgcttgcccacggtagccgggacgaggttaatgagacctgtggggagggcgatggcagaactgccctgcatctcgcgtgtaggaaaggcaacgtggtattagcacagctgctcatatggtacggagtggacgtgaccgcacgcgatgcccacggtaacaccgcactcgcgtacgccaggcaggcttctagccaggaatgtattgacgttctactccaatacgggtgtcccgatgagagatttgttcttatggcaacgccgaatctgtctcgtcggaataataaccgcaataacagttcaggacgggtcccaactatcatttag

SEQ ID NO: 299442 - DNA, 2665 bp, Artificial Sequence
  derived and/or modified sequence
gtttaccactactacagtcgaatggccaactatcggaacacgagcgagattcctctggttctggtgggaacccaggatgccataagttctgctaacccgagggtcatcgatgacgccagggcgaggaagctctccaacgacctgaaacggtgcacgtactacgagacgtgtgctacatacgggctgaatgtggagagggtcttccaggacgttgcccagaagattgttgccacaaggaagaagcagcagctgtccataggaccctgcaagtcgctacctaattctcccagccattcctccgtctgttccgcgcaggtgtctgccgtgcacatcagccagacaagtaatggaggtgggagtttaagcgactattcctcctccgttccatcgactcccagcaccagccagaaggaacttcggatcgatgttcctcccactgccaacacgcccacgcccgttcgcaagcagtctaagcgccggtccaacctgttcacctctcggaaagggagcgacccagacaaagagaagaaaggcctggagagtcgtgcggacagcattgggagcggccgagccatcccaattaaacagggcatgctgttgaagcgaagtggcaaatcgttgaataaagagtggaaaaagaaatatgtcaccctgtgtgacaatggcgtgctgacctatcatcccagtttacatgattacatgcagaatgttcatggtaaggagattgaccttctgagaaccactgtgaaagtcccagggaagaggccaccccgagccacgtcagcctgcgcacccatctccagccctaaaaccaatggcctatccaaggacatgagcagtttacacatctcacccaattcagggaatgtcactagtgcatctgggtctcagatggcaagcggcatcagcctggtctccttcaacagccgacccgacggcatgcaccagcgctcctactcagtctccagtgccgaccagtggagtgaggctacggtcattgcaaactcggccatcagcagtgacacagggctgggtgactccgtatgctccagccccagtatctccagcaccaccagccccaagctcgacccgcccccctcccctcacgccaacagaaagaagcaccgaaggaagaaaagcactagcaacttcaaagccgacggcctgtccggcactgctgaagaacaagaagaaaattttgagtttatcattgtgtccctcactggccaaacatggcactttgaagccacgacgtatgaggagcgggacgcctgggtccaagccatcgagagccagatcctggccagcctgcagtcgtgcgagagcagcaagaacaagtcccggctgacgagccagagcgaggccatggccctgcagtcgatccggaacatgcgcgggaactcccactgtgtggactgcgagacccagaatcccaactgggccagtttgaacttgggagccctcatgtgcatcgaatgctcagggatccaccggaatcttggcacccacctttcccgagtccgatctctggacctggatgactggccagtcgagctcatcaaggtgatgtcatccatcgggaacgagctagccaacagcgtctgggaagagagcagccaggggcggacgaaaccatcggtagactccacaagggaagagaaggaacggtggatccgtgccaagtacgagcagaagctcttcctggccccgctgccctgcacggagctgtccctgggccagcacctgctgcgggccaccgccgacgaggacctgcggacggccatcctgctgctggcacacggctcccgggacgaggtgaacgagacctgcggggagggagacggccgcacggcgctgcatctggcctgccgcaaggggaatgtggtcctggcgcagctcctgatctggtacggagtggacgtcacggcccgagatgcccacgggaacacagctctggcctacgcccggcaggcctccagccaggagtgcatcgacgtgctgctgcagtacggctgccccgacgagcgcttcgtgctcatggccacccctaacctgtccaggagaaacaataaccggaacaacagcagtgggagggtgcccaccatcatctgaggaacagccgtgcccgcctgctcgccgcacctgggacgcggcagcctcgccgcattctcgctcagaagtcgcagcacgtgagtcccgtcgcatcccctccctcttcctggtggccacctccctcccgcccacccactctcaccccaaacaaaatcacaaaacctggacatccctcaaggggcgaagaggcggccgggagactgcagaagtggctccttttcataaactcccctaaaccacacacaggagagagcgacgggcctcggccctttgatgatagcacatggcgcaggacccttgtcctggtggcacaagggatggggacgcgagggggaggggaggcgaggaacaaggagaaggggcaactttccttaactggcagttgagcacatagtacatttcccctctaccaaacggaacacttggattccatctcttctctgaggagctcgacggcataaatcagaagcaagcacagagtttgtcaggtttgaagcccctatgatggtgtgtgtcaaatcagttgtagctaatctgtccagggagaatactg

SEQ ID NO: 299443 - protein, 1069 aa, Artificial Sequence
  derived and/or modified sequence
MYLLDGSGEPASPPADAMPRGTPPRKTVYRISVTMVRKEQLAAPGSGGPDPRPVRRPRPARSPDAPGRLEEEAEEAEGAEEPEGPRPRAWDFRTFRTRSTGQLELGRLRPCARGLEPADLAGSAPAEEEGRGSPASGSPDVEGARAAPLRRSLSFRHWSGPEAPQGRTLGGGRRHSSSGSLAWAPCDEAAAGTTLEPATATQPASEKRNTLDVGEVLSKNDALSDLERWERSKSKNRTLDNSDLQRLERARAAAGAGAASEHRLLRFFSGIFARRDGGPGGGPSPRSGASRPRGYFSLRRAPAEAHSSSAESIDGSPRRDAFVNSQEWTLSRSVPELKVGIVGNLASGKSALVHRYLTGTYVQEESPEGGRFKKEIVVDGQSYLLLIRDEGGPPEAQFAMWVDAVIFVFSLEDEISFQTVYHYYSRMANYRNTSEIPLVLVGTQDAISSANPRVIDDARARKLSNDLKRCTYYETCATYGLNVERVFQDVAQKIVATRKKQQLSIGPCKSLPNSPSHSSVCSAQVSAVHISQTSNGGGSLSDYSSSVPSTPSTSQKELRIDVPPTANTPTPVRKQSKRRSNLFTSRKGSDPDKEKKGLESRADSIGSGRAIPIKQGMLLKRSGKSLNKEWKKKYVTLCDNGVLTYHPSLHDYMQNVHGKEIDLLRTTVKVPGKRPPRATSACAPISSPKTNGLSKDMSSLHISPNSDTGLGDSVCSSPSISSTTSPKLDPPPSPHANRKKHRRKKSTSNFKADGLSGTAEEQEENFEFIIVSLTGQTWHFEATTYEERDAWVQAIESQILASLQSCESSKNKSRLTSQSEAMALQSIRNMRGNSHCVDCETQNPNWASLNLGALMCIECSGIHRNLGTHLSRVRSLDLDDWPVELIKVMSSIGNELANSVWEESSQGRTKPSVDSTREEKERWIRAKYEQKLFLAPLPCTELSLGQHLLRATADEDLRTAILLLAHGSRDEVNETCGEGDGRTALHLACRKGNVVLAQLLIWYGVDVTARDAHGNTALAYARQASSQECIDVLLQYGCPDERFVLMATPNLSRRNNNRNNSSGRVPTII

SEQ ID NO: 299444 - DNA, 3210 bp, Artificial Sequence
  derived and/or modified sequence
atgtacctgctggacggcagcggcgagcccgccagcccccccgccgacgccatgcccagaggcaccccccccagaaagaccgtgtacagaatcagcgtgaccatggtgagaaaggagcagctggccgcccccggcagcggcggccccgaccccagacccgtgagaagacccagacccgccagaagccccgacgcccccggcagactggaggaggaggccgaggaggccgagggcgccgaggagcccgagggccccagacccagagcctgggacttcagaaccttcagaaccagaagcaccggccagctggagctgggcagactgagaccctgcgccagaggcctggagcccgccgacctggccggcagcgcccccgccgaggaggagggcagaggcagccccgccagcggcagccccgacgtggagggcgccagagccgcccccctgagaagaagcctgagcttcagacactggagcggccccgaggccccccagggcagaaccctgggcggcggcagaagacacagcagcagcggcagcctggcctgggccccctgcgacgaggccgccgccggcaccaccctggagcccgccaccgccacccagcccgccagcgagaagagaaacaccctggacgtgggcgaggtgctgagcaagaacgacgccctgagcgacctggagagatgggagagaagcaagagcaagaacagaaccctggacaacagcgacctgcagagactggagagagccagagccgccgccggcgccggcgccgccagcgagcacagactgctgagattcttcagcggcatcttcgccagaagagacggcggccccggcggcggccccagccccagaagcggcgccagcagacccagaggctacttcagcctgagaagagcccccgccgaggcccacagcagcagcgccgagagcatcgacggcagccccagaagagacgccttcgtgaacagccaggagtggaccctgagcagaagcgtgcccgagctgaaggtgggcatcgtgggcaacctggccagcggcaagagcgccctggtgcacagatacctgaccggcacctacgtgcaggaggagagccccgagggcggcagattcaagaaggagatcgtggtggacggccagagctacctgctgctgatcagagacgagggcggcccccccgaggcccagttcgccatgtgggtggacgccgtgatcttcgtgttcagcctggaggacgagatcagcttccagaccgtgtaccactactacagcagaatggccaactacagaaacaccagcgagatccccctggtgctggtgggcacccaggacgccatcagcagcgccaaccccagagtgatcgacgacgccagagccagaaagctgagcaacgacctgaagagatgcacctactacgagacctgcgccacctacggcctgaacgtggagagagtgttccaggacgtggcccagaagatcgtggccaccagaaagaagcagcagctgagcatcggcccctgcaagagcctgcccaacagccccagccacagcagcgtgtgcagcgcccaggtgagcgccgtgcacatcagccagaccagcaacggcggcggcagcctgagcgactacagcagcagcgtgcccagcacccccagcaccagccagaaggagctgagaatcgacgtgccccccaccgccaacacccccacccccgtgagaaagcagagcaagagaagaagcaacctgttcaccagcagaaagggcagcgaccccgacaaggagaagaagggcctggagagcagagccgacagcatcggcagcggcagagccatccccatcaagcagggcatgctgctgaagagaagcggcaagagcctgaacaaggagtggaagaagaagtacgtgaccctgtgcgacaacggcgtgctgacctaccaccccagcctgcacgactacatgcagaacgtgcacggcaaggagatcgacctgctgagaaccaccgtgaaggtgcccggcaagagaccccccagagccaccagcgcctgcgcccccatcagcagccccaagaccaacggcctgagcaaggacatgagcagcctgcacatcagccccaacagcgacaccggcctgggcgacagcgtgtgcagcagccccagcatcagcagcaccaccagccccaagctggaccccccccccagcccccacgccaacagaaagaagcacagaagaaagaagagcaccagcaacttcaaggccgacggcctgagcggcaccgccgaggagcaggaggagaacttcgagttcatcatcgtgagcctgaccggccagacctggcacttcgaggccaccacctacgaggagagagacgcctgggtgcaggccatcgagagccagatcctggccagcctgcagagctgcgagagcagcaagaacaagagcagactgaccagccagagcgaggccatggccctgcagagcatcagaaacatgagaggcaacagccactgcgtggactgcgagacccagaaccccaactgggccagcctgaacctgggcgccctgatgtgcatcgagtgcagcggcatccacagaaacctgggcacccacctgagcagagtgagaagcctggacctggacgactggcccgtggagctgatcaaggtgatgagcagcatcggcaacgagctggccaacagcgtgtgggaggagagcagccagggcagaaccaagcccagcgtggacagcaccagagaggagaaggagagatggatcagagccaagtacgagcagaagctgttcctggcccccctgccctgcaccgagctgagcctgggccagcacctgctgagagccaccgccgacgaggacctgagaaccgccatcctgctgctggcccacggcagcagagacgaggtgaacgagacctgcggcgagggcgacggcagaaccgccctgcacctggcctgcagaaagggcaacgtggtgctggcccagctgctgatctggtacggcgtggacgtgaccgccagagacgcccacggcaacaccgccctggcctacgccagacaggccagcagccaggagtgcatcgacgtgctgctgcagtacggctgccccgacgagagattcgtgctgatggccacccccaacctgagcagaagaaacaacaacagaaacaacagcagcggcagagtgcccaccatcatctag

SEQ ID NO: 299445 - DNA, 3210 bp, Artificial Sequence
  derived and/or modified sequence
atgtatttactggacggcagcggagagccagcctcgcctcccgctgacgccatgcccagagggaccccccctcggaagacagtctataggattagcgtgactatggtccgaaaggaacagcttgccgccccgggcagcggtggacctgatccacgcccggttaggcggcccagacccgctcggtcccccgacgcacctggaagattagaggaagaggctgaggaggctgaaggcgccgaggaaccagaggggccgaggccgcgggcttgggacttccggaccttccgcacacggagcacaggtcaactcgaactcggacgactgcggccgtgcgcccgcggactagaacctgctgacctggcaggatccgccccagccgaggaagaaggccgtggcagcccagcatcaggctcccccgacgtggaaggtgccagagctgccccactccggcgttctcttagttttcgccattggtccgggcccgaggctccacagggacggacactcggcggcggccgccgccatagctcgtccggtagccttgcttgggccccgtgtgacgaggctgcagccgggaccactcttgaacccgcaaccgccactcaaccagcctcagaaaaacgcaacacattggacgtgggcgaggtgctttctaagaacgatgcgttgtccgacctggagaggtgggagagaagcaaatctaaaaacagaaccctagataactcagatctgcaacggctggagagggcccgggctgccgcaggcgccggagcagcctcagaacaccggctgctgaggttcttttccggaatattcgcccgtagggatggcggaccaggtgggggcccgagcccacggtccggggcttctagaccacgggggtacttctccctgcgcagggcgccagccgaagcccattcatcttctgctgagagcatcgatggaagccctaggagggatgcatttgtgaattcgcaggagtggacgctgagccgcagtgtgcccgagctgaaagttggaatcgtcggaaatctcgcctccggcaaatcagcactcgtccatcgctaccttaccgggacttatgttcaggaagagagccctgaagggggtagatttaagaaggaaattgtcgtcgacggccagagctatctcctcctgattcgagacgagggcggcccacccgaggctcagttcgcaatgtgggtggacgcagtgatcttcgtctttagtctagaggacgagatttcttttcaaacagtttatcattactacagtcggatggctaactaccggaacacaagcgagatacctctggtgctggttggcacgcaggatgcaatttctagcgcaaatcctcgagttatcgacgacgctcgggcacgcaaactaagcaacgatcttaaacggtgcacatattacgaaacctgcgctacctacgggctgaatgtggagcgcgtttttcaggatgtggcacagaaaatcgtggcaacacgcaagaaacaacagctctctatcgggccatgtaaaagcctgccgaactccccatctcacagctcggtgtgctccgcacaggtgagtgcagtgcacatatctcaaactagcaacggtgggggatccctgtctgattactcttctagtgtcccctctaccccaagtacatcccagaaggaattgcgcatcgatgtccccccaactgccaacactcccactcccgtcaggaaacaatccaagaggagatctaacctcttcacgtcccgaaaagggagcgaccccgacaaggagaaaaaggggcttgagagccgggctgattcaatcgggtccgggcgggcgattcccatcaagcagggcatgctcctcaagcgctctggaaaatcacttaataaagagtggaagaaaaaatatgtcacactctgtgacaacggagtcctgacataccaccctagtctgcatgattacatgcagaatgtccacgggaaagaaatcgatctgctgagaacgacagttaaagtgcctggcaaacgacccccccgtgccacctccgcatgcgcccctatcagttcaccaaaaaccaatggtctgtcgaaagacatgtcctccctacatatctcaccgaacagtgacacaggtctcggggactcagtctgttcctccccttcaatcagcagtactacttcaccgaaactcgaccccccaccatctcctcatgccaatagaaaaaaacaccggaggaagaaatccacatcaaattttaaggccgatgggctatcaggcactgccgaggagcaggaagagaacttcgagtttattattgtctccttgactggacaaacatggcatttcgaagccactacgtacgaggagcgcgatgcatgggtccaggctattgagtcccagatattggcctctctccagtcttgcgagagctctaagaacaagagccgtctgacatctcaatctgaagccatggcgctgcagtctatcagaaatatgagggggaactcccactgcgtcgattgtgaaacccagaatcccaactgggcgtcactgaaccttggggccttgatgtgtatcgagtgcagtgggattcataggaatctgggcacccatttgagccgggtgcgatccctggaccttgacgactggcctgttgaactgatcaaagtgatgtcctctattgggaacgaactggctaattctgtttgggaagagagctctcaagggagaacaaagccatctgtcgactctacaagggaggaaaaagaacggtggattcgtgctaagtacgagcagaagttattcctagcaccactaccctgcacggagctctcgctaggacagcatctattgagagcaactgctgacgaggacttacggactgctattctgttgttagcgcacggctccagagatgaggtgaacgaaacctgtggagagggtgatggacgtacagcacttcaccttgcttgccgcaagggaaatgttgtgttggcacagctcctgatctggtatggcgtggatgtgaccgcacgggacgctcacggtaacactgctctcgcgtacgcccggcaggctagctctcaggaatgcattgacgtgcttctccaatacgggtgccccgacgagaggtttgtgctgatggctacccccaacttgagtaggaggaataacaatcggaataactcatcaggacgagttcccaccattatttag

SEQ ID NO: 299446 - DNA, 3210 bp, Artificial Sequence
  derived and/or modified sequence
atgtacctgctggatggcagcggggagcccgccagccccccagcagatgccatgccccggggcaccccacccaggaagacagtgtaccgcatctctgtgaccatggtgaggaaggagcagctggccgcccctggcagcggcggccctgaccccaggcctgtgagaagacccaggcctgcccggagcccagatgcccctggccgcctggaggaggaggccgaggaggccgagggcgctgaggagcctgagggcccccggccccgggcctgggacttccgcaccttccgcaccaggagcacaggccagctggagctgggccgcctgcggccctgtgcccggggcctggagcctgctgacctggccggcagcgccccagctgaggaggagggccggggcagccctgccagcggcagcccagatgtggagggcgcccgggccgcccccctgcggcgcagcctgtccttccgccactggagcggccctgaggccccccagggccgcaccctgggcggcggcagaagacacagcagcagcggcagcctggcctgggccccctgtgatgaagctgctgctggcaccaccctggagcccgccacagccacccagcctgccagcgagaagaggaacaccctggatgtgggggaggtgctgagcaagaatgatgccctgagtgacctggagcgctgggagaggagcaagagcaagaacagaaccctggacaacagcgacctgcagaggctggagcgggcccgggctgctgctggggccggggccgccagcgagcaccggctgctgcgcttcttcagcggcatctttgccaggagagatggcggccctgggggcggccccagccccaggtctggggccagccggccccggggctacttcagcctgcggcgggccccagctgaggcccacagcagcagcgctgagagcattgatggcagccccaggagagatgcctttgtgaacagccaggagtggaccctgagccgctctgtgcctgagctgaaggtgggcatcgtgggcaacctggccagcggcaagagcgccctggtgcaccgctacctgaccggcacctacgtgcaggaggagagccctgagggcggccgcttcaagaaggagatcgtggtggatggccagagctacctgctgctgatcagagatgaaggaggccccccagaggcccagtttgccatgtgggtggatgctgtgatctttgtgttcagcctggaggatgagatctccttccagacagtgtaccactactacagcaggatggccaactacagaaacaccagcgagatccccctggtgctggtgggcacccaggatgccatcagcagcgccaacccccgggtgattgatgatgcccgggccaggaagctgagcaatgacctgaagcgctgcacctactatgagacctgtgccacctacggcctgaatgtggagagggtcttccaggatgtggcccagaagatcgtggccaccaggaagaagcagcagctgagcatcggcccctgcaagagcctgcccaacagccccagccacagctctgtgtgcagcgcccaggtgtctgctgtgcacatcagccagaccagcaatggaggcggcagcctgagtgactacagcagctctgtgcccagcacccccagcaccagccagaaggagctgagaattgatgtgcccccaacagccaacacccccacccctgtgaggaagcagagcaagaggaggagcaacctcttcaccagcaggaaaggaagtgaccctgacaaggagaagaagggcctggagagcagagctgacagcatcggcagcggccgggccatccccatcaagcagggcatgctgctgaagaggtctgggaagagcctgaacaaggagtggaagaagaagtatgtgaccctgtgtgacaacggggtgctgacctaccaccccagcctgcatgactacatgcagaatgtgcacggcaaggagattgacctgctgcggaccaccgtgaaggtgcctgggaagaggcctccccgggccaccagcgcctgtgcccccatcagcagccccaagaccaacggcctgagcaaggacatgagcagcctgcacatcagccccaacagcgacaccggcctgggggacagcgtgtgcagcagccccagcatcagcagcaccaccagccccaagctggaccccccacccagcccccacgccaacaggaagaagcacaggaggaagaagagcaccagcaacttcaaggcagatggcctgagcggcacagctgaggagcaggaggagaactttgagttcatcatcgtgtccctgaccggccagacctggcactttgaggccaccacctatgaggagagagatgcctgggtgcaggccatcgagagccagatcctggccagcctgcagagctgtgagagcagcaagaacaagagccggctgaccagccagagcgaggccatggccctgcagagcatccggaacatgaggggcaacagccactgtgtggactgtgagacccagaaccccaactgggccagcctgaacctgggcgccctgatgtgcatcgagtgcagcggcatccacaggaacctgggcacccacctgagccgggtgcgcagcctggacctggatgactggcctgtggagctgatcaaggtgatgagcagcattggaaatgagctggccaacagcgtgtgggaggagagcagccagggccgcaccaagcccagcgtggacagcacccgggaggagaaggagcgctggatccgggccaagtatgagcagaagctgttcctggcccccctgccctgcacagagctgagcctgggccagcacctgctgcgggccacagcagatgaggacctgaggacagccatcctgctgctggcccacggcagcagagatgaggtgaatgagacctgtggggagggagatggccgcacagccctgcacctggcctgcaggaaaggaaatgtggtgctggcccagctgctgatctggtatggagtggatgtgacagccagagatgcccacggcaacacagccctggcctatgcccggcaggccagcagccaggagtgcattgatgtgctgctgcagtatggctgcccagatgaaagatttgtgctgatggccacccccaacctgagcagaagaaacaacaacagaaacaacagcagcggccgggtgcccaccatcatctag

SEQ ID NO: 299447 - DNA, 3210 bp, Artificial Sequence
  derived and/or modified sequence
atgtacctgctggacggcagcggcgagcccgccagcccccccgccgacgctatgccccggggcacacctccccgcaaaaccgtgtacagaataagtgtgactatggtgcggaaggagcagctcgccgctccgggatccggcggccccgatccccggccagttcgccggcctcggccggctcggtcccctgatgcccccggacgcctggaagaagaggcggaagaggctgaaggtgcagaggagcctgaaggtccccggcccagagcttgggacttccgtaccttcagaacacgttcgacgggccaattggaactgggacgactgcgcccctgtgctcgaggtctcgaaccagccgatctggcaggcagtgcgcccgccgaggaggaggggcggggatcacctgcttccggcagccctgacgttgaaggcgccagggcagcaccactgaggcggtccctgtctttcaggcattggagcggcccagaagccccacagggcaggacattagggggcggaaggaggcactcaagctcggggagcctagcctgggctccttgcgatgaggcggccgctgggactacattggagccagctaccgcaacccagcccgccagtgagaagcggaacacactggacgtgggagaggtgctcagtaaaaacgacgccctgtctgatctggagcggtgggagaggagtaagtccaagaatagaacgttggataactccgacctccaacgtctggaacgcgccagggccgcagcgggggccggggccgcctccgagcaccgtttgctgaggttcttctccgggattttcgcccggagagatggaggcccaggcggaggacccagcccccggagcggggcctcccgacctcggggctacttctctctgcgcagggcccctgccgaggcgcacagctcctccgcggagtctatcgacggaagccctaggcgcgatgccttcgtgaactcacaagaatggacactgagccgatccgtcccggagctcaaagtgggaattgtggggaacttggcctcagggaagtcggctcttgtccaccggtacctgaccggcacctatgtacaggaggaatcacctgagggtgggcgctttaaaaaagagattgtcgtggatgggcagtcctacttattgctgataagagacgagggtggccctccggaagcacagttcgccatgtgggtcgacgcagtgatttttgttttctctcttgaggacgaaatcagttttcagacagtctaccattattatagtcgaatggccaattatcggaatacgtcagaaataccacttgtgttggtggggacacaagacgcaatttcgtcggctaatccccgggtgattgacgacgcacgggcccgcaagctgagcaacgatctaaagaggtgcacctactacgagacatgcgcaacctacggactgaatgtcgagagagtttttcaggacgtagcccaaaaaatagtagccacccggaagaagcagcagctgagtatcggaccctgtaaatccttgcctaacagcccctcccattcaagcgtttgttctgctcaggtgagtgcagtgcatatctcccagacatccaacggcggtggatctctttccgactactcaagtagcgtgccctcaacaccatccacttcccagaaggagctgcgtatcgacgtaccaccgaccgcaaacaccccaactccagtccgaaaacagtccaaaaggagatcaaatctttttacaagccggaaagggagtgaccctgacaaggaaaagaagggtctggaatctcgggctgattctatcgggtctggccgcgccatcccaattaaacagggcatgctgctgaagcggtcaggcaaaagcctcaacaaggagtggaaaaaaaaatatgtgaccctgtgcgataatggagtgctcacataccacccgtcactccacgattatatgcagaacgttcatggcaaggagattgatctgctgcggacgaccgtgaaagtacccggtaaaagacctccccgcgccacctcagcttgtgcccccatcagctctccaaagactaatggcttatccaaggatatgtcatcgctccatatctctcctaatagtgatacaggactgggggacagcgtttgctccagcccatctatcagcagcacaacctcccccaaacttgatcctccacccagccctcatgcaaaccgaaaaaaacataggagaaagaaatccaccagcaattttaaagctgatggcctctccggtacggccgaagagcaggaagagaacttcgagtttattatcgtctccctgacaggacaaacttggcacttcgaagcaactacatatgaagagcgagatgcctgggtgcaagccattgaaagccagattttagcatcgctgcagagctgtgagtcctcaaagaacaaaagtaggctgacctcccagtccgaggccatggctctccaaagtatccgcaatatgcgggggaatagtcactgtgttgattgtgaaacacaaaatcctaattgggcttctctcaatcttggagccctgatgtgcattgagtgcagcggaatccaccgaaatttaggcacccacctgagtcgggttcgatcgctggacttagatgactggcccgtggaattgattaaagtgatgagttccattggcaatgagttggctaatagcgtgtgggaagagagttctcaaggccggactaagccttcagttgattcgactcgggaggagaaagagcgttggatacgtgctaagtacgaacagaagctgtttcttgcgcctctgccgtgcaccgaattaagcctggggcaacatctcctgcgtgcaactgccgacgaggatctaaggacggctattttgctcctcgcacacggatcaagagatgaagttaatgaaacctgtggggagggagatgggcgcacggcccttcaccttgcctgcaggaagggcaatgtggttctcgctcaactcctcatctggtacggggtggacgtgaccgctcgggatgcgcacgggaacaccgctctggcctacgcaaggcaggcctccagccaagagtgtatcgatgtgcttctccagtatgggtgcccagatgagcgcttcgtgctgatggcaaccccgaacctctctcgtcggaacaataacagaaacaatagctcgggacgggtaccaactattatctag

SEQ ID NO: 299448 - DNA, 6138 bp, Artificial Sequence
  derived and/or modified sequence
gcgcgtttccattttaaaccgccgcccgccgcccgccacccgccacccttcggccgcagccggtgcagctgtccgcgcgtcccggagcccagggagtggcggaggctgcggaaccgccgagctgtgcagccggagcgggaggatgcgcacgggccccgcgtcgtagacaatgaagccgcgggcgccgccgcctgccctgggccctgcgcaccgcggccgcacctgccggcgagagcgctctagcgcctgaccggccgcctcgcttggccccgccggcccatggctcggcgccccgggcccggaccccggcactcgggcggcgcggcgcacgggccggcgggtgccaggggcgccgtccccgcagcctgagtgcggccctcgcggtcagcggggggcgtgggccacactcccggcccgcctgccctccccgcttggcccggcgccctcccggcccgcgggctcgctggatgcggcggggccccagcgcgcgggcgacatgtacttgttggacggcagtggcgagcccgcgtcgccacccgcggacgcgatgccgcgcgggacgccccccagaaagactgtctaccgcatctccgtgaccatggtcaggaaggagcagctggccgcgccgggctccggcggcccggacccacgcccggttcggcggccccggcccgcgcgctccccggacgcgcccgggaggcttgaggaggaggccgaggaggcggagggcgccgaggaaccggagggtccccggccgcgcgcttgggatttccgcaccttccgcacccgcagcaccgggcagctggaactggggcggctccggccgtgcgcacgcggcctggaacccgcggacctggccggcagcgccccggccgaggaggagggacgcggctcgcccgcgtccggcagccccgacgtggagggggcccgggccgcgcccctgcggcggagcctgagcttcaggcactggagcgggcctgaggcgccgcaaggccggacactgggcggcggaaggcgccacagcagctccgggagcctggcctgggcgccgtgcgacgaggccgcggccgggaccaccctggagcccgcgaccgccacgcagcccgcctcggagaagcgcaacaccctggacgtgggcgaggtgctcagcaagaacgacgcgctctcggacctggagcgttgggaacgcagtaagagcaagaaccgcacgctggacaacagcgacctgcagcggctggagcgcgcgcgggcggcggccggggccggcgcggcctcggagcaccggctgctgcgcttcttcagcggcatcttcgcgcgcagggacgggggcccgggcggcgggccctcgccacggagcggagcctcgcggccacgcggctacttcagcctgcggcgggccccggccgaagcgcactcgtccagcgccgagagcatcgacggctccccgcgcagagatgccttcgtgaacagccaggaatggacgctgagtcgatctgtcccggagctcaaagtgggaattgtgggtaacttggccagcggcaagtctgccctggtgcaccggtacctgacgggcacatatgtccaggaggagtctccggaaggtggcaggttcaagaaagagattgtcgttgatggacagagctatctgctgctgatcagagatgaagggggccccccggaggcgcagtttgccatgtgggtggacgctgttatatttgtcttcagcttggaggatgaaataagtttccagaccgtttaccactactacagtcgaatggccaactatcggaacacgagcgagattcctctggttctggtgggaacccaggatgccataagttctgctaacccgagggtcatcgatgacgccagggcgaggaagctctccaacgacctgaaacggtgcacgtactacgagacgtgtgctacatacgggctgaatgtggagagggtcttccaggacgttgcccagaagattgttgccacaaggaagaagcagcagctgtccataggaccctgcaagtcgctacctaattctcccagccattcctccgtctgttccgcgcaggtgtctgccgtgcacatcagccagacaagtaatggaggtgggagtttaagcgactattcctcctccgttccatcgactcccagcaccagccagaaggaacttcggatcgatgttcctcccactgccaacacgcccacgcccgttcgcaagcagtctaagcgccggtccaacctgttcacctctcggaaagggagcgacccagacaaagagaagaaaggcctggagagtcgtgcggacagcattgggagcggccgagccatcccaattaaacagggcatgctgttgaagcgaagtggcaaatcgttgaataaagagtggaaaaagaaatatgtcaccctgtgtgacaatggcgtgctgacctatcatcccagtttacatgattacatgcagaatgttcatggtaaggagattgaccttctgagaaccactgtgaaagtcccagggaagaggccaccccgagccacgtcagcctgcgcacccatctccagccctaaaaccaatggcctatccaaggacatgagcagtttacacatctcacccaattcagacacagggctgggtgactccgtatgctccagccccagtatctccagcaccaccagccccaagctcgacccgcccccctcccctcacgccaacagaaagaagcaccgaaggaagaaaagcactagcaacttcaaagccgacggcctgtccggcactgctgaagaacaagaagaaaattttgagtttatcattgtgtccctcactggccaaacatggcactttgaagccacgacgtatgaggagcgggacgcctgggtccaagccatcgagagccagatcctggccagcctgcagtcgtgcgagagcagcaagaacaagtcccggctgacgagccagagcgaggccatggccctgcagtcgatccggaacatgcgcgggaactcccactgtgtggactgcgagacccagaatcccaactgggccagtttgaacttgggagccctcatgtgcatcgaatgctcagggatccaccggaatcttggcacccacctttcccgagtccgatctctggacctggatgactggccagtcgagctcatcaaggtgatgtcatccatcgggaacgagctagccaacagcgtctgggaagagagcagccaggggcggacgaaaccatcggtagactccacaagggaagagaaggaacggtggatccgtgccaagtacgagcagaagctcttcctggccccgctgccctgcacggagctgtccctgggccagcacctgctgcgggccaccgccgacgaggacctgcggacggccatcctgctgctggcacacggctcccgggacgaggtgaacgagacctgcggggagggagacggccgcacggcgctgcatctggcctgccgcaaggggaatgtggtcctggcgcagctcctgatctggtacggagtggacgtcacggcccgagatgcccacgggaacacagctctggcctacgcccggcaggcctccagccaggagtgcatcgacgtgctgctgcagtacggctgccccgacgagcgcttcgtgctcatggccacccctaacctgtccaggagaaacaataaccggaacaacagcagtgggagggtgcccaccatcatctgaggaacagccgtgcccgcctgctcgccgcacctgggacgcggcagcctcgccgcattctcgctcagaagtcgcagcacgtgagtcccgtcgcatcccctccctcttcctggtggccacctccctcccgcccacccactctcaccccaaacaaaatcacaaaacctggacatccctcaaggggcgaagaggcggccgggagactgcagaagtggctccttttcataaactcccctaaaccacacacaggagagagcgacgggcctcggccctttgatgatagcacatggcgcaggacccttgtcctggtggcacaagggatggggacgcgagggggaggggaggcgaggaacaaggagaaggggcaactttccttaactggcagttgagcacatagtacatttcccctctaccaaacggaacacttggattccatctcttctctgaggagctcgacggcataaatcagaagcaagcacagagtttgtcaggtttgaagcccctatgatggtgtgtgtcaaatcagttgtagctaatctgtccagggagaatactggcttcattacacttgtacagccgagttcttcccgcattactgctgtttaatagaacgtgattagtcatcgccgagaagaaagcatattagccgaggaggtagtcacgcggcacgcgccggtgattgccacgatgtgattgcaatactcttagaagcaccatattatcccagacatgttctttcaagcccttggagccctctctaaattcactgtcatcatttagtatctgtttaatttttcagtccaaagagaggaaatcagtcgctgagtattatttgactccggtctccttggtgcaaaaacaaaatgggaaaaataaataagaataactcagaaactcaaaaggaaaccacaaattcagctaataatagcatttcgagtatatttcgtaaactaaggaaatacacaaaaggctgttttttccgactgtaagagatatttgatgtccttttgccgaggtggatgtgttagtctcaggccctcctggaccacgttgcccaagtcacacaggcttctgtgttatgtatttagataagatgtgtgaaaatatatttgaataaaagaagttcataaatatgcattgatttttgtacagacaaatggcacctctcttaatttataaattgaactggatgtgaactaataatgtgcaactagttgagataagagggttacagatcattgtacatggaaaatattcccagcagtaaacacttccattaatgtgatctacggcttttgaaaaggagcatctcagaataagatggtggtacaatttgcttattaaaattgagaaagaaaaaaaaagacacactggagtatattagaaaggaaaaagaaggaatgtggtctctcatgattgaaagcatgatttagatcggatacggcttttgctaaccaaggaccaagggactctggcaagatggggtggttttccgaatgccagaccgaggtgccttacgaaggcagctgccaatggttctgtggcacagactggctcctgagaacccagacgaccttgacctggcagcccggccctccacgctagtacctcgcctgattttccatcgttgcggtatccagccgcttcagacgtccgccgccttcagtggtggtagtcaaatgtagtcaaccaaaccacagcatcccttaggttaaaagcaaacggggcagctttgcctagagctcattgacagtgtgatggggggagaagggttgtcacaatggaagatgaggacactagactcatgtagcacagaaacatgaagccacacgcaccggcagcctccggggtgttcctcgctctctcgtatgttaaaccttatattttataagagtttttcctcttatttcactttttaaaaaaaattaaagtaggtggggaaaaaaataaagctttacacagaatttatatgtgggtaagtgtttcatggaaatttctaatcttaacgaagctaagtggagctcactcgtatccaaaagtataacaggtgcagaagccacaagtctgagaaccttgacgacagttccatcgtcctgccatttgatttttcagtctgcgtttcatcactgtgtagctattgtaaatgtgaatagaaaaaaacaggtcattgcctatttttgaagaacgcgttggtgttcgagtccactagacacactcgctccacacagccttcaccgtagactctgtagtggacacagatatagcataaatgaaattgttaaattatttcattgtagttaattcccactataggaatgctttatcatagtgaagtttcttttgagaagaaacggaactccttgaggcttctctttgggatgtatatgagcgtgtacatattattctatgtgtttataatataatattttcccaaa

SEQ ID NO: 299449 - DNA, 3210 bp, Artificial Sequence
  derived and/or modified sequence
atgtacctccttgatgggagcggtgagcccgcttcgcccccagcggacgccatgccacgcggaactcccccaaggaaaacagtatatcgcatcagcgtcaccatggtgcggaaagagcagttagctgctcccggaagtgggggacccgacccccgacccgtcaggagacctaggcccgctcggtctccagatgcaccaggcagactagaggaagaggctgaagaggcagagggtgctgaggaacccgaagggccacggcctcgagcatgggactttagaacctttcggacccggagtacagggcagctcgaactcggaagattacggccttgtgccaggggtctggagccagccgacctggccggttctgccccagccgaagaggaaggcagaggatctccggcaagtggatcccctgatgtggaaggagcgagagctgctcctcttaggcgatctctcagtttccgacactggtccggccctgaggccccacaaggacgcactctgggtggaggcaggaggcattccagctctggctcactggcttgggctccttgcgatgaagccgcagccggtacaacactggaacctgccactgcaacccagccagctagcgaaaagagaaataccttggatgtgggcgaggtgctttcgaagaatgatgcactgagcgatctggaaagatgggagcgctctaagagcaaaaatcgcacgctggataattcggatttacagcggcttgaacgcgctcgggcagcggctggagccggagctgcttctgaacacaggttgctgcgatttttctcaggtatatttgccaggcgggacgggggtcccggtggtgggcctagccccagatcaggtgcctcacggccacgtggttatttctctctgaggagggctccagccgaggcgcacagcagttctgcggaaagcattgacggttctcctaggagagacgcgttcgtgaattctcaagaatggacgctttctcgctccgtgcctgagttgaaagtcggaattgtgggcaaccttgcctcagggaagagcgctcttgtgcataggtatctcaccggtacatatgtgcaggaagagtctccagaaggtgggcgattcaaaaaggaaattgtagttgatgggcaatcatatttgcttctaattcgagatgaggggggtcctccagaggctcagttcgctatgtgggtcgatgcggtaatttttgtgtttagcctggaggatgagatctcatttcagaccgtatatcattactacagtcgaatggcgaattacaggaacacctccgagatcccgcttgtgctggtcgggacacaggatgcaattagcagtgcgaatccacgggttatcgacgatgcgagggcacgcaagctttctaatgacctgaaaaggtgcacatattatgagacctgcgccacttacggtctgaacgtggagagagtcttccaggacgttgcccagaagatcgttgctactcgaaaaaaacagcagttgtcaattggcccttgcaagagcctgcccaacagtccgtcgcacagctctgtttgtagtgctcaggtctcagcggttcacattagccaaaccagtaacggaggcggaagtctgagcgattactcatcatcagtgccgtctacccctagcacgtctcaaaaagaactccgcatcgacgtccctccgactgcaaacaccccaaccccagtgaggaagcaatccaagcgtcgcagcaatctctttacaagcagaaaagggtcagatcctgataaagaaaaaaagggcctagagtcacgggctgactccatcggcagcggtagggctatccctatcaagcagggcatgctgcttaagaggagcggaaaatcccttaacaaggagtggaagaagaaatatgttacattgtgtgataatggagtcctgacctatcatcctagcttacatgactatatgcagaacgtacacgggaaagagattgatctgctccggaccactgtgaaggtgcctgggaaacgcccaccacgagccacctccgcctgcgctccgatttcttccccgaaaactaatgggctgagcaaagatatgagctcccttcacattagccccaactcggatactggactaggagattccgtatgcagctcaccatcaatcagcagcaccacatccccaaaactcgacccccctccgtcacctcacgccaatcgcaaaaaacaccgacggaagaagtctacttcaaactttaaggcagatggactgagcggcactgctgaggaacaggaagaaaatttcgagtttattatcgtctctctgacaggccaaacttggcattttgaagcaaccacatatgaggagagagacgcttgggttcaggccatcgagtcacagattctggcatcccttcagtcctgtgaatccagcaaaaacaaatctcgacttacctctcaaagtgaggcgatggcgttacagagtatcaggaacatgagagggaactctcactgcgtggactgtgagacacagaatccaaactgggcaagtctgaatctgggcgctctgatgtgtatagaatgtagcggaattcatcgcaatttaggcacccatctgagcagagttaggagtctggatctggacgactggccggtcgagctgatcaaggtcatgtctagtatcggtaatgagcttgcaaacagtgtctgggaggaatcaagccaggggaggacaaagccttccgtggattccacacgggaggagaaagagcgctggatccgtgctaaatatgagcagaagcttttcctggccccactgccctgtactgaattatccctcggacagcacttgctccgagcaacagccgatgaggacttgagaactgcaattttactgctcgctcacggctctcgcgacgaggtgaacgagacatgcggtgagggtgacggccgaaccgcactgcacttggcctgcaggaaaggcaatgtggtgctagcgcagttgctgatctggtatggcgtggatgtcactgcgagggacgctcatggtaacacggctctcgcatacgcacgacaggcatctagccaggaatgtattgacgtgttgctgcagtacggctgcccagacgaacgatttgttctgatggcaactcctaatctgtctcgacgtaataacaatcgcaacaacagttcaggccgagtgccaaccataatatag

SEQ ID NO: 299450 - DNA, 5013 bp, Artificial Sequence
  derived and/or modified sequence
atgagcgccagaaccgcccccagaccccaggtgctgctgctgcccctgctgctggtgctgctggccgccgcccccgccgccagcaagggctgcgtgtgcaaggacaagggccagtgcttctgcgacggcgccaagggcgagaagggcgagaagggcttccccggcccccccggcagccccggccagaagggcttcaccggccccgagggcctgcccggcccccagggccccaagggcttccccggcctgcccggcctgaccggcagcaagggcgtgagaggcatcagcggcctgcccggcttcagcggcagccccggcctgcccggcacccccggcaacaccggcccctacggcctggtgggcgtgcccggctgcagcggcagcaagggcgagcagggcttccccggcctgcccggcaccctgggctaccccggcatccccggcgccgccggcctgaagggccagaagggcgcccccgccaaggaggaggacatcgagctggacgccaagggcgaccccggcctgcccggcgcccccggcccccagggcctgcccggcccccccggcttccccggccccgtgggcccccccggcccccccggcttcttcggcttccccggcgccatgggccccagaggccccaagggccacatgggcgagagagtgatcggccacaagggcgagagaggcgtgaagggcctgaccggcccccccggcccccccggcaccgtgatcgtgaccctgaccggccccgacaacagaaccgacctgaagggcgagaagggcgacaagggcgccatgggcgagcccggcccccccggccccagcggcctgcccggcgagagctacggcagcgagaagggcgcccccggcgaccccggcctgcagggcaagcccggcaaggacggcgtgcccggcttccccggcagcgagggcgtgaagggcaacagaggcttccccggcctgatgggcgaggacggcatcaagggccagaagggcgacatcggcccccccggcttcagaggccccaccgagtactacgacacctaccaggagaagggcgacgagggcacccccggcccccccggccccagaggcgccagaggcccccagggccccagcggcccccccggcgtgcccggcagccccggcagcagcagacccggcctgagaggcgcccccggctggcccggcctgaagggcagcaagggcgagagaggcagacccggcaaggacgccatgggcacccccggcagccccggctgcgccggcagccccggcctgcccggcagccccggcccccccggcccccccggcgacatcgtgttcagaaagggcccccccggcgaccacggcctgcccggctacctgggcagccccggcatccccggcgtggacggccccaagggcgagcccggcctgctgtgcacccagtgcccctacatccccggcccccccggcctgcccggcctgcccggcctgcacggcgtgaagggcatccccggcagacagggcgccgccggcctgaagggcagccccggcagccccggcaacaccggcctgcccggcttccccggcttccccggcgcccagggcgaccccggcctgaagggcgagaagggcgagaccctgcagcccgagggccaggtgggcgtgcccggcgaccccggcctgagaggccagcccggcagaaagggcctggacggcatccccggcacccccggcgtgaagggcctgcccggccccaagggcgagctggccctgagcggcgagaagggcgaccagggcccccccggcgaccccggcagccccggcagccccggccccgccggccccgccggcccccccggctacggcccccagggcgagcccggcctgcagggcacccagggcgtgcccggcgcccccggcccccccggcgaggccggccccagaggcgagctgagcgtgagcacccccgtgcccggcccccccggcccccccggcccccccggccaccccggcccccagggcccccccggcatccccggcagcctgggcaagtgcggcgaccccggcctgcccggccccgacggcgagcccggcatccccggcatcggcttccccggcccccccggccccaagggcgaccagggcttccccggcaccaagggcagcctgggctgccccggcaagatgggcgagcccggcctgcccggcaagcccggcctgcccggcgccaagggcgagcccgccgtggccatgcccggcggccccggcacccccggcttccccggcgagagaggcaacagcggcgagcacggcgagatcggcctgcccggcctgcccggcctgcccggcacccccggcaacgagggcctggacggccccagaggcgaccccggccagcccggcccccccggcgagcagggcccccccggcagatgcatcgagggccccagaggcgcccagggcctgcccggcctgaacggcctgaagggccagcagggcagaagaggcaagaccggccccaagggcgaccccggcatccccggcctggacagaagcggcttccccggcgagaccggcagccccggcatccccggccaccagggcgagatgggccccctgggccagagaggctaccccggcaaccccggcatcctgggcccccccggcgaggacggcgtgatcggcatgatgggcttccccggcgccatcggcccccccggcccccccggcaaccccggcacccccggccagagaggcagccccggcatccccggcgtgaagggccagagaggcacccccggcgccaagggcgagcagggcgacaagggcaaccccggccccagcgagatcagccacgtgatcggcgacaagggcgagcccggcctgaagggcttcgccggcaaccccggcgagaagggcaacagaggcgtgcccggcatgcccggcctgaagggcctgaagggcctgcccggccccgccggcccccccggccccagaggcgacctgggcagcaccggcaaccccggcgagcccggcctgagaggcatccccggcagcatgggcaacatgggcatgcccggcagcaagggcaagagaggcaccctgggcttccccggcagagccggcagacccggcctgcccggcatccacggcctgcagggcgacaagggcgagcccggctacagcgagggcaccagacccggcccccccggccccaccggcgaccccggcctgcccggcgacatgggcaagaagggcgagatgggccagcccggcccccccggccacctgggccccgccggccccgagggcgcccccggcagccccggcagccccggcctgcccggcaagcccggcccccacggcgacctgggcttcaagggcatcaagggcctgctgggcccccccggcatcagaggcccccccggcctgcccggcttccccggcagccccggccccatgggcatcagaggcgaccagggcagagacggcatccccggccccgccggcgagaagggcgagaccggcctgctgagagccccccccggccccagaggcaaccccggcgcccagggcgccaagggcgacagaggcgcccccggcttccccggcctgcccggcagaaagggcgccatgggcgacgccggccccagaggccccaccggcatcgagggcttccccggcccccccggcctgcccggcgccatcatccccggccagaccggcaacagaggcccccccggcagcagaggcagccccggcgcccccggcccccccggcccccccggcagccacgtgatcggcatcaagggcgacaagggcagcatgggccaccccggccccaagggcccccccggcaccgccggcgacatgggcccccccggcagactgggcgcccccggcacccccggcctgcccggccccagaggcgaccccggcttccagggcttccccggcgtgaagggcgagaagggcaaccccggcttcctgggcagcatcggcccccccggccccatcggccccaagggcccccccggcgtgagaggcgaccccggcaccctgaagatcatcagcctgcccggcagccccggcccccccggcacccccggcgagcccggcatgcagggcgagcccggcccccccggcccccccggcaacctgggcccctgcggccccagaggcaagcccggcaaggacggcaagcccggcacccccggccccgccggcgagaagggcaacaagggcagcaagggcgagcccggccccgccggcagcgacggcctgcccggcctgaagggcaagagaggcgacagcggcagccccgccacctggaccaccagaggcttcgtgttcaccagacacagccagaccaccgccatccccagctgccccgagggcaccgtgcccctgtacagcggcttcagcttcctgttcgtgcagggcaaccagagagcccacggccaggacctgggcaccctgggcagctgcctgcagagattcaccaccatgcccttcctgttctgcaacgtgaacgacgtgtgcaacttcgccagcagaaacgactacagctactggctgagcacccccgccctgatgcccatgaacatggcccccatcaccggcagagccctggagccctacatcagcagatgcaccgtgtgcgagggccccgccatcgccatcgccgtgcacagccagaccaccgacatccccccctgcccccacggctggatcagcctgtggaagggcttcagcttcatcatgttcaccagcgccggcagcgagggcaccggccaggccctggccagccccggcagctgcctggaggagttcagagccagccccttcctggagtgccacggcagaggcacctgcaactactacagcaacagctacagcttctggctggccagcctgaaccccgagagaatgttcagaaagcccatccccagcaccgtgaaggccggcgagctggagaagatcatcagcagatgccaggtgtgcatgaagaagagacactag

SEQ ID NO: 299451 - DNA, 8097 bp, Artificial Sequence
  derived and/or modified sequence
gggagggacgaaccgcgcgaccgagccctacaaaacccgccccggccgagtggcgaggcgagctttccagccgggctcccagagccgcgctgcgcaggagacgcggtggcctgagagcctgagggtccccggactcgcccaggctctgagcgcgcgcccaccatgagcgcccggaccgcccccaggccgcaggtgctcctgctgccgctcctgctggtgctcctggcggcggcgcccgcagccagcaagggttgtgtctgtaaagacaaaggccagtgcttctgtgacggggccaaaggggagaagggggagaagggctttcctggaccccccggttctcctggccagaaaggattcacaggtcctgaaggcttgcctggaccgcagggacccaagggctttccaggacttccaggactcacgggttccaaaggtgtaaggggaataagtggattgccaggattttctggttctcctggacttccaggcaccccaggcaataccgggccttacggacttgtcggtgtaccaggatgcagtggttctaagggtgagcaggggtttccaggactcccagggacactgggctacccagggatcccgggtgctgctggtttgaaaggacaaaagggtgctcctgctaaagaagaagatatagaacttgatgcaaaaggcgaccccgggttgccaggggctccaggaccccagggtttgccaggccctccaggttttcctgggcctgttggcccacctggtcctccgggattctttggctttccaggagccatgggacctagaggacctaagggtcacatgggtgaaagagtgataggacataaaggagagcggggtgtgaaagggttaacaggacccccgggaccaccaggaacagttattgtgaccctaactggcccagataacagaacggacctcaagggggaaaagggagacaagggagcaatgggcgagcctggacctcctggaccctcaggactgcctggagaatcatatggatctgaaaagggtgctcctggagaccctggcctgcagggaaaacccggaaaagatggtgttcctggcttccctggaagtgagggagtcaagggcaacaggggtttccctgggttaatgggtgaagatggcattaagggacagaaaggggacattggccctccaggatttcgtggtccaacagaatattatgacacataccaggaaaagggagatgaaggcactccaggcccaccagggcccagaggagctcgtggcccacaaggtcccagtggtccccccggagttcctggaagtcctggatcatcaaggcctggcctcagaggagcccctggatggccaggcctgaaaggaagtaaaggggaacgaggccgcccaggaaaggatgccatggggactcctgggtccccaggttgtgctggttcaccaggtcttccaggatcaccgggacctccaggaccgccaggtgacatcgtttttcgcaagggtccacctggagatcacggactgccaggctatctagggtctccaggaatcccaggagttgatgggcccaaaggagaaccaggcctcctgtgtacacagtgcccttatatcccagggcctcccggtctcccaggattgccagggttacatggtgtaaaaggaatcccaggaagacaaggcgcagctggcttgaaaggaagcccagggtccccaggaaatacaggtcttccaggatttccaggtttcccaggtgcccagggtgacccaggacttaaaggagaaaaaggtgaaacacttcagcctgaggggcaagtgggtgtcccaggtgacccggggctcagaggccaacctgggagaaagggcttggatggaattcctggaactccgggagtgaaaggattaccaggacctaaaggcgaactggctctgagtggtgagaaaggggaccaaggtcctccaggggatcctggctcccctgggtccccaggacctgcaggaccagctggaccacctggctacggaccccaaggagaacctggtctccagggcacgcaaggagttcctggagcccccggaccacccggagaagccggccctaggggagagctcagtgtttcaacaccagttccaggcccaccaggacctccagggccccctggccatcctggcccccaaggtccacctggtatccctggatccctggggaaatgtggagatcctggtcttccagggcctgatggtgaaccaggaattccaggaattggatttcctgggcctcctggacctaagggagaccaaggttttccaggtacaaaaggatcactgggttgtcctggaaaaatgggagagcctgggttacctggaaagccaggcctcccaggagccaagggagaaccagcagtagccatgcctggaggaccaggaacaccaggttttccaggagaaagaggcaattctggggaacatggagaaattggactccctggacttccaggtctccctggaactccaggaaatgaagggcttgatggaccacgaggagatccagggcagcctggaccacctggagaacaaggacccccaggaaggtgcatagagggtcccaggggagcccaaggacttccaggcttaaatggattgaaagggcaacaaggcagaagaggtaaaacggggccaaagggagacccaggaattccaggcttggatagatcaggatttcctggagaaactggatcaccaggaattccaggtcatcaaggtgaaatgggaccactgggtcaaagaggatatccaggaaatccgggaattttagggccaccaggtgaagatggagtgattgggatgatgggctttcctggagccattggccctccagggccccctgggaacccaggcacaccagggcagagggggagccctggaattccaggagtaaagggccagagaggaaccccaggagccaagggggaacaaggagataaaggaaatcccgggccttcagagatatcccacgtaataggggacaaaggagaaccaggtctcaaaggattcgcaggaaatccaggtgagaaaggaaacagaggcgttccagggatgccaggtttaaagggcctcaaaggactacccggaccagcaggaccaccaggccccagaggagatttgggcagcactgggaatcctggagaaccaggactgcgtggtataccaggaagcatggggaacatgggcatgccaggttctaaaggaaaaaggggaactttgggattcccaggtcgagcaggaagaccaggcctcccaggtattcatggtctccagggagataagggagagccaggttattcagaaggtacaaggccaggaccaccgggaccaacgggggatccaggactgccgggtgatatgggaaagaaaggagaaatggggcaacctggcccacctggacatttggggcctgctggacctgagggagcccctggaagtcctggaagtcctggcctcccaggaaagccaggtcctcatggtgatttgggttttaaaggaatcaaaggcctcctgggccctccaggaatcagaggccctccaggtcttccaggatttccaggatctcctggaccaatgggtataagaggtgaccaaggacgtgatggaattcctggtccagccggagaaaagggagaaacgggtttattgagggcccctccaggcccaagagggaaccctggtgctcaaggagccaaaggagacaggggagccccaggttttcctggcctcccgggcagaaaaggggccatgggagatgctggacctcgaggacccacaggcatagaaggattcccagggccaccaggtctgcccggtgcaattatccctggccagacaggaaatcgtggtccaccaggctcaagaggaagcccaggtgcgcctggtccccctggacctccagggagtcatgtaataggcataaaaggagacaaagggtctatgggccaccctggcccaaaaggtccacctggaactgcaggagacatgggaccaccaggtcgtctgggagcaccaggtactccaggtcttccaggacccagaggtgatcctggattccaggggtttccaggcgtgaaaggagaaaagggtaatcctggatttctaggatccattggacctccaggaccaattgggccaaaaggaccacctggtgtacgtggagaccctggcacacttaagattatctcccttccaggaagcccagggccacctggcacacctggagaaccagggatgcagggagaacctgggccaccagggccacctggaaacctaggaccctgtgggccaagaggtaagccaggcaaggatggaaaaccaggaactcctggaccagctggagaaaaaggcaacaaaggttctaaaggagagccaggaccagctggatcagatggattgccaggtttgaaaggaaaacgtggagacagtggatcacctgcaacctggacaacgagaggctttgtcttcacccgacacagtcaaaccacagcaattccttcatgtccagaggggacagtgccactctacagtgggttttcttttctttttgtacaaggaaatcaacgagcccacggacaagaccttggaactcttggcagctgcctgcagcgatttaccacaatgccattcttattctgcaatgtcaatgatgtatgtaattttgcatctcgaaatgattattcatactggctgtcaacaccagctctgatgccaatgaacatggctcccattactggcagagcccttgagccttatataagcagatgcactgtttgtgaaggtcctgcgatcgccatagccgttcacagccaaaccactgacattcctccatgtcctcacggctggatttctctctggaaaggattttcattcatcatgttcacaagtgcaggttctgagggcaccgggcaagcactggcctcccctggctcctgcctggaagaattccgagccagcccatttctagaatgtcatggaagaggaacgtgcaactactattcaaattcctacagtttctggctggcttcattaaacccagaaagaatgttcagaaagcctattccatcaactgtgaaagctggggaattagaaaaaataataagtcgctgtcaggtgtgcatgaagaaaagacactgaagctaaaaaagacagcagaactgctatttttcatcctaaagaacaaagtaatgacagaacatgctgttatttaggtatttttctttaaccaaacaatattgctccatgatgacttagtacaaagtttcaatttgtttccccacaaaacaaagcaattctttcaagtcagttctgtgatctgggtctctaatctgtgctgtttcaaagttctctgtggcaaagcagcaactattcacaaaatatcaccaaaaacctattccacttacatccaaggcactgtcactacggtgattgtatgaagtttgaatgctgcaagttatgaaatatttggcccgctggattcccacatttgtcttctttctgtctttaagactcagggaggctaaatcagtgtttgattgccccgccaacccttcctgaaacttcagaccctgggtaggggaagagaagggggcatgtggtatcctggagcattgtgtatagaactggattttcagacctgctgaggaccgtaaggcctgatggaacacagaactgaactgaggttcatggattttccaggactgtttcaaacatgcccattactaacggcaaaagggggattccctgatggaaccataatacccttggaaatactgtatggttttgttttgttttgttggtttttaaagatttttgtttgtttattgaattcatttcactgtagctctaaaatctgcttgtattccaagcatataaaattttcccccttagtgaattagttttaaaatgatattgttatatacatactatgaaatatgtataactttaacttctgttttaccagcatacccacacaaataacaagaatactacttatgaaatgtgcactttatcctcattccataaatgtcggtgcataccttatgtaagggagcagttcaataatccatgaaagaacttaaggcatttgttggtttatcagactcggaatctattttctcattgctctgaatatgtcatcactctaggttttacagatttattcctttgttacttctctaattcttcctttgtaaaaaaaaaaaaaagcaacactttttatgttatatgttgttcttacaaaccatactgaaagagtccattgtttaaaaatcttaatgtatcaaactgtataacttggccgctgtatgtcttaaaacctgcttttcaatgtgttgatacattcccaaggttacttaattcaacttaactatcatcttattcagcaccaagcatgtcccaggcactgtactaacctacagagatgctaagagaaaaaaaagacttgtttctgatctaatatcccagaaaaagtaactcattgctctgttaataatctcacatatacaagtagcttccctcccctctagttttttcttccttttcactgctgttatatttcatcatgataattcagcaggcccaagtaaaggttaaaaataaggtctatgcctagggaaactcagggcttctagtttctcttagaaaagctaagagaagataaggtctgaataatagcagaaaaaccaacatctacaaaacattaaactagtgttatacttgatgataacactatttgatgagtcttagagtccagacacaaagagacaaagctttgaagatgctttttgatctacctaggtggagttggtggtgctgatatttaaattcaggctactgcttcaatctcaattgctttgtaagtgaaaaacatgacccagaggacagcacagactatggccatggctcacatggtttacatccttcactgctcacgtgtttgctgtcaagccatttttacatctaaactaagatgtgcagcatttcacttatttagattcacttaacaaacaaatttttctgctttaaaaatgtcttattgtcccaagtgtactatagcggcatatagagctagctaatctctacaaaccctctgtaggccagtagttctcaaagtgtggtctctggaagagcagtatcagcatcatctgggaacttgtcacagatgcagattctagggaccactccagacctacacaatcagaaactcttgggggagggcccgaaatatctatgttttaccaagcccaccacatgattctgatgtactctaaatactgagaaaacctgttctagacaaatacccaagcaacaactccgcaggcagttaccaagtacggctggctacaactgctccatccgtgcctctttttaaagttcaaactcacaggtgactctaaggttatctacttttactcataagtaaaagccctagactggtgctaatgtcaaaccactggcctccactcaggcctccatcttctcatgccctcttaccagtatttaacttctgaggaagacaagtgatgctaaaacctgaaattccaatgaagccatatgaacagctgttcagttgcacttctaagactttacttagcagtaaattatagctcatgtgcattattttccagataacttagcttatgagtagcttatacaattatgaagatttaatattacagataaaatgtaaactgtttctttaaaattggggcttcaactttggaatttcacagcgtgctaaaataacagatttctcagaagtctttcagcaagataaacattattaagtaacttatttatgaaagtattaaaatgcttacatttgaacttgatggctaacttacaaagattctctatgtatcaaatgtaacttactgcgactaaacttaatttaatatttactctataaccaaatgaaatatatttaaaatatattgaatattttatattgttatatcctgacaagattataatattttaatgtactaatatttctgtaattatatctaaaatattattttattatattgcctaagaataaacatttgttaaattgga

SEQ ID NO: 299452 - DNA, 5013 bp, Artificial Sequence
  derived and/or modified sequence
atgtctgccaggaccgctccccgtccacaagtcctcctcctgccactcttgctcgtgctcctggctgcggccccagccgcgtctaaaggctgtgtatgcaaggacaagggccagtgtttctgtgatggcgctaagggcgaaaaaggcgagaagggttttccagggcctcctggaagcccaggacagaaggggtttacagggcccgagggtctgcccgggccccaggggccaaagggattcccgggtttacctggcctcactggcagcaagggcgtgcgcggaattagcgggctgcccggcttcagcggctctcccgggcttcctggcacccctggtaataccggcccatacgggcttgtcggcgttcctggatgttccggcagcaagggagagcaagggttccctggcctgccgggtacacttggataccccgggatcccaggtgccgcgggcctgaagggccaaaagggcgcacctgcgaaagaggaggacattgaactagacgcaaaaggagaccccgggctccctggcgctccaggtccacaggggctgccagggcctccagggttcccaggcccagtcgggccccctggccctcctggattctttggattccccggcgctatggggccacgggggccaaaaggccatatgggcgagagggttatcggccacaagggggaaaggggagtcaagggactgacaggtccccccgggcctccaggaacggttatagtgacacttaccggaccagacaacaggacagatttaaaaggagagaagggtgacaaaggtgcaatgggggaaccgggtccaccgggccctagtggcctccctggagaatcctacgggagcgaaaagggcgctcctggtgatcctggattacagggcaagcccggcaaagatggtgtgcctggtttcccggggagtgagggcgtcaagggcaaccgcgggtttcccggtctgatgggggaggacggcattaagggtcaaaagggggatattggtcctcccggctttagggggccaacagagtattacgatacctaccaagagaagggcgacgaagggactcccggacccccagggcccaggggcgcacgggggccccagggtccttccggcccgcccggcgtaccgggcagtcctgggagctctaggcctgggctgagaggagcccctggttggccaggtctgaaaggctcgaagggggagaggggccggcctggtaaagacgccatgggaactccgggcagtcctggctgtgcaggaagcccaggcttacccggtagtcctggaccccctggcccccccggcgacatcgtcttcagaaaagggccccccggagaccatgggctacctggctacctcggctctccaggcattccgggggtggatggacctaagggcgagccaggactgctgtgcacacagtgcccttacatacctggcccacccgggttgccaggattgcccgggctgcacggtgtgaaaggaatcccgggccggcagggagctgccggactgaaagggtcgcccgggagccccggaaatacaggcctgccaggtttcccggggtttcctggagcacagggggaccccgggttgaagggagaaaaaggtgaaactctccagcccgaggggcaggtcggggtcccaggagaccctggtctgcgaggacagcccggtagaaaaggactggatgggattccagggacccccggcgtcaagggcctgcctgggccaaaaggcgagttagctctgtccggggagaagggcgaccaggggccgcccggggaccctggctcacctggaagcccgggccctgccggcccagcagggccccccggctacgggccgcagggggaacccggtctacaagggacgcaaggcgtcccaggcgcccccgggccaccaggcgaggctgggccacggggagaactgtctgtgtccaccccagtgcctggacctcctggcccaccaggccctccgggacacccaggcccacagggaccccccgggatcccgggtagccttggtaagtgcggtgacccaggattgcctgggcccgacggagagcccgggatccccggaatcggctttccaggaccgccaggccctaagggcgaccagggattcccaggcacgaagggatccttgggatgtcctggcaaaatgggcgagccgggtctgcccggtaaaccagggctcccaggggcgaagggggagccggctgtggccatgccgggcggtcccggtacccccggcttccctggagagcgtgggaattccggagagcacggtgaaatcggccttccgggactcccgggattgcctggaacgcccggcaacgagggcctcgatggcccacgcggggatccgggccagcctggtccacccggtgaacagggcccccctgggcgatgcatcgagggaccacggggagcgcagggtctccctggtttgaacgggttgaagggccagcagggtagaaggggcaagacgggtcctaaaggtgaccccggaattccggggctggaccgttccggtttccccggggagacaggctcccctggaatccctggccaccagggggaaatgggtccacttggtcaaaggggctatcccgggaaccccggcattctgggacccccaggagaggatggggtgattgggatgatgggatttcccggagccatcggaccccccggaccccccgggaacccaggaacccctggacagagagggagtcctggaataccgggcgtgaaaggacagagggggactcctggagcaaagggcgagcagggcgataagggcaacccaggcccttcggagatctcccatgtaatcggagataagggagaacccggattgaagggattcgccgggaaccctggagaaaagggcaatcgtggcgtcccagggatgccgggcctcaaaggcctcaaggggttacctggtccagctggtcctcctggtcctaggggcgatttggggtcaaccggcaaccccggcgagccaggactgcggggaattcccgggtctatgggcaacatgggcatgccgggatcaaagggcaagaggggcaccttgggcttccctggaagagccggcagacctgggctgccgggcatccatggactccaaggggacaaaggggagcccggatacagcgaaggcactcgccctggaccaccgggacctacaggagaccctgggttacccggcgatatgggcaaaaagggagagatgggacagcccggaccccccggccaccttggtccggcaggccctgagggggccccgggcagcccgggctcaccaggcttgcctgggaagcctggacctcacggagacctgggattcaaaggaatcaagggactcctcggcccccctggtataaggggtccccctggtttacctgggttcccggggagcccaggccctatggggatccgcggcgaccagggacgagacggaattcctggaccggccggtgaaaagggcgagacaggtttgctgcgcgcacccccaggtccacgaggcaaccctggcgcccaaggagcaaaaggcgatcgcggagcccccggatttccaggcctgccagggaggaagggcgccatgggcgatgctgggccacgaggacctaccggcatcgagggattccccggcccgcctggactgcccggcgctattatccccgggcagactggtaatcgcggccctcctggctcaagaggaagtcctggagccccaggacctcctggcccccccgggtcccatgtgataggaatcaaaggcgataagggcagtatgggtcatcccggaccaaaaggccctccaggaacagcaggagatatgggacctcctggccgtctaggggcccccgggacccctgggcttccaggcccaagaggcgaccccggtttccaggggttccccggagttaagggggagaagggcaaccctggtttcttggggagcattgggccccccggacccatcggaccaaagggacctcctggagttcgaggggatcctgggacactcaaaataatttctctccccggcagccccggaccacctggcacacctggcgaaccgggaatgcagggcgagcccggtccacccggaccaccaggcaatctgggtccctgtggtcctcgcggcaaacccgggaaagacggcaaacccgggactcccggcccagctggggaaaagggaaataaggggagcaagggtgagccaggcccagcaggtagcgacggcctcccaggactgaaggggaagcggggggattcggggtcccctgcgacatggacaacgagaggttttgtgttcacacggcatagccagaccaccgcgattccctcctgccccgagggtaccgtgccactctatagtggtttctccttcctgtttgtgcaagggaaccagcgagctcacggacaagatcttgggacactcgggtcctgcctgcagaggtttacaacgatgcctttcctgttttgtaatgttaatgatgtgtgcaattttgcgtcacgcaatgattactcatattggctgagcacacctgccctgatgcccatgaacatggctccgattaccggccgggctctcgaaccctatatttcccgttgcacagtgtgtgaggggcccgctattgcaatcgctgttcatagccagactacagatattcccccctgcccccatggctggatcagcctgtggaagggcttctccttcattatgttcacctccgcagggagcgaagggactggccaggccctggcttcaccggggtcttgtctcgaggaattcagggctagtccattccttgagtgccatggccggggcacgtgtaattattactccaactcctacagtttttggttagcatccctcaatccagagcggatgttcaggaagccaattcctagcacagttaaggccggcgagctggaaaagattatttcccgttgccaggtctgcatgaaaaaacggcactag

SEQ ID NO: 299453 - DNA, 5013 bp, Artificial Sequence
  derived and/or modified sequence
atgtctgccaggacagccccccggccccaggtgctgctgctgcccctgctgctggtgctgctggccgccgccccagctgccagcaagggctgtgtgtgcaaggacaagggccagtgcttctgtgatggagccaagggggagaagggggagaagggcttccctggccccccaggcagccctggccagaagggcttcaccggccctgagggcctgcccggcccccagggccccaagggcttccctggcctgcccggcctgaccggcagcaagggcgtgcggggcatcagcggcctgcccggcttcagcggcagccctggcctgcccggcaccccaggcaacacaggcccctacggcctggtgggcgtgcccggctgcagcggcagcaaaggagagcagggcttccctggcctgcccggcaccctgggctacccaggcatccctggagctgctggcctgaagggccagaagggggccccagccaaggaggaggacatcgagctggatgccaagggggaccccggcctgcccggggcccctggcccccagggcctgcccggccccccaggcttccctggccctgtgggccccccaggccccccaggcttcttcggcttccctggggccatgggcccccggggccccaagggccacatgggagagcgggtgattggccacaagggggagcggggcgtgaagggcctgactggacctcctggccccccaggcaccgtgattgtgaccctgactggaccagacaacagaacagacctgaagggggagaagggggacaagggggccatgggagagcccggccccccaggccccagcggcctgcctggagagagctatggcagcgagaagggggcccctggggaccccggcctgcagggcaagccaggcaaggatggagtgcccggcttccctggcagcgagggcgtgaagggcaacagaggcttccctggcctgatgggagaagatggcatcaagggccagaagggggacatcggccccccaggcttccggggccccacagagtactatgacacctaccaggagaagggagatgagggcaccccaggccccccaggccccaggggggcccggggcccccagggccccagcggccccccaggagtgcccggcagccctggcagcagccggcccggcctgcggggggcccctggctggccaggcctgaagggcagcaaaggagagcggggccggcctgggaaggatgccatgggcaccccaggcagccctggctgtgccggcagccctggcctgcccggcagccctggccccccaggccccccaggggacatcgtgttcagaaaaggacctcctggggaccacggcctgcccggctacctgggcagccctggcatccctggggtggatggccccaagggggagcccggcctgctgtgcacccagtgcccctacatccctggccccccaggcctgcccggcctgcccggcctgcatggagtgaagggcatccctggccggcagggcgctgctggcctgaagggcagccctggcagccctggcaacacaggcctgcccggcttccctggcttccctggggcccagggcgaccccggcctgaagggggagaagggggagaccctgcagcctgagggccaggtgggcgtgcctggggaccccggcctgcggggccagcccggcaggaagggcctggatggcatccctggcaccccaggagtgaagggcctgcccggccccaagggggagctggccctgtctggagagaagggggaccagggccccccaggggaccccggcagccctggcagccctggccctgctggccctgctggccccccaggctacggcccccagggcgagcccggcctgcagggcacccagggcgtgcctggggcccctggccccccaggagaggccggccccagaggagagctgtctgtgtccacccctgtgcccggccccccaggccccccaggccccccaggccaccctggcccccagggccccccaggcatccctggcagcctgggcaaatgtggggaccccggcctgcccggcccagatggagagcccggcatccctggcatcggcttccctggccccccaggccccaagggggaccagggcttccctggcaccaagggcagcctgggctgccctgggaagatgggagagcccggcctgcccgggaagccaggcctgcccggggccaagggggagcctgctgtggccatgcctgggggccctggcaccccaggcttccctggagagcggggcaacagcggggagcacggggagatcggcctgcccggcctgcccggcctgcccggcaccccaggaaatgaaggcctggatggccccaggggggaccccggccagcccggccccccaggagagcagggccccccaggccgctgcatcgagggccccaggggggcccagggcctgcccggcctgaatggcctgaagggccagcagggcagaagaggcaagacaggccccaagggggaccccggcatccctggcctggacagaagtggcttccctggagaaacaggcagccctggcatccctggccaccagggcgagatgggccccctgggccagaggggctacccaggcaaccctggcatcctgggccccccaggagaagatggagtgattggcatgatgggcttccctggggccatcggccccccaggccccccaggcaaccctggcaccccaggccagaggggcagccctggcatccctggggtgaagggccagaggggcacccctggggccaagggggagcagggcgacaagggcaaccctggccccagcgagatcagccacgtgattggagacaagggggagcccggcctgaagggctttgctggcaaccctggagagaagggcaacagaggagtgcccggcatgcctggcctgaagggcctgaagggcctgcccggccctgctggccccccaggccccaggggggacctgggcagcacaggcaaccctggagagcccggcctgcggggcatccctggctccatgggcaacatgggcatgcctggcagcaagggcaagaggggcaccctgggcttccctggccgggccggccggcccggcctgcccggcatccacggcctgcagggcgacaagggggagcccggctacagcgagggcacccggcccggccccccaggccccaccggggaccccggcctgcccggggacatgggcaagaagggggagatgggccagcccggccccccaggccacctgggccctgctggccctgagggcgcccctggcagccctggcagccctggcctgcccgggaagccaggcccccacggggacctgggcttcaagggcatcaagggcctgctgggccccccaggcatccggggccccccaggcctgcccggcttccctggcagccctggccccatgggcatccggggggaccagggcagagatggcatccctggccctgctggggagaagggggagaccggcctgctgcgggcccctcctggcccccggggcaaccctggggcccagggcgccaagggggacagaggagcccctggcttccctggcctgcccggcaggaagggggccatgggagatgctggcccccggggccccaccggcatcgagggcttccctggccccccaggcctgcccggggccatcatccctggccagacaggcaacagaggccccccaggcagccggggcagccctggggcccctggccccccaggccccccaggcagccacgtgattggcatcaagggggacaagggctccatgggccaccctggccccaagggccccccaggcacagctggggacatgggccccccaggccgcctgggcgcccctggcaccccaggcctgcccggccccaggggggaccccggcttccagggcttccctggggtgaagggggagaagggcaaccctggcttcctgggcagcatcggccccccaggccccatcggccccaagggccccccaggagtgcggggggaccccggcaccctgaagatcatcagcctgcccggcagccctggccccccaggcaccccaggagagcccggcatgcagggcgagcccggccccccaggccccccaggcaacctgggcccctgtggcccccggggcaagccaggcaaggatggcaagccaggcaccccaggccctgctggggagaagggcaacaagggcagcaagggggagcccggccctgctggcagtgatggcctgcccggcctgaagggcaagagaggagacagcggcagccctgccacctggaccacccggggctttgtgttcaccaggcacagccagaccacagccatccccagctgcccagagggcaccgtgcccctgtacagcggcttctccttcctgtttgtgcagggcaaccagagggcccacggccaggacctgggcaccctgggcagctgcctgcagcgcttcaccaccatgcccttcctgttctgcaatgtgaatgatgtgtgcaactttgccagcagaaatgactacagctactggctgagcaccccagccctgatgcccatgaacatggcccccatcaccggccgggccctggagccctacatcagccgctgcaccgtgtgtgagggccctgccatcgccatcgctgtgcacagccagaccacagacatccccccctgcccccacggctggatcagcctgtggaagggcttctccttcatcatgttcaccagcgctggcagcgagggcaccggccaggccctggccagccctggcagctgcctggaggagttccgggccagccccttcctggagtgccacggccggggcacctgcaactactacagcaacagctacagcttctggctggccagcctgaaccctgagaggatgttcaggaagcccatccccagcacagtgaaggccggggagctggagaagatcatcagccgctgccaggtgtgcatgaagaagaggcactag

SEQ ID NO: 299454 - DNA, 5013 bp, Artificial Sequence
  derived and/or modified sequence
atgagcgcccggaccgccccccggccccaggtgctgctgctgcccctcctgctggttctgctggctgcagccccggcagcctcaaaaggttgcgtctgcaaggataaagggcagtgcttttgtgacggggccaaaggggagaagggcgaaaaaggcttcccaggtccccctggaagtccggggcagaagggttttactgggcccgaagggctgcctgggccacaggggcctaagggattcccagggcttccagggctgactggcagcaaaggggtgcgggggatctctgggctgcctggctttagcggttctccaggcctgcccggcaccccagggaacaccggaccttacggtctggtaggcgtgccaggctgcagcggatccaaaggagaacaaggattccccggattgcccgggaccctggggtatcccggtatccccggagcagccggacttaaaggccagaagggagctccagcaaaggaggaagacatagagcttgatgccaaaggcgatcccgggttaccaggcgcccccgggccccaaggcctacccggcccgccagggtttccaggccctgtggggccacccggtcctccaggcttctttggctttcccggagcgatgggacccagaggccctaagggccacatgggagagagagtcattggccacaagggcgaaaggggcgtcaaggggctaacaggaccacccggacctccaggcaccgtgatcgtgacactgaccggaccagataaccgcacagacctgaaaggagaaaagggtgataagggggccatgggcgaacctggcccacctggaccctcaggcctgccaggggagagttacggcagcgaaaaaggagcccccggtgatcccggactccagggaaagccaggaaaagatggggtgcccggcttcccagggtctgagggggtgaaaggcaataggggttttcccggccttatgggcgaggatggcattaaaggacaaaagggcgacatcggtccgcccgggttccgggggcccaccgagtactacgatacctaccaggagaaaggcgacgaggggacacccgggccccccggccctaggggcgctagagggccacaggggccgtctggcccgcctggcgtccccggttcaccgggatctagtcgcccagggctgcgtggcgccccgggttggcccgggctcaaaggaagtaagggagaacgtggcaggccaggtaaggacgcaatgggcacacccggtagcccaggttgtgccggcagccctggattgcctgggtcgcccgggccccctgggccaccaggcgatattgtgtttcgcaaaggcccgccaggtgaccacggtctccccggttatctgggttcaccaggcatccctggggtcgatgggcctaagggtgaacctggccttctgtgcacccagtgtccatacatcccaggcccgcccgggctcccggggctgcctgggctgcatggtgtaaagggaattcctggcaggcagggtgccgcgggactgaagggcagtcctggcagcccaggaaataccgggttacctggcttcccgggatttcccggagcccagggagacccaggactgaaaggagagaaaggcgaaaccctccagcccgaggggcaggtgggggtcccgggcgacccaggattgcgcggccagccaggacgcaaagggcttgacggaattcccgggaccccaggggtgaaaggcctgcccgggccaaaaggggagctcgcactcagcggagagaagggggaccaggggccccctggtgaccccggttcccctggcagtccagggcccgctggcccagcaggtccacccgggtacggcccgcaaggagagccaggcctgcagggaacccaaggagtgcctggagcgccaggcccccctggcgaagccggtcctagaggagaactgtcagtgtccactcctgtgcctggtccgccaggtccacctggacctcctggccacccaggaccccaaggccccccaggaatcccaggtagcctcggtaagtgtggggacccagggcttcccggtccagatggcgagcctggaatccccggcatcggctttccaggaccacctggacctaagggtgatcaaggcttccccggaacaaaaggatctctcggatgtcccggaaaaatgggtgagcccggactgcccgggaagcccgggctacccggggctaaaggtgaaccagccgtggccatgcccggaggacctgggaccccggggtttccgggggaacgtggaaatagtggagagcacggcgaaataggattgccaggactgcctggattgcctgggactccaggaaacgaaggcctggatggccctcgcggcgatcccggtcagccagggccccctggtgaacaaggtccgccgggcagatgcattgagggacctaggggtgcccagggacttcccggattgaacgggttgaaaggccagcagggccggcggggtaagacaggaccaaaaggagaccctggaatccctggacttgaccggagcggattccctggagaaacgggcagccccggtattccaggtcaccagggtgagatgggccctctgggccagcgcgggtatcctggcaatcctgggattctaggcccccctggcgaagacggcgtgatcggcatgatggggttccctggggccatcggtccacccgggcctcccggaaatcccggtactccggggcagaggggctcacctgggatcccaggggtaaagggacagcgcgggacgccaggagctaagggcgagcaaggcgacaaaggaaacccaggcccttccgagatttcccacgtgattggggacaagggtgagcccggtctgaagggcttcgccggcaatcccggtgagaaaggcaaccgcggagtgccaggaatgccaggattaaagggattgaagggtctccctgggcctgcaggacctccagggcccagaggtgacctgggcagtacaggaaatccaggggaaccgggactgaggggaatccccgggtctatgggtaacatgggcatgccaggttcaaagggaaaacgggggaccctagggtttccggggcgggctgggagacccggtctcccaggcatccatggcttgcagggagacaagggggagcccgggtacagcgaaggcacgcggccgggtcctccaggtccgactggagaccccggtttgcccggggacatgggcaagaaaggagagatgggtcagcctggaccccccgggcatctgggacctgccgggccagagggtgcgcccggatcaccaggcagtccaggactgcctggcaaacctggccctcatggggatctggggttcaaaggcattaaagggctactcggcccacctgggatcagaggtccccccgggctgccaggttttcccggctcacccggacccatgggaattcggggcgaccagggacgtgatgggataccagggcctgctggagagaagggcgaaaccggcttgcttcgggcacctccgggcccgagaggcaaccccggggcacagggagcaaaaggggataggggcgcccctgggtttccgggcttacccggccggaaaggtgctatgggggatgcaggacctcgtgggcctacaggtatagaggggtttcctgggccgcctggactaccaggagccatcattcccggacagaccggtaataggggtccacccggaagtcgcgggtcccccggcgctcccggccctcctggacctcctgggagccatgttatcggtattaaaggagacaaaggctccatgggccatcctggcccgaaaggccctccgggcactgctggagatatgggaccccccgggcgcctgggcgccccaggaacaccaggcctacccgggcccagaggggatccaggatttcagggatttcctggcgtgaagggggaaaaaggcaatccaggctttctgggttcaatcggccctcctggcccaattggccccaaaggtcctccaggcgtgcggggtgaccccggcaccctgaagatcatcagtctgccaggatctccaggcccccccggaacccccggggaacctgggatgcagggagaacccggccctcccggaccacccggcaacctgggcccttgcggacctcgaggaaaaccggggaaggatggcaagccggggaccccaggccccgccggcgaaaaggggaataagggatcgaagggagaacctgggccggctggatccgacgggctaccagggctcaaggggaagaggggcgatagtggatcgccagcaacttggacaacccgaggcttcgttttcactaggcattctcagacgacagcgatccctagctgccctgaaggcaccgtgcccctgtactcaggcttttcgttcctgttcgtccagggtaaccagagagcccacggccaagacctaggaaccctgggctcctgtctacagaggtttaccacgatgccattcctattttgcaatgtaaacgatgtctgcaattttgctagtagaaatgactacagttattggttgagcacgcccgctctgatgcctatgaatatggcccccattaccggcagggcgctggaaccctatattagtagatgcaccgtgtgtgagggtccggcgatcgcaatcgcggtacacagtcagactacagatattcctccctgcccccacggatggatcagtttgtggaagggcttctccttcatcatgttcacttccgctggctctgagggcacaggacaggcattggctagcccgggttcctgtcttgaggaatttcgcgcctctccatttctcgagtgtcacggacggggaacctgtaattactattcaaacagttattctttttggctggcctctctgaatcccgagaggatgtttcggaaacccattccgtccaccgtgaaggccggcgagctggagaaaatcatatctagatgccaggtttgcatgaagaaacggcattag

SEQ ID NO: 299455 - DNA, 5012 bp, Artificial Sequence
  derived and/or modified sequence
atgagtgccagaactgccccacgtccccaagttctgcttcttcctctacttctcgtgctgctcgcggcagcgccagccgcttccaaaggatgcgtgtgcaaggataaggggcagtgcttttgtgacggtgccaaaggtgaaaagggagaaaagggattccccggtccgcctggcagtcccggtcagaaagggtttacgggacccgaaggccttcctggaccacaagggccaaagggttttccaggtctacctggcctgactggctcgaagggtgtaagaggtatctccggattacctgggttctccgggtccccaggcctcccaggaacacccggaaataccggtccctacgggctggtcggcgttccgggttgttctgggtcaaagggggagcaaggcttcccagggcttcccggtaccctggggtacccagggatcccgggtgcagcaggcctgaaaggacagaagggagccccagccaaggaagaggacattgaacttgacgctaagggggacccaggccttcctggagccccaggccctcaggggctgcccggacccccaggcttccccggaccagtgggtcccccagggccacccggatttttcggatttccaggtgctatgggaccacggggtcctaaagggcacatgggcgaacgggtgattggtcacaagggagaacggggagttaaaggactgaccgggccacccggaccgcctggcacagtcatcgtgacactgacaggccctgacaatcgcaccgatttaaagggagaaaaaggcgacaagggagctatgggagaacctggacccccaggcccatccggactccccggagaatcttacggaagtgaaaagggcgctccaggtgatcccggtctgcagggaaaacccggaaaggacggagttccagggttcccgggttccgagggggtcaagggaaatcggggatttccagggttgatgggagaggacgggattaaagggcagaagggagacattgggccaccgggattccgcggacctactgaatactatgacacctatcaggagaagggagacgagggaactccagggccaccaggaccacgcggtgcacgcggtccacagggcccttctggacccccaggagttcctggatcaccaggatcaagtaggcccggactgcgcggagccccagggtggccagggttaaagggatcaaagggggaacgcggtaggccgggtaaagatgccatgggcacaccaggcagccctggttgtgcgggatcccctggactcccaggatcacccggaccccctggccctcctggggatattgtctttcggaaagggcctccgggtgaccatgggctcccgggatatctaggctcgcctggtatccctggcgttgatgggccaaaaggggagcccggtctgctttgcacccaatgcccctatataccaggtcctcccggactccccggattacccggactgcacggtgttaagggaattcccggtaggcagggcgcagccggtctgaagggttcacctggttctcctggcaatacaggcctccccggattcccgggttttccgggtgctcagggggatccaggcctgaagggagagaagggtgagaccctccaacctgaagggcaagtgggcgtaccaggcgatccagggctgaggggtcaaccaggacgcaaaggtcttgacggcatcccaggaacgccaggggtcaagggtctcccagggcctaagggcgaattagccctttccggagagaagggggatcaggggccaccaggagaccctgggagtccaggctcacctggacccgctgggccagccggacccccaggatacggcccacaaggcgagcccggattacagggaactcagggggtgcctggggctccaggccctcccggagaggcaggacccagaggggaattatctgtgtcaactcctgttcctgggccacccggacctcctgggccaccaggtcacccgggaccgcagggaccacccggaattcctgggagtcttggaaagtgcggggaccccggactccccggtccagatggcgaacctgggatccccggtataggattccctgggcctcccggtcccaaaggggatcaggggttccctggcaccaagggctccctagggtgtccaggcaaaatgggagaacccggactgcctggtaagcctggccttcccggtgccaagggagagcccgcagtcgccatgcccggtggcccagggacacctggcttcccgggtgaacgcggaaatagtggcgagcatggtgagatcggcctgcccggattgcccggtctccctggtactccgggaaatgaggggcttgatggaccgagaggtgatcccggtcagccaggacctcctggcgagcaaggcccacctggcaggtgcatcgaaggccctaggggcgctcagggcttgccgggtctgaatgggctgaaaggacagcagggaagaagaggcaagacaggaccaaaaggtgacccaggcatccccggtctcgatcggtccggctttcccggtgagactggtagccctgggatcccgggtcaccagggggagatgggcccactagggcagaggggatatcctggcaatccgggtatcctgggaccccctggggaagatggagtgattgggatgatgggttttcccggagccattggccctcccggaccccctggtaatccaggcacccctggacaacggggttccccgggaatccccggagtcaaagggcagcgcggaacacctggcgctaagggcgaacagggggacaagggaaatcctggtcctagcgagatttcccacgtcattggggacaagggtgaacccggactgaaaggctttgcaggcaatcctggagaaaagggaaatcgcggagtgccgggaatgcctggcctgaaaggcctgaagggcctgcctggtcctgccggaccgcctggaccaaggggggatctgggaagtacaggaaatcctggggagcctggcctcagagggataccaggctctatgggtaatatgggaatgccaggctcaaagggaaagagggggacactcggctttcctgggcgagcaggtaggcctggactgcctgggattcacggactgcagggcgacaagggggaacctggatactcagagggcacccgacctggtccaccagggcctacaggtgatccgggtttgcctggcgatatgggcaagaaaggagaaatggggcagcctgggccaccagggcatcttgggcctgcgggtcccgagggcgctcccggaagtcctggctcaccgggtctgcctggcaagcccggtccccacggggatctgggtttcaagggcattaagggactgctgggcccaccaggtatcaggggtccccctggcctgccgggattcccgggatctcccggtcctatgggcataagaggagatcagggcagggatggaattcctggacctgctggagaaaagggggagaccggcctcctgagggcacctcctggtcccaggggaaaccccggagcccagggggcaaagggggaccgaggagctccaggtttcccaggactgcccggtagaaagggtgctatgggagatgcaggcccaaggggtccaactggcattgaggggttccccggtcccccaggtctgcccggtgcaatcattccaggtcagacggggaaccggggacccccaggatcgcggggatccccaggcgcacccggtcctccgggtccaccgggttcccacgtaatcggcattaagggagacaaaggaagcatgggccaccccggtcccaaagggcctccgggaacagcaggcgacatgggccctcctgggagactaggggctccaggaacacctgggttgcctggtcccagaggtgaccccggattccaggggtttcccggagtgaaaggtgagaaaggcaatccaggctttttgggctctattggcccaccaggtccaataggcccaaagggcccaccaggcgtgaggggagatccaggaaccttaaaaatcatttccttgcctggttcccctggccctcccggtacccctggcgagcctggaatgcaaggtgaacccggaccgcctggtccccctgggaatctaggaccatgcggtccacgcggtaagccgggtaaggatgggaaaccaggtactcctggtccggcaggagaaaagggaaataaaggctcaaaaggggagcctgggccagccggaagcgatggtctcccaggactgaaaggtaaaaggggtgacagcggaagtcctgctacatggaccacacgcggatttgtctttactagacacagtcagactactgcaattcctagttgcccagaggggactgtccctctttacagtggcttctcatttcttttcgtgcaaggcaatcagagggcccacgggcaggacctgggcactctgggatcctgtctgcaaaggtttacaactatgccatttctcttctgtaatgtcaacgatgtctgtaacttcgcaagtcgtaacgactatagctattggctatcgactcctgccctgatgcctatgaacatggctcccataacagggagggctttggagccctatatcagtcgttgtactgtgtgtgagggccctgctatcgctatagccgtccatagccagactaccgatattcccccttgcccccacggttggataagcctttggaaggggttttctttcatcatgttcactagtgctggctcagagggcaccgggcaggccctggcttcacccggttcttgtctggaggagttccgggcttccccgtttttggagtgccacggtaggggcacctgcaactactattcgaatagctattctttctggctggcctccctaaaccccgagaggatgttcaggaaacctatcccatccaccgtaaaagccggtgagctggagaagattatttcccggtgccaggtatgcatgaaaaagcggcatta

SEQ ID NO: 299456 - DNA, 343 bp, Artificial Sequence
  derived and/or modified sequence
gtctgactatggtggcagcgagggctcccacacagaaccctgtgaagagaaaccctggcggccaggatccccgcatctaccgcacacgtccctaggggaggccctgagcagggcagtctctccacagtgccctgaggagcccagagctgtgcacgctctgcaacgggccaatagcttccagtctccaaccccaagcaaataccagaactggaggagagaattctggtggagtttgacgccagtgaacaaaagaactatgtcacctcctaaggacccttctccttctcttcctcttccttcatcgtcttcccattcatcttccccaccatcttcttcttcaacc

SEQ ID NO: 299457 - DNA, 5064 bp, Artificial Sequence
  derived and/or modified sequence
atgtggagcctgcacatcgtgctgatgagatgcagcttcagactgaccaagagcctggccaccggcccctggagcctgatcctgatcctgttcagcgtgcagtacgtgtacggcagcggcaagaagtacatcggcccctgcggcggcagagactgcagcgtgtgccactgcgtgcccgagaagggcagcagaggcccccccggcccccccggcccccagggccccatcggccccctgggcgcccccggccccatcggcctgagcggcgagaagggcatgagaggcgacagaggcccccccggcgccgccggcgacaagggcgacaagggccccaccggcgtgcccggcttccccggcctggacggcatccccggccaccccggcccccccggccccagaggcaagcccggcatgagcggccacaacggcagcagaggcgaccccggcttccccggcggcagaggcgccctgggccccggcggccccctgggccaccccggcgagaagggcgagaagggcaacagcgtgttcatcctgggcgccgtgaagggcatccagggcgacagaggcgaccccggcctgcccggcctgcccggcagctggggcgccggcggccccgccggccccaccggctaccccggcgagcccggcctggtgggcccccccggccagcccggcagacccggcctgaagggcaaccccggcgtgggcgtgaagggccagatgggcgaccccggcgaggtgggccagcagggcagccccggccccaccctgctggtggagccccccgacttctgcctgtacaagggcgagaagggcatcaagggcatccccggcatggtgggcctgcccggcccccccggcagaaagggcgagagcggcatcggcgccaagggcgagaagggcatccccggcttccccggccccagaggcgaccccggcagctacggcagccccggcttccccggcctgaagggcgagctgggcctggtgggcgaccccggcctgttcggcctgatcggccccaagggcgaccccggcaacagaggccaccccggcccccccggcgtgctggtgaccccccccctgcccctgaagggcccccccggcgaccccggcttccccggcagatacggcgagaccggcgacgtgggcccccccggcccccccggcctgctgggcagacccggcgaggcctgcgccggcatgatcggcccccccggcccccagggcttccccggcctgcccggcctgcccggcgaggccggcatccccggcagacccgacagcgcccccggcaagcccggcaagcccggcagccccggcctgcccggcgcccccggcctgcagggcctgcccggcagcagcgtgatctactgcagcgtgggcaaccccggcccccagggcatcaagggcaaggtgggcccccccggcggcagaggccccaagggcgagaagggcaacgagggcctgtgcgcctgcgagcccggccccatgggcccccccggcccccccggcctgcccggcagacagggcagcaagggcgacctgggcctgcccggctggctgggcaccaagggcgaccccggcccccccggcgccgagggcccccccggcctgcccggcaagcacggcgccagcggcccccccggcaacaagggcgccaagggcgacatggtggtgagcagagtgaagggccacaagggcgagagaggccccgacggcccccccggcttccccggccagcccggcagccacggcagagacggccacgccggcgagaagggcgaccccggcccccccggcgaccacgaggacgccacccccggcggcaagggcttccccggccccctgggcccccccggcaaggccggccccgtgggcccccccggcctgggcttccccggcccccccggcgagagaggccaccccggcgtgcccggccaccccggcgtgagaggccccgacggcctgaagggccagaagggcgacaccatcagctgcaacgtgacctaccccggcagacacggcccccccggcttcgacggcccccccggccccaagggcttccccggcccccagggcgcccccggcctgagcggcagcgacggccacaagggcagacccggcacccccggcaccgccgagatccccggcccccccggcttcagaggcgacatgggcgaccccggcttcggcggcgagaagggcagcagccccgtgggcccccccggcccccccggcagccccggcgtgaacggccagaagggcatccccggcgaccccgccttcggccacctgggcccccccggcaagagaggcctgagcggcgtgcccggcatcaagggccccagaggcgaccccggctgccccggcgccgagggccccgccggcatccccggcttcctgggcctgaagggccccaagggcagagagggccacgccggcttccccggcgtgcccggcccccccggccacagctgcgagagaggcgcccccggcatccccggccagcccggcctgcccggctaccccggcagccccggcgcccccggcggcaagggccagcccggcgacgtgggcccccccggccccgccggcatgaagggcctgcccggcctgcccggcagacccggcgcccacggcccccccggcctgcccggcatccccggccccttcggcgacgacggcctgcccggcccccccggccccaagggccccagaggcctgcccggcttccccggcttccccggcgagagaggcaagcccggcgccgagggctgccccggcgccaagggcgagcccggcgagaagggcatgagcggcctgcccggcgacagaggcctgagaggcgccaagggcgccatcggcccccccggcgacgagggcgagatggccatcatcagccagaagggcacccccggcgagcccggcccccccggcgacgacggcttccccggcgagagaggcgacaagggcacccccggcatgcagggcagaagaggcgagcccggcagatacggcccccccggcttccacagaggcgagcccggcgagaagggccagcccggcccccccggcccccccggcccccccggcagcaccggcctgagaggcttcatcggcttccccggcctgcccggcgaccagggcgagcccggcagccccggcccccccggcttcagcggcatcgacggcgccagaggccccaagggcaacaagggcgaccccgccagccacttcggcccccccggccccaagggcgagcccggcagccccggctgccccggccacttcggcgccagcggcgagcagggcctgcccggcatccagggccccagaggcagccccggcagacccggcccccccggcagcagcggcccccccggctgccccggcgaccacggcatgcccggcctgagaggccagcccggcgagatgggcgaccccggccccagaggcctgcagggcgaccccggcatccccggcccccccggcatcaagggccccagcggcagccccggcctgaacggcctgcacggcctgaagggccagaagggcaccaagggcgccagcggcctgcacgacgtgggcccccccggccccgtgggcatccccggcctgaagggcgagagaggcgaccccggcagccccggcatcagcccccccggccccagaggcaagaagggcccccccggcccccccggcagcagcggcccccccggccccgccggcgccaccggcagagcccccaaggacatccccgaccccggcccccccggcgaccagggcccccccggccccgacggccccagaggcgcccccggcccccccggcctgcccggcagcgtggacctgctgagaggcgagcccggcgactgcggcctgcccggcccccccggcccccccggcccccccggcccccccggctacaagggcttccccggctgcgacggcaaggacggccagaagggccccgtgggcttccccggcccccagggcccccacggcttccccggcccccccggcgagaagggcctgcccggcccccccggcagaaagggccccaccggcctgcccggcgagcccggcccccccgccgacgtggacgactgccccagaatccccggcctgcccggcgcccccggcatgagaggccccgagggcgccatgggcctgcccggcatgagaggccccagcggccccggctgcaagggcgagcccggcctggacggcagaagaggcgtggacggcgtgcccggcagccccggcccccccggcagaaagggcgacaccggcgaggacggctaccccggcggccccggcccccccggccccatcggcgaccccggccccaagggcttcggccccggctacctgggcggcttcctgctggtgctgcacagccagaccgaccaggagcccacctgccccctgggcatgcccagactgtggaccggctacagcctgctgtacctggagggccaggagaaggcccacaaccaggacctgggcctggccggcagctgcctgcccgtgttcagcaccctgcccttcgcctactgcaacatccaccaggtgtgccactacgcccagagaaacgacagaagctactggctggccagcgccgcccccctgcccatgatgcccctgagcgaggaggccatcagaccctacgtgagcagatgcgccgtgtgcgaggcccccgcccaggccgtggccgtgcacagccaggaccagagcatccccccctgcccccagacctggagaagcctgtggatcggctacagcttcctgatgcacaccggcgccggcgaccagggcggcggccaggccctgatgagccccggcagctgcctggaggacttcagagccgcccccttcctggagtgccagggcagacagggcacctgccacttcttcgccaacaagtacagcttctggctgaccaccgtgaaggccgacctgcagttcagcagcgcccccgcccccgacaccctgaaggagagccaggcccagagacagaagatcagcagatgccaggtgtgcgtgaagtacagctag

SEQ ID NO: 299458 - DNA, 5073 bp, Artificial Sequence
  derived and/or modified sequence
atgtggagcctgcacatcgtgctgatgagatgcagcttcagactgaccaagagcctggccaccggcccctggagcctgatcctgatcctgttcagcgtgcagtacgtgtacggcagcggcaagaagtacatcggcccctgcggcggcagagactgcagcgtgtgccactgcgtgcccgagaagggcagcagaggcccccccggcccccccggcccccagggccccatcggccccctgggcgcccccggccccatcggcctgagcggcgagaagggcatgagaggcgacagaggcccccccggcgccgccggcgacaagggcgacaagggccccaccggcgtgcccggcttccccggcctggacggcatccccggccaccccggcccccccggccccagaggcaagcccggcatgagcggccacaacggcagcagaggcgaccccggcttccccggcggcagaggcgccctgggccccggcggccccctgggccaccccggcgagaagggcgagaagggcaacagcgtgttcatcctgggcgccgtgaagggcatccagggcgacagaggcgaccccggcctgcccggcctgcccggcagctggggcgccggcggccccgccggccccaccggctaccccggcgagcccggcctggtgggcccccccggccagcccggcagacccggcctgaagggcaaccccggcgtgggcgtgaagggccagatgggcgaccccggcgaggtgggccagcagggcagccccggccccaccctgctggtggagccccccgacttctgcctgtacaagggcgagaagggcatcaagggcatccccggcatggtgggcctgcccggcccccccggcagaaagggcgagagcggcatcggcgccaagggcgagaagggcatccccggcttccccggccccagaggcgaccccggcagctacggcagccccggcttccccggcctgaagggcgagctgggcctggtgggcgaccccggcctgttcggcctgatcggccccaagggcgaccccggcaacagaggccaccccggcccccccggcgtgctggtgaccccccccctgcccctgaagggcccccccggcgaccccggcttccccggcagatacggcgagaccggcgacgtgggcccccccggcccccccggcctgctgggcagacccggcgaggcctgcgccggcatgatcggcccccccggcccccagggcttccccggcctgcccggcctgcccggcgaggccggcatccccggcagacccgacagcgcccccggcaagcccggcaagcccggcagccccggcctgcccggcgcccccggcctgcagggcctgcccggcagcagcgtgatctactgcagcgtgggcaaccccggcccccagggcatcaagggcaaggtgggcccccccggcggcagaggccccaagggcgagaagggcaacgagggcctgtgcgcctgcgagcccggccccatgggcccccccggcccccccggcctgcccggcagacagggcagcaagggcgacctgggcctgcccggctggctgggcaccaagggcgaccccggcccccccggcgccgagggcccccccggcctgcccggcaagcacggcgccagcggcccccccggcaacaagggcgccaagggcgacatggtggtgagcagagtgaagggccacaagggcgagagaggccccgacggcccccccggcttccccggccagcccggcagccacggcagagacggccacgccggcgagaagggcgaccccggcccccccggcgaccacgaggacgccacccccggcggcaagggcttccccggccccctgggcccccccggcaaggccggccccgtgggcccccccggcctgggcttccccggcccccccggcgagagaggccaccccggcgtgcccggccaccccggcgtgagaggccccgacggcctgaagggccagaagggcgacaccatcagctgcaacgtgacctaccccggcagacacggcccccccggcttcgacggcccccccggccccaagggcttccccggcccccagggcgcccccggcctgagcggcagcgacggccacaagggcagacccggcacccccggcaccgccgagatccccggcccccccggcttcagaggcgacatgggcgaccccggcttcggcggcgagaagggcagcagccccgtgggcccccccggcccccccggcagccccggcgtgaacggccagaagggcatccccggcgaccccgccttcggccacctgggcccccccggcaagagaggcctgagcggcgtgcccggcatcaagggccccagaggcgaccccggctgccccggcgccgagggccccgccggcatccccggcttcctgggcctgaagggccccaagggcagagagggccacgccggcttccccggcgtgcccggcccccccggccacagctgcgagagaggcgcccccggcatccccggccagcccggcctgcccggctaccccggcagccccggcgcccccggcggcaagggccagcccggcgacgtgggcccccccggccccgccggcatgaagggcctgcccggcctgcccggcagacccggcgcccacggcccccccggcctgcccggcatccccggccccttcggcgacgacggcctgcccggcccccccggccccaagggccccagaggcctgcccggcttccccggcttccccggcgagagaggcaagcccggcgccgagggctgccccggcgccaagggcgagcccggcgagaagggcatgagcggcctgcccggcgacagaggcctgagaggcgccaagggcgccatcggcccccccggcgacgagggcgagatggccatcatcagccagaagggcacccccggcgagcccggcccccccggcgacgacggcttccccggcgagagaggcgacaagggcacccccggcatgcagggcagaagaggcgagcccggcagatacggcccccccggcttccacagaggcgagcccggcgagaagggccagcccggcccccccggcccccccggcccccccggcagcaccggcctgagaggcttcatcggcttccccggcctgcccggcgaccagggcgagcccggcagccccggcccccccggcttcagcggcatcgacggcgccagaggccccaagggcaacaagggcgaccccgccagccacttcggcccccccggccccaagggcgagcccggcagccccggctgccccggccacttcggcgccagcggcgagcagggcctgcccggcatccagggccccagaggcagccccggcagacccggcccccccggcagcagcggcccccccggctgccccggcgaccacggcatgcccggcctgagaggccagcccggcgagatgggcgaccccggccccagaggcctgcagggcgaccccggcatccccggcccccccggcatcaagggccccagcggcagccccggcctgaacggcctgcacggcctgaagggccagaagggcaccaagggcgccagcggcctgcacgacgtgggcccccccggccccgtgggcatccccggcctgaagggcgagagaggcgaccccggcagccccggcatcagcccccccggccccagaggcaagaagggcccccccggcccccccggcagcagcggcccccccggccccgccggcgccaccggcagagcccccaaggacatccccgaccccggcccccccggcgaccagggcccccccggccccgacggccccagaggcgcccccggcccccccggcctgcccggcagcgtggacctgctgagaggcgagcccggcgactgcggcctgcccggcccccccggcccccccggcccccccggcccccccggctacaagggcttccccggctgcgacggcaaggacggccagaagggccccgtgggcttccccggcccccagggcccccacggcttccccggcccccccggcgagaagggcctgcccggcccccccggcagaaagggccccaccggcctgcccggccccagaggcgagcccggcccccccgccgacgtggacgactgccccagaatccccggcctgcccggcgcccccggcatgagaggccccgagggcgccatgggcctgcccggcatgagaggccccagcggccccggctgcaagggcgagcccggcctggacggcagaagaggcgtggacggcgtgcccggcagccccggcccccccggcagaaagggcgacaccggcgaggacggctaccccggcggccccggcccccccggccccatcggcgaccccggccccaagggcttcggccccggctacctgggcggcttcctgctggtgctgcacagccagaccgaccaggagcccacctgccccctgggcatgcccagactgtggaccggctacagcctgctgtacctggagggccaggagaaggcccacaaccaggacctgggcctggccggcagctgcctgcccgtgttcagcaccctgcccttcgcctactgcaacatccaccaggtgtgccactacgcccagagaaacgacagaagctactggctggccagcgccgcccccctgcccatgatgcccctgagcgaggaggccatcagaccctacgtgagcagatgcgccgtgtgcgaggcccccgcccaggccgtggccgtgcacagccaggaccagagcatccccccctgcccccagacctggagaagcctgtggatcggctacagcttcctgatgcacaccggcgccggcgaccagggcggcggccaggccctgatgagccccggcagctgcctggaggacttcagagccgcccccttcctggagtgccagggcagacagggcacctgccacttcttcgccaacaagtacagcttctggctgaccaccgtgaaggccgacctgcagttcagcagcgcccccgcccccgacaccctgaaggagagccaggcccagagacagaagatcagcagatgccaggtgtgcgtgaagtacagctag

SEQ ID NO: 299459 - DNA, 5064 bp, Artificial Sequence
  derived and/or modified sequence
atgtggagcctgcacattgtactgatgaggtgttcattccgcctcacgaaaagcctcgctacggggccgtggtctctcatactgatactgttcagtgtccaatatgtttatggttcagggaagaagtacattgggccatgcggcggaagagattgctccgtgtgccattgcgtgcccgagaaaggatctcgaggtccgccaggtccaccaggacctcagggtccaattggtcccctaggcgcccctggtcccattggcctctcaggcgagaaagggatgcgtggagaccggggcccaccaggggcagctggagataaaggtgacaaagggccaacaggcgtacctggttttccagggctggatggaatccccgggcacccaggccctccaggccccagaggcaagcctgggatgtccggacataacggatcccgcggagatccgggctttccaggaggccggggcgccctgggaccgggcggcccactgggtcaccccggcgaaaaaggtgaaaagggcaactccgtcttcattctcggcgctgtaaaggggatacagggagacagaggagacccaggcctacccggacttccaggctcatggggcgctggaggccccgccggaccaaccgggtaccccggtgagcccggcctcgtcggtccacccgggcagcctggccgccccggcctgaaaggtaacccgggggtgggtgtgaagggacagatgggcgatcctggggaggtgggccagcaagggtcacccggcccaacccttctcgtagaaccccccgatttttgcctgtacaagggcgaaaaagggattaaagggatccccgggatggtcggacttcctggccctcctggccggaaaggggagtctggcatcggcgccaaaggggagaagggaattccaggttttcccggcccgcgtggagaccctggctcctatggttctcctggttttcctggactcaaaggtgagcttggcctagtcggcgacccagggctgtttggactgattggtccaaagggggacccaggcaaccgtggtcatcctggacctccgggggtgctggtgacccctcctctgcccctgaaggggccaccaggggaccccggttttcctggtcgatacggagagaccggggacgtgggtcccccaggaccaccgggcctcttaggccgacccggtgaagcttgtgccggaatgattggaccgccagggccgcagggtttcccaggactgccagggttgcccggggaggccggtatccccggaagaccggactcagcccccggaaaacctggtaagccgggatcacctggactccccggagcaccaggcttacagggcctgcccggtagctccgtgatctactgttccgtcggcaatcccggcccacagggcatcaagggaaaagtggggcctcccgggggccgcggtcctaagggcgagaagggaaacgagggcctatgtgcatgcgaaccgggcccgatgggcccacccgggccacctggacttcctgggcgacaggggtccaaaggcgatctgggactcccagggtggctaggtacgaagggggaccccggcccaccgggagctgagggtccaccaggattgcccggcaaacacggagcatcagggccacccggcaacaagggcgccaaaggcgacatggttgtgtcaagagtaaaaggacataaaggcgagcgcgggcctgatggtcccccaggattcccaggacaacccgggtcccacggccgcgacggacacgcgggcgagaagggggatcccgggccacctggcgatcatgaagatgcaacccccggaggcaaagggttccccggccctctcgggccgcctggaaaagccggccccgtaggtccgccaggcctagggtttcctggccctcctggagagagggggcaccccggggtccccggtcaccctggggtgagaggacccgacggattaaaagggcagaagggggacaccatctcctgcaatgttacctatcccggtaggcacggaccccctgggttcgatggacctcctggccccaagggctttcccggaccccagggagccccagggctcagtggatcagacggccacaagggaaggcctggaactccgggaacagctgagatcccaggaccccccggattccgaggcgacatgggggaccccggttttggaggcgagaaaggcagctcccctgttgggccgcccggaccaccaggatcgcccggcgtgaacggccagaagggcatccctggagatcctgcttttggccatctgggtccaccagggaagagaggtttgagcggtgttccgggcataaaggggccacgaggagaccccggctgcccaggggcggaaggacccgccggaatcccgggttttctgggcctaaaaggccctaagggtagagaaggacacgcaggatttccaggcgtgcctggcccccctggccacagctgtgagcgcggggcacccggaattcccggacagcccggcctgcccgggtaccctggctctccaggtgcgcctggcggaaaagggcagcctggcgacgtgggtccccctggtccagcgggaatgaaaggtcttcccggactgccgggaagacccggcgcgcacggcccaccggggctcccgggaatcccaggcccattcggagatgatgggttaccaggtcctccagggccgaaggggccgagaggcctgccgggcttcccgggtttccctggagagaggggaaaaccaggagctgagggctgcccaggcgcaaaaggggaaccaggagaaaaggggatgtccggattaccaggcgacaggggactgcgaggcgctaaaggtgcaattgggccacccggggacgagggcgaaatggccataatcagccagaaaggtactccgggggagcctggcccaccaggtgacgacggctttcccggggagcgtggcgacaaaggcacgcctggcatgcagggacggcgcggcgagcctggccgctacgggcccccgggattccacaggggagagcccggagaaaaaggacagccagggccacctggccctccaggtcctcctggcagcaccggactacgcggcttcattgggtttcccggtctgccaggagatcagggggagccaggcagtccgggcccgcctggtttctctggtatcgatggggctcgcggccctaagggcaataagggcgatccagcatcccacttcggacctcctgggccaaagggagagcctggcagccctgggtgcccgggacactttggagcctcaggggagcaggggctacccggtatccagggaccccgtgggagtccgggaaggcctggccctccagggtcctctggccccccagggtgccccggcgatcacggaatgccagggctgcgcggccagcccggtgagatgggggaccccggacctagagggttgcagggagatcccggtatccctggcccacctggaattaaaggcccttccggaagtcccgggctcaatggcctgcacggcctaaaaggacagaaaggcaccaagggcgcctcaggcctccacgacgtgggtccacctggacctgtggggattcccgggctcaaaggagagcgaggcgaccctggctcaccaggcatcagcccccctgggccccgcggtaagaaaggaccacctggcccccctgggagttcaggacccccaggacctgccggggcaacaggccgagccccgaaggatattccagacccagggcccccgggcgaccagggtcctccagggcccgatggccctagaggcgcaccgggcccacccgggctgcctggctcggtggaccttctgcggggcgaacccggtgattgcggcctgcctggacccccaggccccccaggtccgcccggacctccaggctataagggcttcccgggctgcgatggcaaagacgggcagaaggggccggtggggtttcctgggccacagggaccacacggatttcccggcccgcccggcgagaagggcctgccagggcccccaggacggaagggccccactgggctgccgggagaacccggcccaccggctgatgtggacgattgtccgcgtatccctgggttgcccggagctccaggcatgagagggcctgagggagcaatgggcctacctggaatgcgtggaccctctgggcccggttgtaagggggaacctggtctcgacgggcgcaggggcgttgatggagttcccggcagccccggccctccaggcaggaaaggcgacactggggaggatggatatccgggggggcctggcccaccaggacctatcggcgatcccggacctaagggcttcggtcctggttacctcggcggattcctgctggtcctgcatagtcagaccgaccaagagcccacatgcccattgggaatgcctcggctgtggacgggttattcccttctgtatctggaaggacaggagaaagcccacaaccaggatttaggcctggcaggcagttgcctccccgtcttttccactttgccatttgcctactgtaatattcatcaggtgtgccactacgcacagcgcaatgatcggagttattggctggcctcggcagcccccctgcctatgatgccactgtcagaagaggcaataagaccttacgtatctaggtgcgctgtgtgcgaagctcctgcccaggcagttgccgtgcattctcaggatcagtcaataccgccctgtccacaaacatggcggtctctgtggatcggatattcctttctgatgcacactggcgccggggaccaaggcggaggccaggctttgatgagcccgggatcatgcctagaggactttcgagctgccccgttcctcgagtgtcaggggcggcaaggaacctgtcactttttcgcgaataaatattcattctggctcaccacggtgaaggcggacctgcagttctcctcagctccagcccccgacacgctcaaggagagtcaagctcagcggcagaaaatatcccgatgtcaggtgtgtgttaagtacagctag

SEQ ID NO: 299460 - DNA, 5073 bp, Artificial Sequence
  derived and/or modified sequence
atgtggtctctccacatagtgttgatgaggtgctccttcaggctgactaaaagcttggctactggaccttggagcttaatcctaatcttgttctcagtgcaatacgtatatggctcaggcaaaaagtacataggaccatgtggtgggcgtgattgttcagtgtgtcactgcgtgcctgagaaaggtagccgcggcccaccgggcccacccgggccccaagggcctatcggcccacttggggcgccaggcccaatcggtctgagcggcgagaaggggatgaggggagacagaggccctccaggcgctgccggcgacaaaggagacaaaggcccaaccggagtgcctggctttccaggacttgacggcattccagggcacccaggtcccccagggccccgtggcaagccgggcatgagcggccataacggcagcagaggcgatcctggattccccggcgggagaggagcactgggaccaggagggcccttaggacatcccggtgaaaagggagagaaaggcaacagtgtgtttatactgggcgcagtgaaaggcatccagggggaccgaggagatccgggcttgccagggcttcctggctcttggggtgctggcggcccggcaggacccactggatatccgggagagcctgggctagtcggacctcctggccagccaggaaggccggggttaaaaggaaaccctggcgtgggcgtgaagggacaaatgggagatcccggtgaagtgggccagcagggctctcctggcccgactctgctcgtggaaccaccagacttctgtctttacaagggcgagaagggcatcaagggaattcccgggatggtgggacttcccgggcctcctggacgaaagggagagagcgggataggagcgaaaggagagaagggaatacctggatttcccggcccccgcggcgaccctgggtcatatgggtctcctggctttcctggcctgaagggggagctagggctggtgggagatcctgggttgttcggtctgattgggccaaaaggggatcctggaaaccgcggccatccaggtcctcctggtgtactcgtcaccccacctctccccctaaaggggccccccggggatcccggttttcctggcaggtacggagaaaccggtgacgtggggccgccaggccctcctgggttgttgggacggcccggcgaagcatgtgcaggaatgattggcccacccggtcctcagggcttcccaggtctgcctggactccccggagaggccggtattcccggtcgccccgactccgcacccggtaaaccggggaagcctggttctcccggactgccaggtgcccctggacttcaggggttgcccgggtcctcggtgatctactgcagtgtgggcaaccctggaccccagggtataaagggaaaggttgggccccccggaggacgcgggccaaagggggaaaagggtaatgaaggcctatgtgcctgcgaacctggccctatgggtcccccgggtcctcctggtctacctggccggcaggggagcaaaggtgatctgggtctgccgggatggctggggacaaagggcgatccaggccctcccggtgcagaaggcccccccggattgcccgggaagcatggcgcttcaggccccccaggtaacaaaggagctaagggagatatggtcgtctctagagtgaagggccacaaaggcgagcgcggccccgacggtcccccagggtttcccggccagcccgggagccacggacgggatggacacgcaggcgagaaaggtgatccaggaccacctggggaccatgaggatgctacacccgggggcaagggcttccctggacccctaggcccaccgggcaaagccggacctgtcggacctcctggactcggctttcccggtcctcccggcgaaagaggtcatcccggcgtccccgggcaccctggtgtacggggccctgatggattgaaaggccaaaagggagataccatctcatgcaacgtgacatacccagggaggcacgggccccctgggttcgacggcccaccagggccaaaaggctttcctggacctcagggtgctcccgggctgtctggttcggatggacataagggcaggcccggtacgcccggtactgctgaaattcctgggccaccaggctttagaggcgatatgggcgatcccggattcggtggagagaagggctccagtcccgtgggaccacctgggcccccaggcagccctggcgtaaacggccagaagggcatacctggcgacccagccttcggccacctgggcccgcctggaaagaggggactgagtggggttcctgggatcaaaggccccaggggagacccagggtgccctggtgcagaagggcctgccggaattccgggcttcctcgggctaaaagggcccaaaggtcgtgaaggccatgcaggattcccgggagtgcctggaccgcccgggcactcctgtgaaaggggagctccaggcatacctggccagcctggtctgccagggtaccctggaagtcccggagcgcccggaggtaaggggcaacctggcgacgtgggcccgcccggacctgccggcatgaagggccttccaggactgcccggcaggccaggcgctcatggtccccctggactccctggcatcccgggaccctttggcgatgatggtctccctgggccacctggtccgaagggcccacggggcctcccaggattccccgggtttcccggcgaacgcggtaagcccggagcagaaggctgtcctggcgcgaagggggagccaggggagaagggcatgtcgggcctcccaggtgaccgcggtctgcgcggagcaaagggagctatagggccaccgggagatgagggagaaatggccatcatctcccagaaaggaacacccggcgaacctggtccgcccggggatgatgggtttcctggagagagaggagacaagggcactccgggcatgcaggggcggaggggcgaacctggacgttacggtcccccaggcttccacagaggagaaccaggtgagaaggggcagccgggaccacctggcccgccaggtccaccggggagcactggactgagagggtttatcgggttcccaggtctgcccggagaccaaggagaaccagggtccccagggccccctggattcagtgggatcgatggggccagaggacctaaaggaaacaagggggacccagcgagtcactttggccctcctgggccaaaaggagagcctgggagtcctgggtgcccaggccattttggagcgagcggtgagcaaggccttccagggatacagggcccgcgggggagccccgggcgacctggccctcctggctcttctggaccgcccggctgcccaggtgaccacggcatgcccgggctgagaggccaacctggagagatgggggaccctggcccccgcgggctacagggggatccagggatccccgggccaccagggatcaaggggccgtctggctcaccggggctgaacggcctccacggcctcaaagggcagaaggggacaaagggtgcgtctgggctccacgacgtggggcctccgggacctgtggggatcccagggctaaagggtgagcgcggggatcctggtagccccggcatctctcctccaggtccgcgcgggaagaaagggccaccaggaccccccggctcttcaggccccccaggccccgccggtgcaacaggacgcgctccaaaggatattcctgaccccgggccgcccggcgaccagggcccacccggaccggatggccccaggggagctccaggcccccccggccttcctggttccgtggacttgctgcgtggcgagcctggagactgcggattgcctggaccgccaggcccacccgggccccccgggccccccggttacaaagggtttccggggtgcgacggaaaagacggtcaaaaaggaccagtgggtttcccagggccacaagggccacacgggtttcccggcccacccggcgaaaagggcctgccggggccccccggaaggaaagggccaaccggtcttccaggcccacgcggggagccaggtcccccagctgacgtggatgattgcccccgaatcccaggtctacccggcgcccctggcatgagggggcctgaaggagcaatggggcttcctggcatgagaggcccaagcggtcctggctgcaagggcgaaccggggttggatgggcgcaggggagttgatggagtccccgggagtcctggacctccgggaagaaaaggtgacactggcgaagatggctacccaggagggcccggcccacctggtcccatcggagatcccggccctaaggggtttggacccggttacctcggcgggtttctgctggtgctccattctcagacagatcaagaacctacctgtccacttgggatgccacggctatggaccggctactcattgctgtatctggaaggtcaggagaaagcacataaccaagacctaggtctggccggcagctgtctgcccgtgttcagcacactgccgtttgcctactgcaatattcaccaggtctgccactatgctcagcggaacgatcgttcttattggctggcctcagccgcacccctgccaatgatgcccctctctgaggaggcgatcaggccatatgtgtcgagatgcgctgtgtgcgaagcacccgcccaggccgtggccgtacatagtcaggaccagtcgattcccccttgtccccagacttggaggagcctgtggattggttactccttcttgatgcacactggggcgggggaccagggaggaggccaagcactgatgtcccctggaagttgcctggaagattttcgggctgctccattcctggagtgtcaggggagacagggtacctgccatttttttgccaataaatactccttctggctcaccactgtaaaagcagatctgcaattcagttctgcccctgcccctgataccctgaaggagtcccaagctcaacgtcagaagatcagtagatgtcaggtctgcgtgaagtactcttag

SEQ ID NO: 299461 - DNA, 5272 bp, Artificial Sequence
  derived and/or modified sequence
cgagagcgccgcgaagaggcagcggggcgcgggtggattggggctggaggtgcgcgtcccgtggggtggcaaggcggcagctcctggcgctgcgggcgtccccacaggaacagactttgacccagaacacagaacctcacttgtcaacaagaaccttctggaagagaagactggcagaatattttttaagtactaagacttgcctgcgatgtggtctctgcacatagtactaatgaggtgctccttcagattgaccaagtccttggccacaggtccctggtcacttatactcattctcttttctgtacaatatgtatatgggagtggaaagaaatacattggtccttgtggaggaagagattgctctgtttgccactgtgttcctgaaaaggggtctcggggtccaccaggaccaccagggccacagggtccaattggacccctgggagccccaggacccattgggctttcaggagagaaaggaatgagaggggaccgcggccctcctggagcagcaggggacaaaggagataagggtccaactggtgttcctggatttccaggtttagatggcatacctgggcacccagggcctcctggacccagaggcaaacctggtatgagtggccacaatggctcaagaggtgacccagggtttccaggaggaagaggagctcttggcccaggaggccccctaggccatcctggggaaaagggagaaaaaggaaattcagtgttcattttaggtgccgttaaaggtattcagggagacagaggggacccaggactgcctggcttaccaggatcttggggtgcaggaggaccggcaggtcccacaggatatcctggagagccagggttagtgggacctccgggccaaccagggcgtccaggtttgaagggaaatcccggtgtgggagtaaaggggcaaatgggagacccgggtgaggttggtcagcaaggttctcctggacccaccctgttggtagagccacctgacttttgtctctataaaggagaaaagggtataaaaggaattcctggaatggttggactgccaggaccaccaggacgcaagggagaatctggtattggggcaaaaggagaaaaaggtattcctggatttccagggcctcggggggatcctggttcctatggatctccaggttttccaggattaaagggagaactaggactggttggagatcctgggctatttggattaattggcccaaagggggatcctggaaatcgagggcacccaggaccaccaggtgttttggtgactccacctcttccactcaaaggcccaccaggggacccagggttccctggccgctatggagaaacaggggatgttggaccacctggtcccccaggtctcttgggcagaccaggggaagcctgtgcaggcatgataggaccccctgggccacaaggatttcctggtcttcctgggcttccaggagaagctggtattcctgggagacctgattctgctccaggaaaaccagggaagccaggatcacctggcttgcctggagcaccaggcctgcagggcctcccaggatcaagtgtgatatactgtagtgttgggaaccccggaccacaaggaataaaaggcaaagttggtcccccaggaggaagaggcccaaaaggagaaaaaggaaatgaaggactctgtgcctgtgagcctggacccatgggcccccctggccctccaggacttcctgggaggcaggggagtaagggagacttggggctccctggctggcttggaacaaaaggtgacccaggacctcctggtgctgaaggacctccagggctaccaggaaagcatggtgcctctggaccacctggcaacaaaggggcgaagggtgacatggttgtatcaagagttaaagggcacaaaggagaaagaggtcctgatgggcccccaggatttccagggcagccaggatcacatggtcgggatggacatgctggagaaaaaggggatccaggacctccaggggatcatgaagatgcgaccccaggtggtaaaggatttcctggacctctgggccccccaggcaaagcaggacctgtggggcccccaggactgggatttcctggtccaccaggagagcgaggccacccaggagttccaggccacccaggtgtgaggggccctgatggcttgaagggtcagaaaggtgacacaatttcttgcaacgtaacctaccctgggaggcatggccctccaggttttgatggacctccaggtccgaagggatttccaggtccccaaggtgcccctgggctgagtggttcagatgggcataaaggcagacctggcacaccaggaacagcggaaataccaggtccacctggttttcgtggtgacatgggagatccgggttttggaggtgaaaaggggtcctcccctgttgggcccccaggccctcccggctcaccaggagtgaatggtcagaaaggaatcccgggagaccctgcatttggtcacctgggacccccgggaaagaggggtctttcaggagtgccagggataaaaggacccagaggtgatccgggatgtccaggggctgaagggccagctggcattcctggattcctaggtctcaaaggtcccaaaggcagagagggacatgctgggtttccaggtgtcccaggtccacctggccattcctgtgaaagaggtgctccagggataccagggcaaccgggactccctgggtatccaggtagcccaggtgctccaggtgggaaaggacagccgggagatgtggggcctcccgggccagctggaatgaaaggcctccccggactcccaggacggcctggggcacatggtcccccaggcctcccaggaatcccaggtccctttggagatgatgggctacctggtcctccaggtccaaagggaccccgggggctgcctggtttcccaggttttcccggagaaagaggaaagcctggtgcagagggatgtcctggcgcaaagggagaacctggagagaagggcatgtctggccttcctggagaccggggactgagaggggccaaaggagccataggacctcccggagatgaaggagaaatggctatcatttcacaaaagggaacacctggggaacctggacctcctggagatgatggattcccaggagaaagaggtgataaaggaactcccgggatgcaagggagaagaggagagccgggaagatacggaccacctggatttcacagaggggaacctggtgagaaaggtcagccagggcctcctggacccccaggccctccaggctcaactggtctaagagggttcattggttttccaggacttccaggtgaccagggtgagccaggttctccaggtccccctggattttcaggaattgatggagcaagaggacctaaaggaaacaaaggtgaccctgccagtcactttggtccacctggtccaaagggtgagccaggtagccctggatgtccagggcattttggagcatccggagagcagggcttgcctggtattcaagggcccagaggatcacctggaaggccagggccacctggctcctctggaccaccagggtgcccaggtgatcacgggatgcctgggctgaggggacagccaggagaaatgggagaccctgggccaagaggcctccagggggatccagggataccaggtcctccgggaataaaaggtccctccggatcacctggcctgaacggcttgcatggattgaaaggtcagaaaggaactaaaggtgcttcaggtttgcatgatgtggggccacctggtccagtgggaatacctgggctaaaaggggagagaggagaccctgggagcccaggaatctctcctccaggtcctcgtggaaagaaaggtcccccaggacccccagggagttcaggaccacctggtcctgcaggtgccacaggaagagctcctaaggacattcctgacccgggtccacctggagatcagggacctcctggtcctgatggcccaagaggagcacctgggcctccaggcctccctgggagtgttgaccttctgagaggggagccaggtgactgtggtctaccagggccaccaggtccccctggcccaccaggccctccaggatacaaaggctttccaggatgtgatggaaaagatggccagaaaggaccagtgggattcccgggaccgcagggaccacatggatttcctgggccacctggagagaagggtttacctggacctccagggagaaaagggcccactggtcttccgggtgaaccggggccacctgcagatgtggatgactgtccccgaatcccaggccttcctggggcgccaggcatgagaggaccagaaggagccatggggctccctggaatgagaggcccctcaggaccagggtgcaaaggagagcctgggctggatggcaggaggggtgtggatggcgtccctgggtctcctgggcctcccggacgtaaaggtgacacaggagaagacggctaccctggaggaccagggcctcctggtcccattggggatcctgggcccaaagggtttggccctggatacctcggtggcttcctcctggttctccacagtcagacggaccaggagcccacctgccccctgggcatgcccaggctctggactgggtatagtctgttatacctggaagggcaagagaaagctcacaatcaagaccttggtctggcagggtcttgccttcccgtatttagcacgctgccctttgcctactgcaacatccaccaggtgtgccactatgcccagagaaacgacagatcctactggctggccagcgctgcgcccctccccatgatgccactctctgaagaggcgatccgcccctatgtcagccgctgtgcggtatgcgaggccccggcccaggcggtggcggtgcacagccaggaccagtccatccccccatgtccgcagacctggaggagcctctggatcgggtattcattcctgatgcacacaggagctggggaccaaggaggagggcaggcccttatgtcacctggcagctgcctggaagatttcagagcagcaccattccttgaatgccagggccggcagggaacttgccactttttcgcaaataagtatagcttctggctcacaacggtgaaagcagacttgcagttttcctctgctccagcaccagacaccttaaaagaaagccaggcccaacgccagaaaatcagccggtgccaggtctgcgtgaagtatagctag

SEQ ID NO: 299462 - DNA, 9895 bp, Artificial Sequence
  derived and/or modified sequence
cgagagcgccgcgaagaggcagcggggcgcgggtggattggggctggaggtgcgcgtcccgtggggtggcaaggcggcagctcctggcgctgcgggcgtccccacaggaacagactttgacccagaacacagaacctcacttgtcaacaagaaccttctggaagagaagactggcagaatattttttaagtactaagacttgcctgcgatgtggtctctgcacatagtactaatgaggtgctccttcagattgaccaagtccttggccacaggtccctggtcacttatactcattctcttttctgtacaatatgtatatgggagtggaaagaaatacattggtccttgtggaggaagagattgctctgtttgccactgtgttcctgaaaaggggtctcggggtccaccaggaccaccagggccacagggtccaattggacccctgggagccccaggacccattgggctttcaggagagaaaggaatgagaggggaccgcggccctcctggagcagcaggggacaaaggagataagggtccaactggtgttcctggatttccaggtttagatggcatacctgggcacccagggcctcctggacccagaggcaaacctggtatgagtggccacaatggctcaagaggtgacccagggtttccaggaggaagaggagctcttggcccaggaggccccctaggccatcctggggaaaagggagaaaaaggaaattcagtgttcattttaggtgccgttaaaggtattcagggagacagaggggacccaggactgcctggcttaccaggatcttggggtgcaggaggaccggcaggtcccacaggatatcctggagagccagggttagtgggacctccgggccaaccagggcgtccaggtttgaagggaaatcccggtgtgggagtaaaggggcaaatgggagacccgggtgaggttggtcagcaaggttctcctggacccaccctgttggtagagccacctgacttttgtctctataaaggagaaaagggtataaaaggaattcctggaatggttggactgccaggaccaccaggacgcaagggagaatctggtattggggcaaaaggagaaaaaggtattcctggatttccagggcctcggggggatcctggttcctatggatctccaggttttccaggattaaagggagaactaggactggttggagatcctgggctatttggattaattggcccaaagggggatcctggaaatcgagggcacccaggaccaccaggtgttttggtgactccacctcttccactcaaaggcccaccaggggacccagggttccctggccgctatggagaaacaggggatgttggaccacctggtcccccaggtctcttgggcagaccaggggaagcctgtgcaggcatgataggaccccctgggccacaaggatttcctggtcttcctgggcttccaggagaagctggtattcctgggagacctgattctgctccaggaaaaccagggaagccaggatcacctggcttgcctggagcaccaggcctgcagggcctcccaggatcaagtgtgatatactgtagtgttgggaaccccggaccacaaggaataaaaggcaaagttggtcccccaggaggaagaggcccaaaaggagaaaaaggaaatgaaggactctgtgcctgtgagcctggacccatgggcccccctggccctccaggacttcctgggaggcaggggagtaagggagacttggggctccctggctggcttggaacaaaaggtgacccaggacctcctggtgctgaaggacctccagggctaccaggaaagcatggtgcctctggaccacctggcaacaaaggggcgaagggtgacatggttgtatcaagagttaaagggcacaaaggagaaagaggtcctgatgggcccccaggatttccagggcagccaggatcacatggtcgggatggacatgctggagaaaaaggggatccaggacctccaggggatcatgaagatgcgaccccaggtggtaaaggatttcctggacctctgggccccccaggcaaagcaggacctgtggggcccccaggactgggatttcctggtccaccaggagagcgaggccacccaggagttccaggccacccaggtgtgaggggccctgatggcttgaagggtcagaaaggtgacacaatttcttgcaacgtaacctaccctgggaggcatggccctccaggttttgatggacctccaggtccgaagggatttccaggtccccaaggtgcccctgggctgagtggttcagatgggcataaaggcagacctggcacaccaggaacagcggaaataccaggtccacctggttttcgtggtgacatgggagatccgggttttggaggtgaaaaggggtcctcccctgttgggcccccaggccctcccggctcaccaggagtgaatggtcagaaaggaatcccgggagaccctgcatttggtcacctgggacccccgggaaagaggggtctttcaggagtgccagggataaaaggacccagaggtgatccgggatgtccaggggctgaagggccagctggcattcctggattcctaggtctcaaaggtcccaaaggcagagagggacatgctgggtttccaggtgtcccaggtccacctggccattcctgtgaaagaggtgctccagggataccagggcaaccgggactccctgggtatccaggtagcccaggtgctccaggtgggaaaggacagccgggagatgtggggcctcccgggccagctggaatgaaaggcctccccggactcccaggacggcctggggcacatggtcccccaggcctcccaggaatcccaggtccctttggagatgatgggctacctggtcctccaggtccaaagggaccccgggggctgcctggtttcccaggttttcccggagaaagaggaaagcctggtgcagagggatgtcctggcgcaaagggagaacctggagagaagggcatgtctggccttcctggagaccggggactgagaggggccaaaggagccataggacctcccggagatgaaggagaaatggctatcatttcacaaaagggaacacctggggaacctggacctcctggagatgatggattcccaggagaaagaggtgataaaggaactcccgggatgcaagggagaagaggagagccgggaagatacggaccacctggatttcacagaggggaacctggtgagaaaggtcagccagggcctcctggacccccaggccctccaggctcaactggtctaagagggttcattggttttccaggacttccaggtgaccagggtgagccaggttctccaggtccccctggattttcaggaattgatggagcaagaggacctaaaggaaacaaaggtgaccctgccagtcactttggtccacctggtccaaagggtgagccaggtagccctggatgtccagggcattttggagcatccggagagcagggcttgcctggtattcaagggcccagaggatcacctggaaggccagggccacctggctcctctggaccaccagggtgcccaggtgatcacgggatgcctgggctgaggggacagccaggagaaatgggagaccctgggccaagaggcctccagggggatccagggataccaggtcctccgggaataaaaggtccctccggatcacctggcctgaacggcttgcatggattgaaaggtcagaaaggaactaaaggtgcttcaggtttgcatgatgtggggccacctggtccagtgggaatacctgggctaaaaggggagagaggagaccctgggagcccaggaatctctcctccaggtcctcgtggaaagaaaggtcccccaggacccccagggagttcaggaccacctggtcctgcaggtgccacaggaagagctcctaaggacattcctgacccgggtccacctggagatcagggacctcctggtcctgatggcccaagaggagcacctgggcctccaggcctccctgggagtgttgaccttctgagaggggagccaggtgactgtggtctaccagggccaccaggtccccctggcccaccaggccctccaggatacaaaggctttccaggatgtgatggaaaagatggccagaaaggaccagtgggattcccgggaccgcagggaccacatggatttcctgggccacctggagagaagggtttacctggacctccagggagaaaagggcccactggtcttccgggtcccagaggtgaaccggggccacctgcagatgtggatgactgtccccgaatcccaggccttcctggggcgccaggcatgagaggaccagaaggagccatggggctccctggaatgagaggcccctcaggaccagggtgcaaaggagagcctgggctggatggcaggaggggtgtggatggcgtccctgggtctcctgggcctcccggacgtaaaggtgacacaggagaagacggctaccctggaggaccagggcctcctggtcccattggggatcctgggcccaaagggtttggccctggatacctcggtggcttcctcctggttctccacagtcagacggaccaggagcccacctgccccctgggcatgcccaggctctggactgggtatagtctgttatacctggaagggcaagagaaagctcacaatcaagaccttggtctggcagggtcttgccttcccgtatttagcacgctgccctttgcctactgcaacatccaccaggtgtgccactatgcccagagaaacgacagatcctactggctggccagcgctgcgcccctccccatgatgccactctctgaagaggcgatccgcccctatgtcagccgctgtgcggtatgcgaggccccggcccaggcggtggcggtgcacagccaggaccagtccatccccccatgtccgcagacctggaggagcctctggatcgggtattcattcctgatgcacacaggagctggggaccaaggaggagggcaggcccttatgtcacctggcagctgcctggaagatttcagagcagcaccattccttgaatgccagggccggcagggaacttgccactttttcgcaaataagtatagcttctggctcacaacggtgaaagcagacttgcagttttcctctgctccagcaccagacaccttaaaagaaagccaggcccaacgccagaaaatcagccggtgccaggtctgcgtgaagtatagctagagaatgcgaaattcaccaacacgtggccaagagaaacttcctagggggctaagacttcctagactgtgctaagagatgtcatggtgctcattttggactccctttcagtggttccttctgttttgtcgtggttattcccagagtcctctggttccttacacattaagcaaatgctgcacagatggatttgtttggacctcccaatctagggagcctagatactcttattttactgaggatgatcgaagaactggctttacttaaaaatatgctaattctcagaaaggcaagtagatgataaaggccagattacaaattacattactgaaaacttcattcttgggttaacagtatctcaaacaattgaagtcaattactctataatacagtgggcttctggatggattttataggaaaaaataaacaggtcaatgaatgaaactagaaagcagagattttcaacatttcaaaatgatttcctctgtaatctatttttccatatactttaaataatggtaaaaccatgacgcaaagagagatttttttttaaagaagaaaaaaaaaaattcacactgccagcgttaacagttcctttcaaaggagaatgaatcatgatggcaggaaggcccacagtcgccgtattccagagatgcgacattagcataaacacatcacagatgaatataaaacattatgttctcttctgcatttttcagagaatagaaatgcctactttggcaacccttttgaaaagtagcaattatggaaaaaaaatattcaataagagattaggagcctaaaagctattagtgaatattaaggtagttattcacaaaaattgactccccattgcagtgaacttccagacagactgcttttccccagtcggggtccggcgtgtcacaggtgcgtgcgtgctaatgggactgacgctacatggggctcactcaggcaggcacgcgcttcatacaaagcatctcactcccctccccaggagagcctgcacagcttcttgcactcacaacggacactttgctccacacacataatggcagctcacacagggacgtgacagagctatcattatgcacttgggagaaaattaagggccgatttaattaaacttaggtaagaagattcatttaagtcagggttaccccatcaggaggacatggcactatctttaaacgaaacaaagacaatttataatttgaattttatgctcccgtggttggctgttacaggagcatcccattttgccaattttaaagacattcttatatttcatatcagtcttgtaccaaggcaacagtttgacatttggcattagtattttctaaaaaagtttagaatgtgtgtcaatttataatgattatttttttctgtaaagcaaaagatccctttttctgttttgctaggaatttggtgatctaatcctaaatttaaaagatttgttggaaaaaatttttaggaaactcaccttcctcatctaaaagaaaaaggcattttagagaaaactaaagaaatttctcatgagcgtgacactcattttagtgctttgtttccgtgcacttaaaaataattgagaagaaaaactcaattaaaattttgtttataagaaatgttttccttgccaaaccttgatttgtaatgagctcttatatgcagaacacatttcaaatgagttttgctatgggctgcccccagggtggcaatttattttaagagtattttctggtaaaaagaaaaatgtgtattttaagatgaaatattttcttgatgtagcagaatatttcctagttcatttgacccatttgatattttttaaaccatgctctggcatgttgaatatttttgtgcacctaaaacttaagccaatttcaatcttatttgtgattacctttctccttcccaaaaagctttatctattaccaaaagtcaaccctcctaaaagttcaacctgttcatcttgaacttggcctgagaacattttctgggaagaggtaagggtgacaaatggaacatcagaaacgtatcttgcttgctaattattttaaacactttaatgttggtattagaatattatcttcataagttaataaataagtaaaaaaaaaaaacccacacaaagacaggctaaattatgtagacagtttactccacagtgagcttgggaaggtatcagactgttcaaaatgttagtattacaagagctgtctctaaatgcagcattaacactgccctctaattttacaaaagtattttaaaggatcaaaagggcggaaaaataacttcttggaatagaagatcctgttaccttaaaccattattttcttcacctggttatatatcaatgtgccttcaattaccctttctctgtggaggtgatgaacaaagcttttaagttgttctcctaacccattattggagatgatccttatcaaacccttctctccctgcctccccaccaaccttgtagactggaacgtgcctagattgccctaatgggaactgttctgttctgtgcccgtgctggaaatctgggatgcttccttctgggttctgattctcagtgagtggagcccattcatccaggcaggtttccatgctatgagtggccctttcgttctgctctcacactccccacattgaaagctgagtcatcgctgctttggatggctacctcctctttagccccgtgcccgtctcacacagcctttgttttccacctccacccttgcagtaggcatctcccagttggtgccttagtttcaaatcccagttgccatctaagatccacccaaacttgattttgtcaccctctggattagaatccttctgtgactccgctgcccatgaagtccaaatgacttcctatggggtgaaaggtccagtggggactgttcgagggttccctctaggagtatttcctgtcatgatgaactgtgtgcagctctgcagacactcccagcacctcttcgactttgctcctgcttcaccagtgatgtcctccctggggtcagtttaccctgcgtgggaggtgaattccctgggggaaacttaggctcccttctgctgctcttgtgcagtgcacggggctgtcctcattttctccgttccccattgcttctttaatgtctcagtgcacttccttcattccattgccaaaatgcaagccccttgagggcagggaccatgcttgactcgtttttgtatgcctaatgcctagcacagagttgaacacattactgccaattcatttttttcaatgacaattccataaacatcattaggcattaggtgttcagctctgcatataaggtcttcatcagcaagacggttacaagtataaaccatttcctatttcagaatattttaatattcaacatatttgtatacccacattctcttgttacaattattgccagaaagccaattgataagctttcaaaatgggcttatcacacccctccaaaaatagatttttgttttttctataaacagaaatttcagaaatgagatttgagagatccgactgagaagacccttcagtaaaatgtgacatgacttaccttatgctgtaatctgtattccctcaggatttaagagcttcctagcataaaatctttgctaaacgtttgtgtacatgttattggtgctccgaaaaatagtcaatggaatggtgcactacaattgggctttatcatcttattttgaacctcgtgtagattacagtaaagcaaaccattcagtgtgttccaggaaattatattagatctgtgtttctatcagctcactggaataatctgataattgttacttttacttggtatggctgcaagaatagtggaaagaagaggacttgagagttggtcgaacccaggtttgaaatctggcttagtcatttttcagctgttatcctgggtgagttttgccaactttcttagcttcatttccctcattaatacggtgggacataacagctactcttgcattgaaaattaagttagattacctgtctagcatacccatcatcatacacttactatggtcacattttgtatttaaaataaactaatacgaaaaatatttctttttttttacacagaattatgattctcacagggtatataaattactgattagaattatttatatgtggccaattcttaatgtcattgggaatgctgtttcatttcaatcctcaaagttactgtagcacagaaaatatcacaatttcctgcagggacattatcagtaagttctgcagggaacaaacaattgacattaaaaatcagtactctgcaattgtcactgttatcatctgctagaaactctgcataatgcattttaaaccaccaaggctggctgccacatccatgtgaaatgcttgaattttatggtgcttaaatatttaatgattcatgggaaaaatgtgaaatgtgtctaataaattgcatccctttctctaacctctggttgtaaagttaaagactttcagcatgtaacttttgcaagatgcctggtctgccattggcacttaaatatttgttgtattacgatttataatatggttcattatatataaaattctgtgatgacttccaaaaacaa

SEQ ID NO: 299463 - DNA, 5064 bp, Artificial Sequence
  derived and/or modified sequence
atgtggagcctgcacatcgtgctgatgcgctgcagcttccggctgaccaagagcctggccaccggcccctggagcctcatcctgatcctcttctctgtgcagtatgtgtatggcagcggcaagaagtacatcggcccctgtggcggccgggactgcagcgtgtgccactgtgtgcctgagaagggcagccggggccccccaggccccccaggcccccagggccccatcggccccctgggcgcccctggccccatcggcctgagcggggagaagggcatgagaggagaccggggccccccaggagctgctggggacaagggggacaagggccccaccggggtgcccggcttccctggcctggatggcatccctggccaccctggccccccaggcccccggggcaagccaggcatgagcggccacaacggcagcagaggagaccccggcttccctgggggccgcggggccctgggccctgggggccccctgggccaccctggagagaagggggagaagggcaacagcgtcttcatcctgggcgctgtgaagggcatccagggcgacagaggagaccccggcctgcccggcctgcccggctcctggggcgccggcggccctgctggccccaccggctacccaggagagcccggcctggtgggccccccaggccagcccggccggcccggcctgaagggcaaccctggggtgggcgtgaagggccagatgggagaccctggagaggtgggccagcagggcagccctggccccaccctgctggtggagcccccagacttctgcctgtacaagggggagaagggcatcaagggcatccctggcatggtgggcctgcccggccccccaggcaggaagggggagagcggcattggagccaagggggagaagggcatccctggcttccctggccccaggggggaccccggcagctatggcagccctggcttccctggcctgaagggggagctgggcctggtgggggaccccggcctgtttggcctcatcggccccaagggggaccccggcaacagaggccaccctggccccccaggagtgctggtgaccccacccctgcccctgaagggccccccaggggaccccggcttccctggccgctacggggagactggagatgtgggccccccaggccccccaggcctgctgggccggcctggagaggcctgtgccggcatgattggccccccaggcccccagggcttccctggcctgcccggcctgcctggagaggccggcatccctggccgcccagacagcgcccctgggaagccaggcaagccaggcagccctggcctgcccggggcccctggcctgcagggcctgcccggcagcagcgtcatctactgcagcgtgggcaaccctggcccccagggcatcaagggcaaggtgggccccccaggcggccggggccccaagggggagaagggaaatgaaggcctgtgtgcctgtgagcccggccccatgggccccccaggccccccaggcctgcccggccggcagggcagcaagggggacctgggcctgcccggctggctgggcaccaagggggaccccggccccccaggagctgagggccccccaggcctgcccgggaagcacggggccagcggccccccaggcaacaagggggccaagggggacatggtggtgtcccgggtgaagggccacaagggggagcggggcccagatggccccccaggcttccctggccagcccggcagccacggcagagatggccacgccggggagaagggggaccccggccccccaggggaccatgaagatgccaccccaggcggcaagggcttccctggccccctgggccccccaggcaaggccggccctgtgggccccccaggcctgggcttccctggccccccaggagagcggggccaccctggggtgcccggccaccctggggtgcggggcccagatggcctgaagggccagaagggggacaccatcagctgcaatgtgacctacccaggccgccacggccccccaggctttgatggccccccaggccccaagggcttccctggcccccagggcgcccctggcctgagcggcagtgatggccacaagggccggcccggcaccccaggcacagctgagatccctggccccccaggcttccggggggacatgggagaccccggctttggaggagagaagggcagcagccctgtgggccccccaggccccccaggcagccctggggtgaatggccagaagggcatccctggggaccctgccttcggccacctgggccccccaggcaagaggggcctgagcggcgtgcccggcatcaagggccccaggggggaccccggctgccctggagctgagggccctgctggcatccctggcttcctgggcctgaagggccccaagggccgggagggccatgctggcttccctggggtgcccggccccccaggccacagctgtgagcggggggcccctggcatccctggccagcccggcctgcccggctacccaggcagccctggggcccctgggggcaagggccagcctggagatgtgggccccccaggccctgctggcatgaagggcctgcccggcctgcccggccggcctggggcccacggccccccaggcctgcccggcatccctggcccctttggagatgatggcctgcccggccccccaggccccaagggcccccggggcctgcccggcttccctggcttccctggagagcggggcaagccaggagctgagggctgccctggggccaagggggagcctggagagaagggcatgagcggcctgcccggggaccggggcctgcggggggccaagggggccatcggccccccaggagatgaaggagagatggccatcatcagccagaagggcaccccaggagagcccggccccccaggagatgatggcttccctggagagcggggggacaagggcaccccaggcatgcagggccggcggggggagcccggccgctatggccccccaggcttccacagaggagagcctggagagaagggccagcccggccccccaggccccccaggccccccaggcagcacaggcctgcggggcttcatcggcttccctggcctgcccggggaccagggcgagcccggcagccctggccccccaggcttcagcggcattgatggagcccggggccccaagggcaacaagggggaccctgccagccactttggacctcctggccccaagggggagcccggcagccctggctgccccggccactttggagccagcggggagcagggcctgcccggcatccagggcccccggggcagccctggccggcccggccccccaggcagcagcggccccccaggctgccctggggaccacggcatgcctggcctgcggggccagcccggggagatgggagaccccggcccccggggcctgcagggcgaccccggcatccctggccccccaggcatcaagggccccagcggcagccctggcctgaatggcctgcacggcctgaagggccagaagggcaccaagggggccagcggcctgcatgatgtgggccccccaggccctgtgggcatccctggcctgaagggggagcggggggaccccggcagccctggcatcagccccccaggcccccggggcaagaagggccccccaggccccccaggcagcagcggccccccaggccctgctggggccaccggccgggcccccaaggacatcccagaccccggccccccaggggaccagggccccccaggcccagatggccccaggggggcccctggccccccaggcctgcccggctctgtggacctgctgcggggggagcccggggactgtggcctgcccggccccccaggccccccaggccccccaggccccccaggctacaagggcttccctggctgtgatggcaaggatggccagaagggccctgtgggcttccctggcccccagggcccccacggcttccctggccccccaggagagaagggcctgcccggccccccaggcaggaagggccccaccggcctgcccggggagcccggccccccagcagatgtggatgactgcccccgcatccctggcctgcccggggcccctggcatgaggggccctgagggcgccatgggcctgcccggcatgaggggccccagcggccctggctgcaagggggagcccggcctggatggaagaagaggagtggatggagtgcccggcagccctggccccccaggcaggaaaggagacaccggggaggatggctacccaggcggccctggccccccaggccccatcggggaccccggccccaagggctttggacctggctacctgggcggcttcctgctggtgctgcacagccagacagaccaggagcccacctgccccctgggcatgccccggctgtggacaggctacagcctgctgtacctggagggccaggagaaggcccacaaccaggacctgggcctggccggcagctgcctgcccgtcttcagcaccctgccctttgcctactgcaacatccaccaggtgtgccactacgcccagagaaatgacaggagctactggctggccagcgctgcccccctgcccatgatgcccctgtctgaggaggccatccggccctacgtgagccgctgtgctgtgtgtgaggccccagcccaggccgtggccgtgcacagccaggaccagagcatccccccctgcccccagacctggaggagcctgtggattggctacagcttcctgatgcacactggagctggggaccagggcggcggccaggccctgatgagccctggcagctgcctggaggacttccgggccgcccccttcctggagtgccagggccggcagggcacctgccacttctttgccaacaagtacagcttctggctgaccaccgtgaaggctgacctgcagttcagcagcgccccagccccagacaccctgaaggagagccaggcccagaggcagaagatcagccgctgccaggtgtgtgtgaagtacagctag

SEQ ID NO: 299464 - DNA, 5073 bp, Artificial Sequence
  derived and/or modified sequence
atgtggagcctgcacatcgtgctgatgcgctgcagcttccggctgaccaagagcctggccaccggcccctggagcctcatcctgatcctcttctctgtgcagtatgtgtatggcagcggcaagaagtacatcggcccctgtggcggccgggactgcagcgtgtgccactgtgtgcctgagaagggcagccggggccccccaggccccccaggcccccagggccccatcggccccctgggcgcccctggccccatcggcctgagcggggagaagggcatgagaggagaccggggccccccaggagctgctggggacaagggggacaagggccccaccggggtgcccggcttccctggcctggatggcatccctggccaccctggccccccaggcccccggggcaagccaggcatgagcggccacaacggcagcagaggagaccccggcttccctgggggccgcggggccctgggccctgggggccccctgggccaccctggagagaagggggagaagggcaacagcgtcttcatcctgggcgctgtgaagggcatccagggcgacagaggagaccccggcctgcccggcctgcccggctcctggggcgccggcggccctgctggccccaccggctacccaggagagcccggcctggtgggccccccaggccagcccggccggcccggcctgaagggcaaccctggggtgggcgtgaagggccagatgggagaccctggagaggtgggccagcagggcagccctggccccaccctgctggtggagcccccagacttctgcctgtacaagggggagaagggcatcaagggcatccctggcatggtgggcctgcccggccccccaggcaggaagggggagagcggcattggagccaagggggagaagggcatccctggcttccctggccccaggggggaccccggcagctatggcagccctggcttccctggcctgaagggggagctgggcctggtgggggaccccggcctgtttggcctcatcggccccaagggggaccccggcaacagaggccaccctggccccccaggagtgctggtgaccccacccctgcccctgaagggccccccaggggaccccggcttccctggccgctacggggagactggagatgtgggccccccaggccccccaggcctgctgggccggcctggagaggcctgtgccggcatgattggccccccaggcccccagggcttccctggcctgcccggcctgcctggagaggccggcatccctggccgcccagacagcgcccctgggaagccaggcaagccaggcagccctggcctgcccggggcccctggcctgcagggcctgcccggcagcagcgtcatctactgcagcgtgggcaaccctggcccccagggcatcaagggcaaggtgggccccccaggcggccggggccccaagggggagaagggaaatgaaggcctgtgtgcctgtgagcccggccccatgggccccccaggccccccaggcctgcccggccggcagggcagcaagggggacctgggcctgcccggctggctgggcaccaagggggaccccggccccccaggagctgagggccccccaggcctgcccgggaagcacggggccagcggccccccaggcaacaagggggccaagggggacatggtggtgtcccgggtgaagggccacaagggggagcggggcccagatggccccccaggcttccctggccagcccggcagccacggcagagatggccacgccggggagaagggggaccccggccccccaggggaccatgaagatgccaccccaggcggcaagggcttccctggccccctgggccccccaggcaaggccggccctgtgggccccccaggcctgggcttccctggccccccaggagagcggggccaccctggggtgcccggccaccctggggtgcggggcccagatggcctgaagggccagaagggggacaccatcagctgcaatgtgacctacccaggccgccacggccccccaggctttgatggccccccaggccccaagggcttccctggcccccagggcgcccctggcctgagcggcagtgatggccacaagggccggcccggcaccccaggcacagctgagatccctggccccccaggcttccggggggacatgggagaccccggctttggaggagagaagggcagcagccctgtgggccccccaggccccccaggcagccctggggtgaatggccagaagggcatccctggggaccctgccttcggccacctgggccccccaggcaagaggggcctgagcggcgtgcccggcatcaagggccccaggggggaccccggctgccctggagctgagggccctgctggcatccctggcttcctgggcctgaagggccccaagggccgggagggccatgctggcttccctggggtgcccggccccccaggccacagctgtgagcggggggcccctggcatccctggccagcccggcctgcccggctacccaggcagccctggggcccctgggggcaagggccagcctggagatgtgggccccccaggccctgctggcatgaagggcctgcccggcctgcccggccggcctggggcccacggccccccaggcctgcccggcatccctggcccctttggagatgatggcctgcccggccccccaggccccaagggcccccggggcctgcccggcttccctggcttccctggagagcggggcaagccaggagctgagggctgccctggggccaagggggagcctggagagaagggcatgagcggcctgcccggggaccggggcctgcggggggccaagggggccatcggccccccaggagatgaaggagagatggccatcatcagccagaagggcaccccaggagagcccggccccccaggagatgatggcttccctggagagcggggggacaagggcaccccaggcatgcagggccggcggggggagcccggccgctatggccccccaggcttccacagaggagagcctggagagaagggccagcccggccccccaggccccccaggccccccaggcagcacaggcctgcggggcttcatcggcttccctggcctgcccggggaccagggcgagcccggcagccctggccccccaggcttcagcggcattgatggagcccggggccccaagggcaacaagggggaccctgccagccactttggacctcctggccccaagggggagcccggcagccctggctgccccggccactttggagccagcggggagcagggcctgcccggcatccagggcccccggggcagccctggccggcccggccccccaggcagcagcggccccccaggctgccctggggaccacggcatgcctggcctgcggggccagcccggggagatgggagaccccggcccccggggcctgcagggcgaccccggcatccctggccccccaggcatcaagggccccagcggcagccctggcctgaatggcctgcacggcctgaagggccagaagggcaccaagggggccagcggcctgcatgatgtgggccccccaggccctgtgggcatccctggcctgaagggggagcggggggaccccggcagccctggcatcagccccccaggcccccggggcaagaagggccccccaggccccccaggcagcagcggccccccaggccctgctggggccaccggccgggcccccaaggacatcccagaccccggccccccaggggaccagggccccccaggcccagatggccccaggggggcccctggccccccaggcctgcccggctctgtggacctgctgcggggggagcccggggactgtggcctgcccggccccccaggccccccaggccccccaggccccccaggctacaagggcttccctggctgtgatggcaaggatggccagaagggccctgtgggcttccctggcccccagggcccccacggcttccctggccccccaggagagaagggcctgcccggccccccaggcaggaagggccccaccggcctgcccggccccagaggagagcccggccccccagcagatgtggatgactgcccccgcatccctggcctgcccggggcccctggcatgaggggccctgagggcgccatgggcctgcccggcatgaggggccccagcggccctggctgcaagggggagcccggcctggatggccggcggggcgtggatggagtgcccggcagccctggccccccaggcaggaagggggacacaggagaagatggctacccaggcggccctggccccccaggccccatcggggaccccggccccaagggcttcggccctggctacctgggcggcttcctgctggtgctgcacagccagacagaccaggagcccacctgccccctgggcatgccccggctgtggacaggctacagcctgctgtacctggagggccaggagaaggcccacaaccaggacctgggcctggccggcagctgcctgcctgtgttcagcaccctgccctttgcctactgcaacatccaccaggtgtgccactacgcccagagaaatgacaggagctactggctggccagcgctgcccccctgcccatgatgcccctgtctgaggaggccatccggccctacgtgagccgctgtgctgtgtgtgaggccccagcccaggccgtggccgtgcacagccaggaccagagcatccccccctgcccccagacctggaggagcctgtggattggctacagcttcctgatgcacactggagctggggaccagggcggcggccaggccctgatgagccctggcagctgcctggaggacttccgggccgcccccttcctggagtgccagggccggcagggcacctgccacttctttgccaacaagtacagcttctggctgaccaccgtgaaggctgacctgcagttcagcagcgccccagccccagacaccctgaaggagagccaggcccagaggcagaagatcagccgctgccaggtgtgtgtgaagtacagctag

SEQ ID NO: 299465 - DNA, 5064 bp, Artificial Sequence
  derived and/or modified sequence
atgtggagcctgcacatcgtgctgatgcggtgcagcttccggctgaccaagagcctggcgaccggtccctggtccttgattcttatcctgttctctgtacagtacgtgtatgggtcggggaagaagtacattggaccatgcggaggaagggattgcagcgtatgtcactgtgtgccagagaagggcagccgcggcccaccaggtcccccaggtccacagggaccgatcgggcctttaggagctcccggccccatcggcttgagcggggaaaaaggtatgcgcggggacaggggacctccaggcgccgcaggcgacaagggagataaaggaccgaccggcgtgcccggtttccccggattggatgggattccgggccaccctggaccgcctggtcccaggggcaaacctggcatgtctggacacaatggctctagaggtgatcccggcttccccggtggaagaggagcgctcggtccaggcgggcccctgggccaccctggagaaaagggtgagaagggcaatagcgttttcatcctgggcgccgtgaagggtatccagggtgatcggggggaccctggtctgccgggtctcccaggaagctggggagctggaggaccggccgggcctaccggctatcccggcgagccgggtctggtgggaccaccaggtcagcctggccgcccaggcctgaagggcaaccctggcgtgggagtcaagggccagatgggcgaccctggcgaggtcggccagcaggggagccctggcccaacacttctcgttgagccgcctgacttttgcctgtacaagggagaaaaggggataaaagggattcccggcatggtgggcctccccgggcccccgggccgcaagggggaatccgggatcggggcgaagggcgagaaggggattccaggtttccccggcccacggggtgaccccggttcctacggctcccctggttttccaggtctgaagggagagctgggcctggtaggcgatccaggactcttcggcctgatcggccccaaaggcgacccagggaaccggggtcatcccgggccccctggtgtcttggtcacccccccattgccgctgaaaggcccccccggagatcctggcttccctgggcggtacggcgagacaggtgatgtaggtcctccgggaccaccaggcctgttggggaggcctggagaggcatgcgcaggtatgattggcccacccggaccgcaagggtttcctggactccccggcctgccgggcgaagccggcataccaggcaggccagactccgcacccgggaagcctggtaaacctgggagcccaggcttaccaggggcgccgggactgcagggtttacccggtagcagcgtaatatattgtagtgtggggaaccctgggccgcaaggcatcaaaggcaaagtgggccccccgggcggaagaggtcccaagggcgaaaaagggaatgaaggcctgtgtgcatgtgaacccggacctatgggcccccccggtccccctggactgcccggacggcaagggtcaaaaggtgatctcgggctgccaggatggcttggtacaaagggggaccccggaccccccggcgccgaaggacccccaggattgcctgggaaacacggagcatccggtccgcccgggaacaagggcgcgaaaggtgatatggtagtatcaagagtgaagggacacaaaggggaacggggaccggacgggcctccaggctttcctggccagccagggagccatgggagggacggtcatgccggggaaaaaggcgatcccggcccccccggcgaccatgaggacgcaactccaggaggaaaggggtttccaggtcctcttggcccccccggcaaagcagggcccgttggcccacctggcctgggatttcctggccctcctggggaacgcggtcacccaggggtaccgggccacccaggcgtgagaggcccagacggcctaaaaggccagaaaggggatactatctcttgcaatgtcacatatcccggccgacacggacctcctggcttcgacggaccccctggacccaagggattccccggaccccagggcgctccaggcctaagcggctccgacggacataagggacggccaggcacccccggcacagccgaaattcctggtccgcctggtttccgcggcgatatgggagacccgggtttcggcggcgaaaagggttccagccccgtaggcccccctggccctcccggatctcccggtgtcaacggtcaaaagggaatcccaggcgatcctgccttcggccatctcggtccccctggaaagagaggactgagcggggtcccggggatcaagggccctcgcggggaccctgggtgccccggagcagaaggacctgccggaattcctgggttcttgggacttaaaggtccaaagggaagggaggggcacgctggcttcccaggagtgcctgggccaccaggtcatagctgtgaacgcggagcacccggtatccctgggcagcccggcctccctggttatccaggatcccccggagctcccgggggaaaaggacagccgggagatgtcggcccaccagggcctgctggcatgaagggattgcctggtctgcccgggcgtcccggggcgcatggtcctcccggcctgccagggatccccgggccattcggagacgacggcctcccaggccctccgggccccaaaggacctcggggcttgcccggattccccgggttcccgggggagcgtggaaagccgggtgccgaggggtgcccaggcgctaagggagagcctggggagaaaggcatgtcaggcttgcctggggaccggggactccgcggagcaaagggcgcaatcggtcctcctggggacgagggagaaatggccattattagccagaaaggtacaccaggcgagcctggaccccccggagatgacggatttcccggcgaacgcggtgacaaaggcacaccaggcatgcagggtagacgcggggagcccggccgctacgggccaccaggtttccatcgtggcgagccaggcgagaagggacagcctggcccccccgggcccccggggcctccaggctctacaggcctccgcggtttcatcggttttcccggcttgcccggggatcagggtgagcctggctctcccggcccccccgggttttccggaatcgacggtgcccgtggccccaaaggtaacaagggagatccagcctcgcactttgggcccccagggcccaaaggtgagcctgggtcgcccggctgcccaggccacttcggagcgtccggggaacagggattaccaggcatccagggcccacgaggtagccctggacggccaggcccacccggctccagcggtcccccaggatgccccggagatcatggcatgccagggctgcgcggacagccgggggagatgggagaccccggaccccggggtctgcagggagatccgggaatcccggggcctcccggaattaagggcccaagcggaagcccggggctgaatggcttacacggacttaagggtcaaaaggggaccaagggtgcttccggcctgcacgatgtcggtccacccgggccggtgggaatcccaggacttaagggcgaacggggggacccaggtagccccggaatttcccctccaggcccacggggcaaaaagggtccccccggccccccaggaagcagtgggccccccgggcctgctggagcaaccggtcgagcacctaaggatatcccagaccccggtcctcctggtgatcagggacctcccgggccagacggcccgcgcggggctccaggcccacctggcctacctgggtctgtagatctgcttagaggggaaccaggagactgcggtttgccagggccacctggaccccccggcccacccggaccccccggttacaagggctttcctggatgtgatggcaaggacgggcagaaaggtcccgtggggttcccaggacctcaggggccacacggctttcccggaccccccggcgaaaaggggttacccggaccacccgggcggaaaggccctactggtttgcccggggagcccggcccgccagccgacgtcgacgattgtcctagaatacccgggctgccgggggcccctggtatgcgcggcccggaaggcgcgatgggattacctgggatgagaggcccctccggacctgggtgtaagggtgaaccaggactggatgggcggagaggagtggacggcgtccccggctctccaggacccccaggccggaaaggcgacaccggtgaggatggctatcccggtgggccggggccaccggggcccattggtgaccccgggcctaaaggcttcggaccaggctacctcgggggttttctcctggttctccactctcagactgatcaggaacccacctgcccactcggcatgccaaggctctggacgggatatagcctattgtacctggaagggcaggagaaggcccacaaccaagacctgggtctggcggggtcttgcctcccggtttttagcacactgccttttgcctactgtaatatccaccaggtctgccattatgcacagcggaacgacagatcatactggttagcgagcgcagcccccctgcccatgatgccgctgagtgaggaggcgattaggccatacgtgagcagatgcgccgtgtgcgaggcccctgcacaagccgtggccgtgcatagtcaggaccaatcgattcccccatgcccccagacttggaggtctttatggataggatattcatttctgatgcacaccggcgccggcgatcaaggcggcggacaggcgctgatgagccctgggtcatgcctggaagatttccgggccgccccctttctggagtgccagggaagacagggaacgtgtcattttttcgccaataaatactctttttggctcacaaccgtgaaggccgatctgcagttttcaagcgcacccgcaccagacacactcaaggaatcccaggctcagcgtcaaaaaatatcccgatgccaagtatgtgtaaagtatagctag

SEQ ID NO: 299466 - DNA, 5073 bp, Artificial Sequence
  derived and/or modified sequence
atgtggagcctgcacatcgtgctgatgcggtgcagcttccggctgaccaaatccctagccactggcccatggtcgctaatcctgatactcttctctgtgcagtatgtctatggctctggcaaaaaatatattggcccctgtggagggagagattgcagcgtttgtcactgcgtgcccgaaaagggaagtagggggccacccggacctcctggtccgcagggaccaatcgggcctttgggtgcccctgggcccatcgggctttccggagagaaaggtatgcgcggggatagggggccacctggggccgcaggagacaagggtgacaaagggcccacaggagtgcctgggttccctggactggatgggatccccggacacccaggcccaccaggacctagagggaaaccaggaatgtcaggtcacaacggatcccggggggaccctggttttcccggtggccgcggcgcactcggtcccgggggacctctcggacaccccggggagaaaggagagaagggaaattctgtctttatcctgggggccgtgaagggtatccagggggatcgcggggaccccggactgccaggacttcccgggtcctggggggcaggcggccctgccgggcccactggttatcccggcgagccagggctggtgggacccccgggccagccgggcaggccaggactcaagggcaaccccggagtgggagtgaagggccagatgggggatccaggggaagtggggcaacagggctcccccggtcccaccctactcgtggaaccccctgatttttgcctgtacaagggggaaaaggggatcaaaggaatcccaggaatggtcgggttacctgggccaccaggacgcaaaggcgaaagcgggattggcgccaaaggagagaaggggatccctggctttccaggtccacgaggagacccaggcagctacggatcgccgggtttccccgggctgaagggcgagcttggacttgtgggggatcccgggctgtttggacttattggccctaagggagaccccgggaatcggggacaccccggtccacctggtgttcttgtcacccctccccttcccctgaaggggccacccggagaccccggtttcccgggaaggtatggtgaaacaggggatgtggggccacccggtccgccaggtctactagggcgtcccggtgaggcctgcgccgggatgatcgggccacccggtccgcaggggtttcctggactgccgggactcccaggagaagccggcattccaggtcgcccggactctgcccccgggaagcccgggaagcccggcagccctgggttgccgggagctccaggcttgcaaggattgccagggtcctcagtcatctactgttctgttggtaatcccggcccccaagggattaagggcaaagtgggcccacccggcgggcgcggtcctaagggcgaaaaggggaacgagggtctgtgtgcttgcgagccgggccctatgggaccgccaggcccgcccggactgccaggcagacagggtagcaagggcgacctcggactgcctgggtggttgggtaccaaaggagacccgggtccacctggggccgagggccccccaggactgcccggcaagcatggcgcaagcggacctcccggcaacaagggcgcaaagggtgacatggtggttagccgagtcaaaggtcacaaaggcgagcgcggcccggacggcccccccgggttccctggacaacctgggtctcacggtagagacggccatgctggcgagaaaggcgaccctggcccccccggagatcacgaggacgcaacacccggagggaaaggattcccaggaccacttggcccacccggcaaggcaggaccagtcgggccgcctgggctgggcttcccaggccctccaggtgaaaggggccatcccggtgtgccaggtcatccgggggtgaggggaccagacggtctgaaggggcaaaaaggagacacaattagttgtaatgtaacataccctggacggcacggaccacccggcttcgacggccccccagggcctaagggatttccgggtccacagggggcccccggactgtctggctctgacggtcataagggacgccctgggacccctggcacagcagaaattcccggacctcctggttttcgcggcgacatgggcgatccgggattcggcggggaaaaaggatcgtctcctgttgggccccctgggcctcccggtagtccaggggtcaatgggcagaaggggatccctggtgatcctgcattcgggcacctcggaccaccaggaaaacgcgggctctccggcgtccccggcattaagggtcccaggggcgacccggggtgtccaggtgcagagggacccgcaggaattcccggtttccttggcctgaaaggccccaaaggacgggaagggcatgccggcttcccaggcgtgccaggccctcccggacactcctgcgagagaggagcgcccggaatccccggccagcctggactaccaggataccctggcagccccggcgccccaggtggaaagggacaacctggtgatgttgggccccctggacctgcagggatgaagggactgcctggtcttcccggtaggccaggtgcgcacgggccccccggtttgccgggcatccctggcccgttcggagacgacggcctccctggaccgcccggacccaagggccctaggggactgccaggttttcctggatttcccggagaacggggcaagcccggcgccgagggctgccctggagcaaagggggagcccggggagaaaggcatgtcgggccttcctggcgaccgtggacttcgtggagccaagggggccatcggcccacctggggatgagggcgaaatggccatcatcagccagaaaggcacaccaggcgaaccagggcccccaggggacgacggttttcctggagagcgaggtgataagggcacccccggcatgcagggacgtcggggggaaccagggcggtatggaccccccggatttcaccggggggagcctggagaaaaaggccaaccaggaccccccggaccccccgggccccctgggagtacaggcttacgcggctttatcggctttcctgggctaccaggtgaccagggcgagcccgggagcccaggtccacccggtttcagtgggattgatggagcccgcgggccaaaaggtaataaaggcgaccctgcctcgcatttcggcccaccaggccccaaaggggaacctgggtccccgggatgtccaggacatttcggtgcatcgggcgaacaggggctgcccggaatacagggccctcgagggagccccggccgcccaggaccccccgggtcatccggcccacccggctgcccgggcgatcatggaatgcctggccttcggggacaacccggcgagatgggcgaccctggacctaggggcctgcagggggatccaggtattccaggacctcctgggatcaaggggccaagcggctcaccagggttgaacgggctccacggtctcaaagggcagaagggaactaagggtgcctcaggattgcacgatgtggggccccccggacctgtgggaatacccggtctaaaaggcgagcgtggggatcccggcagtcccgggatctcaccacccggcccccgcggcaagaagggcccacccggccctcctggatcctccggaccccccgggcctgccggcgcaaccggaagggcccccaaagacatacccgaccctggccccccgggtgaccaagggccacctggccccgacggacccaggggggcgcctggaccccccggactaccaggatctgttgatcttctgcggggtgagcctggggactgcgggctccctggccctcccggccccccaggtccgccgggacctcccgggtataaagggttccctgggtgcgatggaaaagacggccagaagggaccagtgggcttccccggtccacagggaccgcatgggttcccaggaccccccggggagaaggggcttccaggcccccccggccgcaagggaccaacaggactgcccggaccccgaggtgagcctggtccaccggcggacgttgacgactgtccccgcatccctgggctacccggggctcctggaatgcgggggccggagggagcgatgggcttacctggtatgcgtggtcccagtggccctgggtgtaagggcgaacccggactagatggtagaagaggagtggacggggttcctggctcgcccggtcctcctgggagaaagggcgatacaggggaagacggctatcctggaggccctggacccccaggtccaatcggtgacccagggcccaaaggcttcgggcccggatatctaggcgggtttctcctggtgctgcactcccagactgaccaggagcccacttgccctcttgggatgcccaggctgtggaccgggtatagcctactgtacctggaaggccaagagaaggcacataatcaagatttgggacttgccggctcttgtctgcccgtgttctccactctccccttcgcatactgcaacattcaccaggtgtgtcactatgcacagaggaacgatcgctcttattggctggcgagcgccgcacccttgcctatgatgcccttgagcgaggaggccatcaggccatacgtgtctcggtgcgcagtttgtgaggccccggcacaggctgttgccgtgcattctcaagaccagtccattccaccttgcccccagacctggagatctctctggatcggctacagttttcttatgcacacaggcgccggggatcagggcggtggacaggccctaatgtctccagggagttgtctggaagacttccgggcggcgcccttcttggaatgccaggggcgacagggcacctgtcacttttttgctaataagtactcgttttggctcacaaccgtgaaggccgatttgcaattctctagtgccccagcccccgatacactgaaagaaagccaggcgcagcgccagaagataagtagatgccaggtgtgcgtgaagtactcatag

SEQ ID NO: 299467 - DNA, 5064 bp, Artificial Sequence
  derived and/or modified sequence
atgtggtccctgcacatcgtccttatgaggtgtagcttccggcttaccaaaagtctggcgacaggcccatggagtcttattctgatcctcttttccgtccagtatgtttatggatcaggcaagaagtatattggcccatgcggtgggagagactgttccgtgtgtcattgcgtgcccgagaagggtagcagaggtccccctggccctccgggaccgcagggcccaataggtccattaggggcacccggacctattggactgtcaggagagaagggcatgcgcggagaccgcggacctccaggagcagcaggcgacaaaggtgacaaagggcctaccggcgtacccggtttccccggactggacggcatccccggacatcccggtccaccaggcccaagaggaaaaccagggatgtcaggacacaacggcagtaggggtgatcctggtttccctggcggacggggagcgctgggcccagggggaccgctcgggcaccctggggagaaaggcgaaaagggaaactcagtgtttattcttggagctgtaaaaggtattcagggcgatcgtggggaccctggcctacccggtctcccgggatcttggggggcaggcggtcctgccggtccaactggatatccgggtgaaccgggtcttgtagggcctcccggacaacccggaaggcctggactgaaagggaacccgggtgtcggagtcaaaggccagatgggggatcccggtgaggtaggacagcagggttcccctggacccacccttctggttgaaccacctgacttctgtctctataagggagagaagggcataaaaggcatccctgggatggttgggctgcccggaccgcctggtaggaaaggggagtcaggtattggcgctaagggtgagaagggtatcccgggtttccctggtcctcggggagaccccggatcctatggctcaccaggcttcccaggcttgaaaggagagttgggtctggtgggcgaccccggactgttcggtctgatcgggccaaagggcgatccgggtaataggggccacccaggaccgccaggtgtgttggtgaccccacccctgcccctgaaaggcccacccggagatccagggttccccggacgctacggggagaccggagacgtagggccacctggcccacctgggctgctcggcagaccgggagaagcttgcgcagggatgataggtccacccggaccacagggctttcccggattacccggtctgccaggggaagccggaatccctgggagacccgattctgcacctggaaaacccggtaaacccggatcgcccggtttgcccggtgcccctggacttcaggggttgcccggttccagcgtgatctactgctctgtaggtaatcccggaccccaaggaatcaaaggaaaagtcggtcctccgggaggaagaggaccaaagggcgagaagggtaacgagggcctgtgcgcttgtgagcccggacccatgggccctcccggtcccccagggctacccggaaggcagggatcaaagggagatcttgggctgccaggctggctggggacaaaaggggatccaggaccacctggggcagaaggcccacctggcttgcccggaaaacacggtgccagcgggcctcctggtaacaagggagcaaagggcgacatggtcgtgagccgcgtcaaagggcacaagggcgaacggggaccggacggccctcccggattccctggccagcccggtagtcacggacgcgacgggcatgctggcgagaagggagaccccggtccacccggagaccatgaagacgccacacccggtggtaaaggatttccaggaccactgggaccacctggcaaggcaggacctgtgggtccccctgggcttgggttccccggacctccaggtgaacggggtcatcccggtgtcccgggacatccaggagtccggggacctgatggattgaaaggacagaagggggataccatttcatgcaatgtgacatatcccggtaggcatggccctccgggatttgacggaccgccaggacctaagggtttcccaggcccacagggggcaccagggctcagtgggtccgatggccacaaaggacggccaggcacacctggaaccgctgagatccctggccctcctggttttaggggcgatatgggcgatccgggattcggaggtgagaaggggagctctccagtgggaccaccgggaccacctgggagccctggcgtaaatggtcagaagggtataccaggcgaccccgcatttggccatctcggaccccctggcaaaagaggattgtctggcgtccctgggattaaaggtccgaggggggaccctggttgccctggcgctgaaggtcccgctggaatacccggattcctaggtctcaaagggccaaagggaagagaggggcacgcaggctttcctggagtaccagggccaccaggacattcctgtgagcggggtgccccaggaatccctgggcaacccggtcttccaggatatccaggcagcccaggtgccccaggcggaaaagggcagcccggagacgtcggtcctccgggacccgcagggatgaagggtctccctggcctgcctggccgacctggtgctcacggcccacctggcttaccaggcataccgggaccctttggcgacgacgggttacctggtcccccaggtcctaaggggccacgtggactgccagggttcccaggcttccccggagagcgaggcaagcctggagcagaaggctgccccggtgcaaagggggaacctggcgaaaaggggatgtcaggcctacctggggatcgtgggttgaggggcgcaaagggagctattggccctcctggggatgaaggcgaaatggctataatatcccagaaggggactccaggtgaacccggtcctcccggtgatgatggtttcccgggagagaggggtgataaaggaacgccaggcatgcaaggcaggagaggagagcctggcagatatggacccccaggcttccacagaggcgagccaggggagaaaggacagcctggcccacctggccctccagggccacctggaagtaccgggctgcgaggcttcatagggtttcctgggcttccgggtgatcaaggggagccgggatcccctggacctccaggatttagcgggatcgatggagctcgtggcccaaagggaaacaaaggtgaccctgcatcgcacttcggtccacccggtcccaaaggcgagcccggaagccctggctgccccggtcattttggagccagtggcgagcagggactgccaggaattcagggacctcgcggatctcccggacgccctggaccccctggaagttcagggccaccaggatgtcctggggaccatgggatgcccggtctcaggggccagcccggagaaatgggggaccctggtcctaggggcctgcaaggagatccaggaataccaggacctccaggcatcaagggcccatccgggagtcccggtctgaacggactgcacggcctaaaggggcagaagggtacaaaaggagcctctggtctgcatgacgttggacctccagggccagttgggatccctggactcaaaggagaacggggagatcccggatcccccggaatatccccaccaggcccacgtggaaaaaagggaccaccaggtccccctggatcgagcgggccacccggaccggcaggcgctaccggtcgagctcctaaagatattcccgatccaggaccacccggtgatcaagggccacctggtcccgacggcccaagaggggcaccagggcctcctggcctacccggttctgtggatttgttgagaggagaacctggggactgcggtttacccggaccaccaggcccaccaggacctccaggaccacctggatataaaggattccctggctgtgacggcaaggatgggcagaagggcccagtggggtttcctggaccgcaagggcctcacggatttcctggaccacccggtgagaaaggactgcccggtcctccagggagaaagggcccaaccgggttacctggagaaccgggtcctccagccgatgtggatgactgcccccgaatccctggcctccccggagctcccggaatgcgcggacctgaaggcgctatggggctccctggcatgcgcggaccctctgggcctggatgcaagggcgaaccaggcttagatggacggaggggggtagatggagttccaggatcaccaggcccaccagggcgaaaaggcgataccggggaggacgggtatcccggaggtccaggacctccgggtccaattggcgaccctggaccaaaaggattcggcccaggttacctcgggggatttctgctcgtcctgcacagtcagactgatcaggaacccacttgcccactcgggatgcctaggctctggactgggtactccctcctttatttggaaggtcaggaaaaggcccacaaccaggacctgggacttgcaggttcgtgtctgccggttttctccactttgccttttgcttattgtaacatacaccaagtgtgccactacgcccaacgcaatgaccgctcctactggcttgcttccgccgctcccttacctatgatgcctctcagcgaggaagccataagaccttacgtttcgcgctgcgccgtatgcgaagcccctgcccaagcggtggcggtccattcgcaggatcagtccattcctccatgcccacaaacctggcgaagcctttggataggctatagtttcctcatgcacactggagctggcgaccaggggggtgggcaggctcttatgtcaccgggaagttgcctggaagactttcgggctgcaccatttctggagtgccagggaaggcagggtacgtgtcatttcttcgccaacaagtatagcttctggctgactacagtcaaggccgacttacagttctcttccgcaccagcgccagacaccctgaaggaaagccaagcacagcgccagaaaatatctcgatgccaagtttgtgtgaaatattcctag

SEQ ID NO: 299468 - DNA, 5072 bp, Artificial Sequence
  derived and/or modified sequence
atgtggagtctgcatatcgtgttaatgaggtgctcattcaggttaacaaaatccctggcgaccggaccctggtccctcattctgattctgttcagtgtgcagtacgtctatggttccggcaaaaagtatattgggccatgcggcggacgcgactgttctgtctgccactgtgtgccagaaaaaggatctcgcggacctccgggtcctccaggtccgcagggacctattggccctctcggtgccccaggtcccattggactttccggcgagaaaggcatgaggggtgacagaggtccccctggtgcggctggagacaagggggacaagggacccaccggcgttcccggattccccggactagacggcatccccggacaccccggtcccccaggccctcgcggtaaacctggaatgtctggtcacaacggcagccgaggcgacccaggattcccaggtggacgcggagcccttgggccagggggacccctgggccaccctggggaaaagggagaaaagggtaactcggtttttattctgggcgcagtgaagggaatacagggcgaccgaggggacccaggactccctggccttccagggtcatggggagcgggtgggccagctggcccaaccggctaccccggagagcctggcctcgtcggtccgccaggccaacccggaaggcccggtcttaaaggtaatccaggagtcggcgtaaaaggtcagatgggcgatccgggtgaggtgggacagcagggcagtcctgggccaacattactggtggagccacccgatttttgtctgtacaagggagaaaagggcatcaagggcatcccaggaatggtggggttgccaggccctcccggaagaaagggcgaatcggggatcggggctaaaggggaaaaaggcatacccggttttcctggaccacgcggagacccaggaagctatgggtctccaggatttccaggactcaagggcgaactgggtttggttggagatccaggcctctttggactcatcgggccaaagggggatcccggtaatcggggtcacccaggcccaccgggtgtgctcgtgacccctccgttgcccctcaaggggcctccaggcgacccaggtttcccgggacggtacggcgagaccggcgatgtgggaccacctggaccacctggtctgctcgggcgacccggagaagcatgcgccggaatgatcggaccacctggaccccaagggttcccgggactccctggcttgccaggggaggccggaattccaggaagaccagactctgctccaggcaaacccggaaaacctgggagcccaggtttaccgggtgctcccggattacaggggctgccaggcagctctgtaatctactgttcagttggaaatcccggaccacaagggatcaaaggaaaggttggtcccccagggggtcgcggacctaaaggagagaaagggaacgagggtctgtgcgcctgtgaaccagggccaatgggccctcccggtcctcccggattgccaggcaggcagggaagcaaaggggaccttggactcccaggctggctcggaacaaagggggaccccggtccacccggagcagaaggtcctccaggattgccgggaaagcacggtgccagcggaccaccaggaaataaaggcgctaagggggatatggtggtgtcccgcgtaaagggccacaagggcgagcgcggaccggatggtccaccagggtttccaggccagcccggttcacacggcagggacggtcatgctggtgagaagggcgaccccggacccccaggagatcacgaagacgctacccctggcggtaaagggttccccggtcctttgggacctcctgggaaggccggacctgtgggcccacccggtctcggttttcccggtcctcctggtgaacgcggtcatccaggagtgcccggacaccctggggtgcgagggcctgatggtctgaaaggtcagaaaggagacacgatctcttgtaacgtcacttaccccggaaggcacggacccccaggttttgacggcccacctgggcctaaagggtttccaggaccgcagggagcccctggtctgtccggcagcgatggccataaaggacggcctggcaccccaggcaccgctgagataccgggacctcccggttttagaggagacatgggagatcccggtttcggcggagagaaggggagcagtccagtgggcccacctggacctcccggttcccccggagtcaacggtcagaaggggattccgggagaccctgctttcggccacctcggccctcccggtaaacgtgggttatcaggcgttcctggtattaagggtccgcgtggcgatcccggttgtcccggagcagaaggcccagccggtattcccggtttcctgggtctgaagggcccaaagggtagggagggccacgctgggtttccaggtgtgccaggaccacctggccactcttgcgaacgcggtgcaccaggtatccccggacagcccggtctgcccggttatcccggttcacccggagccccagggggaaaaggtcaacctggagatgttgggccaccaggccctgcgggaatgaaaggcctacccggactgcctgggcgaccaggcgcacacggtcctcccggactgcctggcataccgggaccatttggagacgatggcctgcctggcccaccaggccctaaaggcccacggggactcccagggtttcccggattccctggagaaagaggcaaacctggcgcagagggctgccctggagctaagggagagcccggagaaaagggcatgagtggcttaccaggagatagaggcctgagaggggctaaaggggctatcggaccccctggcgatgaaggtgaaatggctatcatctcccagaagggcaccccaggcgaaccgggtcctcccggagatgatgggtttccgggagagcgaggagacaaagggaccccaggcatgcaaggccgacgtggagaaccgggaaggtacggacctccaggattccatagaggcgaacctggagagaagggccaaccagggccaccaggcccacctggaccaccaggatccaccggtcttcggggtttcataggctttcccggtctgcccggtgatcaaggggaaccaggatctccaggacctcccggtttctctggaatcgacggggctcggggtccaaagggtaataagggggatcccgcatcccactttggtccaccaggtcccaaaggagaaccaggcagccccggttgtcccggtcacttcggagcctcgggggagcagggcctgcccggaatccagggcccacggggttctccaggaaggcctggcccaccaggatctagtgggccaccaggatgcccaggagaccacggcatgcctggcctccgcggacagcctggcgaaatgggcgacccgggaccccgaggtctgcagggcgatcccggaatcccaggaccccctgggatcaaaggcccttctggatctccgggattgaatgggctccatgggctgaaaggtcagaagggaactaagggcgctagtggcctccatgatgtcgggccacccggtccagttggcatcccaggcctgaagggagagcgaggtgatccaggttccccgggaataagccctcctggccctcgcggtaaaaaaggtcccccaggaccccctggctctagcggaccgcctggccctgccggagcaaccgggcgtgccccaaaagacatacctgaccctgggccacccggagaccagggaccacctggtccagacggacctagaggcgctcccggtcctccagggctccccggaagcgtcgacctgttacggggtgagccaggcgactgcgggttgccaggtcccccaggacctcccggtccacccggaccaccaggttacaaaggtttccctggctgcgatggaaaggatggccagaaggggcctgtggggttcccaggtccccagggaccacatggattcccagggcctccaggtgaaaagggtctgccaggtccaccaggtcgcaagggccctactggtctaccaggccctcggggagagcccggacccccagctgacgtggatgactgccccaggatccccggactcccaggagcgcctgggatgcggggaccggaaggcgcaatgggcctgccgggaatgagagggccaagcggccctggctgtaaaggggagcctggtctcgacggtcgcagaggcgtcgacggagttcccggaagccctggacccccaggcaggaaaggtgataccggggaggacggctatccaggtggaccaggcccacctggaccaatcggtgatcctggtcccaagggttttggccctggttatctgggcggtttccttttagttctgcacagccagactgaccaggagcctacttgcccacttggcatgccgaggctctggacaggctacagcttgctgtatttggaaggccaggaaaaagctcataatcaggacctgggcttagccggaagctgtttaccagtattcagcactcttccctttgcctactgtaacatccaccaggtctgccattatgcgcagcggaacgatcgatcatactggctggcgagcgcggcaccactgcctatgatgcctctgtccgaagaggcgatccggccatacgtgtctaggtgtgccgtgtgtgaggctccagctcaagcagtggcagtccactcacaggaccagtccattccaccttgtccccaaacgtggagaagtttgtggatcgggtatagcttccttatgcacaccggcgctggtgatcaaggaggcggacaggccctaatgtctccgggatcttgcttggaggattttcgcgcagccccattccttgaatgccagggtcggcaaggaacctgccatttttttgccaacaaatatagcttctggctgactacagtgaaagcagacttgcagtttagcagtgcgccagctccagacacgctcaaagaatctcaggcccagcgccagaagatctccagatgtcaggtgtgtgttaagtactcata

SEQ ID NO: 299469 - DNA, 249 bp, Artificial Sequence
  derived and/or modified sequence
atgggctgggactgccggcggaccaccgtggagaaccccagccccattcggaactgtgtcaatcaggagtggcccgagggttcttcaccgggcttgacggagggcaacacggggctggttagagatttgaggccggctcaccaggatcggagtgggactcgggaggacccagcaggacaggagaccacggcaatcaccaacccctcaccctcctgcactagcggagcctccgctggccagaaattatag

SEQ ID NO: 299470 - DNA, 507 bp, Artificial Sequence
  derived and/or modified sequence
atgagcaagcggaagtggcggggcttccggggcgcccagcaggagcgagcccagccccctgcagcatcaccccagccctgccccgcacctcacgcagggctacccgggggatcccgccgccgggcacctgcgcccgcagggcaacaacagatgcgggcagaaagtcggtcgggggcccagagacgcagggggtcagccaggcggggcgcgcacagagaggccggcggttgcgtccgggggaggacccgctcttctggaagcgagaggtccaacgccctgtggcaggctgtcgatgccgccgaggccctagcactcagttccccgcttaggcgcccctgggatcaggctcagcattttacgaacccagcaccattctccaagggaccgcagtcagctcctcccagtcctcccgcggggcggagacggcggggtgcggacctggccctgaccccgctggcaggcgaagggcatacccggtggaggcaaccgggcagacccggcaaatag

SEQ ID NO: 299471 - DNA, 189 bp, Artificial Sequence
  derived and/or modified sequence
atgctccaggtggtgcaagagggcaatcctgcaccttttataattaatacagttaagagggggcggcgggatcgcgagcgccaacgcaccccatgggccccacatccactgggcttccagggccgccggtatatctatgagtcgccgaaccacagggggaaggattccagctttttagctcagaagtag

SEQ ID NO: 299472 - DNA, 570 bp, Artificial Sequence
  derived and/or modified sequence
atgtgcgccaagcggctgcggggccccttccggatcttcctgcccctcaggaagtattcttttttccctagccaagtggctcagccatttgcatccgccgccgtggcccaggccttactgagctctcctggtacaaatctgcagcagactcttgtgggtggcctgaggttgcgacatgggagtgttggtggtgctcaatgggtggtgaaggcggcttgcccgtgggagccccaggatgtggcatgctgcggcggcttcaccgtaaccgcaaggattgccgcctgcgtcctcctctgtctttgcgaacacatgtacactcccagcgcccacgcgcgtatgacgtttggcacagagcacttgttgctatggccagcccaacggcgagcggaccctagaaccgcagctcctataaggctccaccagggacagctcgaccctagccgggatcccgagaacctcagggcttgggcggttggttcatgcagagcaggcgtggagctccatgggagccctgttcatcttcacatgcgtgcgggccaacacatcagtatgtttgcaggggttgcgtag

SEQ ID NO: 299473 - DNA, 141 bp, Artificial Sequence
  derived and/or modified sequence
atgctgtctaggaatgacgatatctgcatctatggcggtcttgggttggggggattactgctgctcgcggtggtgctgctgagcgcttgcctgtgttggctgcatcgccgtgagcactgcttggccctggaaccgctctag

SEQ ID NO: 299474 - DNA, 306 bp, Artificial Sequence
  derived and/or modified sequence
cggcccttctgctgccacaccccctgctgccagcccagctgctgcgtcccatcctgctgtcaaccctgctgccacccaacctgctgtcagaatacctgttgtagaacaacctgctgtcagcccacctgcgtggcatcgtgctgtcaaccatcctgctgctctactccctgttgccagcccacatgctgcgggcaaacctgtaatgagagctcttattgccttccttgttgccggcctacctgctgccagaccacttgctataggaccacctgctgtaggccatcttgctgctgttctccttgctag

SEQ ID NO: 299475 - DNA, 384 bp, Artificial Sequence
  derived and/or modified sequence
atgcctacgatgtggcggatgttacatcaggctctgaagctgcgcagacggaccgtgcttgccggacaggagatatcgtacgttctccccgtcatgttcgtcgtgagtgaggaggatagcaaccgggacgtgtttctggttgctggatatagacatctcgaattcggtgaacggatcgctatatggggttcaagcatgcagcatgtggaaagacgacgctggcccctggacagcatccagaaaagaatgggacagtccttcactggttgggctgaagaggccgctcctggcatgaaaacaaagaaggagtatgccgagataggagtgaagccaaggcagaacgcttgcgaaatgtgccccggcatgatcctcagcactacttag

SEQ ID NO: 299476 - protein, 104 aa, Artificial Sequence
  derived and/or modified sequence
MIHFILLFSRQGKLRLQKWYITLPDKERKKITREIVQIILSRGHRTSSFVDWKELKLVYKRYASLYFCCAIENQDNELLTLEIVHRYVELLDKYFGNTWPFARA

SEQ ID NO: 299477 - DNA, 315 bp, Artificial Sequence
  derived and/or modified sequence
atgatccacttcatcctgctgttcagcagacagggcaagctgagactgcagaagtggtacatcaccctgcccgacaaggagagaaagaagatcaccagagagatcgtgcagatcatcctgagcagaggccacagaaccagcagcttcgtggactggaaggagctgaagctggtgtacaagagatacgccagcctgtacttctgctgcgccatcgagaaccaggacaacgagctgctgaccctggagatcgtgcacagatacgtggagctgctggacaagtacttcggcaacacctggcccttcgccagagcctag

SEQ ID NO: 299478 - DNA, 315 bp, Artificial Sequence
  derived and/or modified sequence
atgatccacttcatcctcttgttcagccgacagggcaaactccgcctccagaagtggtacatcaccctgcccgacaaggaacggaaaaaaataacgcgcgaaatcgtccaaatcattttgtccagaggtcataggaccagctcattcgtggactggaaggagttgaagttggtgtacaaaagatatgccagtttgtacttctgttgcgccatcgaaaatcaggataatgaactgctcacactggagattgttcaccggtacgtggaattgttggacaagtactttggtaatacctggcccttcgctagggcatag

SEQ ID NO: 299479 - DNA, 447 bp, Artificial Sequence
  derived and/or modified sequence
attgtgggaagcagccatggtctaagccgggcgcctcacctgtcagccgcaccggctccagcgctcgcctctcgccctcgcttctccagcgctccttgctcgcaaggcgggggaggcggcggcccagccacgatgatacatttcatattgctcttcagtcgacaagggaaattacggctacagaaatggtacatcactctccctgataaagagaggaagaagatcacccgggaaattgttcagattattctctcccgtggtcacaggacaagcagttttgttgactggaaggagctaaaacttgtttataaaaggtatgctagtttatatttttgctgtgcaatagaaaatcaggacaatgagctcttgacgctagagattgtgcatcgttacgtggagctgctggacaaatattttggaaatacttggccttttgcaagagcctga

SEQ ID NO: 299480 - DNA, 315 bp, Artificial Sequence
  derived and/or modified sequence
atgatccacttcatcctgctcttcagccggcagggcaagctgcggctgcagaagtggtacatcaccctgcctgacaaggagaggaagaagatcacccgggagatcgtgcagatcatcctgagccggggccacaggaccagcagctttgtggactggaaggagctgaagctggtgtacaagagatatgccagcctgtacttctgctgtgccatcgagaaccaggacaatgagctgctgaccctggagatcgtgcacagatatgtggagctgctggacaagtactttggaaacacctggccctttgcccgggcctag

SEQ ID NO: 299481 - DNA, 315 bp, Artificial Sequence
  derived and/or modified sequence
atgatccacttcatcctgctgttcagccggcagggcaagctgcggctgcagaagtggtatatcaccttacctgacaaggaacgcaaaaaaataacacgggagatcgtccagattatcctgagccggggacatcggacctccagcttcgttgattggaaggagctgaagctcgtttataagagatatgcctccctgtacttctgttgcgccatcgaaaatcaagataacgaactgctgacgttggaaattgtccatcgatatgtcgagctgctcgacaagtacttcggcaatacctggcccttcgcgagagcctag

SEQ ID NO: 299482 - DNA, 315 bp, Artificial Sequence
  derived and/or modified sequence
atgatccactttattctgctgtttagtcggcagggaaaattgcgcctgcagaagtggtacataacattgccggacaaggagagaaagaaaataaccagagagatcgtacagataatcctttctaggggccaccggacatcctcctttgtggattggaaagagctgaagttagtttacaaacgatacgcctccctttacttctgttgtgccatcgaaaatcaggataacgagctactgacactggaaatagttcaccgctacgtggaactactagataagtacttcggcaatacctggccctttgcacgcgcatag

SEQ ID NO: 299483 - protein, 49 aa, Artificial Sequence
  derived and/or modified sequence
MYPNPLIYCTCWDPWNLGPRKLIKTPQLPRKNSTGSSKLTPLVPAPKNH

SEQ ID NO: 299484 - protein, 374 aa, Artificial Sequence
  derived and/or modified sequence
MKPLLETLYLLGMLVPGGLGYDRSLAQHRQEIVDKSVSPWSLETYSYNIYHPMGEIYEWMREISEKYKEVVTQHFLGVTYETHPMYYLKISQPSGNPKKIIWMDCGIHAREWIAPAFCQWFVKEILQNHKDNSSIRKLLRNLDFYVLPVLNIDGYIYTWTTDRLWRKSRSPHNNGTCFGTDLNRNFNASWCSIGASRNCQDQTFCGTGPVSEPETKAVASFIESKKDDILCFLTMHSYGQLILTPYGYTKNKSSNHPEMIQVGQKAANALKAKYGTNYRVGSSADILYASSGSSRDWARDIGIPFSYTFELRDSGTYGFVLPEAQIQPTCEETMEAVLSVLDDVYAKHWHSDSAGRVTSATMLLGLLVSCMSLL

SEQ ID NO: 299485 - DNA, 1125 bp, Artificial Sequence
  derived and/or modified sequence
atgaaacccttgctggaaacattatacctgctcggcatgcttgtgcctggcggattaggctatgatcggtcattggcacagcaccgtcaggagatcgttgataaaagcgtatcgccttggagcctggaaacctactcttataacatctaccaccctatgggggaaatatatgagtggatgcgtgaaatcagtgaaaagtacaaggaagtggtcacccagcacttcctgggcgtgacttacgagacacaccctatgtattacctaaaaataagccaacctagcggcaatccaaaaaaaatcatttggatggattgtgggatccacgcaagagaatggatcgcacccgcattctgccagtggtttgtcaaggagatcctgcaaaaccacaaggataattcctccatacgcaagctcctgaggaatctcgatttttacgttcttcccgttctcaacattgacgggtacatctacacgtggaccaccgaccgactgtggagaaaatctcgtagtccacacaacaacggcacatgtttcgggaccgacctgaaccggaattttaatgctagctggtgttccataggggcttctcgcaactgtcaagaccagaccttctgcggcacgggtccagtttcagagcctgaaacaaaggccgtggcctcatttatagaatccaagaaagatgatatcctgtgcttccttaccatgcacagttacggacagctgatactcaccccctatggctacactaaaaacaaatctagcaatcaccccgagatgatccaagtcggacagaaggcggcaaacgctcttaaggcaaaatacggtaccaattatagagtcggaagctcagctgacatcctgtacgcttccagcgggagttctcgagactgggctcgggacatcgggatccccttttcttatacctttgaacttcgggatagcggcacctacggctttgtactcccagaggcccaaatacagcctacgtgtgaggagaccatggaggcagtgcttagcgtgctggacgacgtgtacgccaagcactggcattcagattctgctggcagggtcacaagcgcgacgatgttgcttggtctcctggtttcctgtatgtccctgctgtag

SEQ ID NO: 299486 - DNA, 1125 bp, Artificial Sequence
  derived and/or modified sequence
atgaaacctctccttgagactctttatttgctcggcatgctggtacctggtggcttgggatacgaccgctccctcgcacagcacaggcaggagattgtggacaagagcgtttccccatggtcactggagacctattcttacaatatctaccatcctatgggcgagatctatgaatggatgcgggagataagcgagaagtacaaagaagtcgtcactcagcactttcttggagtgacatacgaaacacaccccatgtattatctgaagattagtcagccttcagggaatcccaagaagatcatttggatggactgcggaatccacgctagggagtggatcgcaccagccttttgccagtggtttgtaaaggaaatactgcagaatcataaagacaactcttctattcgaaaactcctacggaacctcgacttttatgtactgcctgttcttaacattgatggatacatctacacttggaccactgaccgactgtggcgcaaaagcaggagcccccacaataatggtacttgtttcggaacggacctgaaccgcaactttaacgcctcttggtgttctataggggcaagtcggaattgccaggatcagactttctgcggaaccgggcctgttagtgagccagaaaccaaagcagtggcaagtttcatcgaatcaaagaaggatgacattctgtgtttcctgaccatgcatagttacggacagctgatcttaactccctatggctataccaaaaacaaaagttcaaatcaccctgaaatgatccaggtaggtcaaaaggcagcaaatgccctgaaggccaaatacggcactaattacagagtgggatcctccgcggacatactgtatgcaagtagtggcagctcaagggactgggcaagagacatcggtattccattttcctataccttcgagttgcgcgattctggtacctatggtttcgtcctgccagaggcacagatccaacctacctgtgaggagacaatggaagccgtgttgagcgtactggacgatgtttacgccaagcactggcacagcgactccgccgggcgtgtgacctccgccacaatgctgctgggactcttagtcagctgcatgagccttctttag

SEQ ID NO: 299487 - DNA, 1125 bp, Artificial Sequence
  derived and/or modified sequence
atgaaacccctcttagagacgttatatctgctcggtatgcttgtcccaggcggactcggctacgatcgctcattagctcagcacaggcaagaaatcgtcgataaatccgtatcgccttggtctcttgagacttacagctataacatctatcaccctatgggagaaatttacgaatggatgcgagaaatttcagagaagtataaagaagtcgttacacagcactttctcggggtcacatatgaaacacaccccatgtattatttgaagatatcccagccctccggaaacccaaagaaaattatttggatggactgcgggatacatgcccgggagtggattgcacccgctttttgtcagtggttcgttaaggaaatcctgcaaaaccacaaggataactcatctattcggaagctcctccgtaatctggatttctatgttttgcccgtattaaatattgacggttatatatatacgtggaccacggatcgcctctggcgcaaatctagatctcctcacaataacgggacctgttttgggacagacctcaaccgtaattttaatgctagttggtgttctatcggcgcttcccgaaactgccaagaccagactttttgtgggaccggcccggtatctgagcctgaaactaaggccgttgcatcatttatcgaatccaaaaaagatgacatattatgttttctgacaatgcactcctacggacagcttatactgacaccttatggatacacgaaaaacaagtcctcaaatcaccccgagatgatccaggtcgggcaaaaggcagccaacgcattaaaggccaagtacggaaccaactacagggttggaagttcagcagatatcctgtatgcaagcagcggttccagccgggattgggctagagacatcgggattcctttctcctacactttcgagctgcgcgattctggcacctatggattcgttctgcccgaagcccagatacagcccacatgtgaggagactatggaagctgtattgtcagtcctcgatgacgtctatgcaaaacattggcactccgactccgccggacgggtgacctcagctactatgttactcggtctcttggttagctgtatgtcgcttttatag

SEQ ID NO: 299488 - DNA, 1209 bp, Artificial Sequence
  derived and/or modified sequence
ccactgccagagaggcccagaattttctaacttactgtgtggcagaatgaagcctctgcttgaaaccctttatcttttggggatgctggttcctggagggctgggatatgatagatccttagcccaacacagacaagagattgtggacaagtcagtgagtccatggagcctggagacgtattcctataacatataccaccccatgggagagatctatgagtggatgagagagatcagtgagaagtacaaggaagtggtgacacagcatttcctaggagtgacctatgagacccaccccatgtattatctgaagatcagccaaccatctggtaatcccaagaaaatcatttggatggactgtggaattcacgccagagaatggattgctcctgctttttgccaatggttcgtcaaagaaattctacaaaaccataaagacaactcaagtatacgcaagctccttaggaacctggacttctatgtccttccagttcttaacatagatggttatatctacacttggacaactgatcgtctttggaggaaatcccgttcaccccataataatggcacatgttttgggacggatctcaatcgaaatttcaatgcatcttggtgtagtattggtgcctctagaaactgccaagatcaaacattctgtgggacagggccagtgtctgaaccagagactaaagctgttgccagcttcatagagagcaagaaggatgatattttgtgcttcctgaccatgcactcttatgggcagttaattctcacaccttacggctacaccaaaaataaatcaagtaaccacccagaaatgattcaagttggacagaaggcagcaaatgcattgaaagcaaagtatggaaccaattatagagttggatcgagtgcagatattttatatgcctcatcagggtcttcaagagattgggcccgagacattgggattcccttctcatatacgtttgagctgagggacagtggaacatatgggtttgttctgccagaagctcagatccagcccacctgtgaggagaccatggaggctgtgctgtcagtcctggatgatgtgtatgcgaaacactggcactcggacagtgctggaagggtgacatctgccactatgctgctgggcctgctggtgtcctgcatgtctcttctctaagtgcattctgcccaggcctgctcaaccccagtggcatg

SEQ ID NO: 299489 - DNA, 1125 bp, Artificial Sequence
  derived and/or modified sequence
atgaagcccctgctggagaccctgtacctgctgggcatgctggtgcccggcggcctgggctacgacagaagcctggcccagcacagacaggagatcgtggacaagagcgtgagcccctggagcctggagacctacagctacaacatctaccaccccatgggcgagatctacgagtggatgagagagatcagcgagaagtacaaggaggtggtgacccagcacttcctgggcgtgacctacgagacccaccccatgtactacctgaagatcagccagcccagcggcaaccccaagaagatcatctggatggactgcggcatccacgccagagagtggatcgcccccgccttctgccagtggttcgtgaaggagatcctgcagaaccacaaggacaacagcagcatcagaaagctgctgagaaacctggacttctacgtgctgcccgtgctgaacatcgacggctacatctacacctggaccaccgacagactgtggagaaagagcagaagcccccacaacaacggcacctgcttcggcaccgacctgaacagaaacttcaacgccagctggtgcagcatcggcgccagcagaaactgccaggaccagaccttctgcggcaccggccccgtgagcgagcccgagaccaaggccgtggccagcttcatcgagagcaagaaggacgacatcctgtgcttcctgaccatgcacagctacggccagctgatcctgaccccctacggctacaccaagaacaagagcagcaaccaccccgagatgatccaggtgggccagaaggccgccaacgccctgaaggccaagtacggcaccaactacagagtgggcagcagcgccgacatcctgtacgccagcagcggcagcagcagagactgggccagagacatcggcatccccttcagctacaccttcgagctgagagacagcggcacctacggcttcgtgctgcccgaggcccagatccagcccacctgcgaggagaccatggaggccgtgctgagcgtgctggacgacgtgtacgccaagcactggcacagcgacagcgccggcagagtgaccagcgccaccatgctgctgggcctgctggtgagctgcatgagcctgctgtag

SEQ ID NO: 299490 - DNA, 1125 bp, Artificial Sequence
  derived and/or modified sequence
atgaagcctctactggagacgttgtatctgctggggatgttggttcctggaggattgggctacgaccgctccctggctcaacacagacaggaaattgtcgacaagtccgtttccccatggtccttggagacatatagctacaatatctaccacccaatgggagaaatctatgaatggatgagagagatctctgagaagtataaagaagtagtgacacagcactttttgggggtcacttatgaaacacatccgatgtactacctgaagatctcccaacccagtggtaatcccaagaaaataatctggatggattgcggcatccatgcacgggagtggatcgcgccggccttttgtcagtggtttgtgaaggaaatactacaaaaccacaaggacaacagctcaatccgaaaactcctgcgaaacttagatttctacgtattgccggtccttaatattgacggttacatttacacgtggacaactgaccgactctggaggaagagcagatcccctcataataatggtacttgtttcggcacagatttgaaccggaattttaatgcaagttggtgctcaataggtgcctcccgtaactgtcaagatcaaaccttctgcggcacagggccagtctccgagcccgagaccaaggcagtagcctcctttatcgaatcaaagaaggacgacatcctgtgcttcctgactatgcatagttatggccaattaatactgacgccctacggttatacaaagaataagtccagcaatcaccctgagatgatccaggtgggtcagaaagcagctaatgccctgaaggccaagtatggtaccaactatagagttgggagtagcgccgatatattgtatgctagcagcggaagtagtcgggactgggccagggatatcggaattcctttcagctatactttcgagttaagagatagcgggacttacggtttcgtgcttcccgaggcacaaatccagcctacctgcgaagagaccatggaggctgtgctgagtgtactggacgatgtgtacgccaagcactggcactcagactccgcaggccgcgtcacctctgccaccatgcttctcggtctccttgtgtcctgcatgagtctgctttag

SEQ ID NO: 299491 - DNA, 1125 bp, Artificial Sequence
  derived and/or modified sequence
atgaagcccctgctggagaccctgtacctgctgggcatgctggtgcctgggggcctgggctatgacaggagcctggcccagcaccggcaggagatcgtggacaagtctgtgagcccctggagcctggagacctacagctacaacatctaccaccccatgggagagatctatgagtggatgagggagatcagcgagaagtacaaggaggtggtgacccagcacttcctgggcgtgacctatgagacccaccccatgtactacctgaagatcagccagcccagcggcaaccccaagaagatcatctggatggactgtggcatccacgcccgggagtggatcgccccagccttctgccagtggtttgtgaaggagatcctgcagaaccacaaggacaacagcagcatcaggaagctgctgaggaacctggacttctacgtgctgcctgtgctgaacattgatggctacatctacacctggaccacagaccggctgtggaggaagagccgcagcccccacaacaacggcacctgcttcggcacagacctgaacagaaacttcaatgcctcctggtgcagcattggagccagcaggaactgccaggaccagaccttctgtggcactggacctgtgtctgagcctgagaccaaggctgtggccagcttcatcgagagcaagaaggatgacatcctgtgcttcctgaccatgcacagctatggccagctgatcctgaccccctacggctacaccaagaacaagagcagcaaccaccctgagatgatccaggtgggccagaaggccgccaatgccctgaaggccaagtatggcaccaactacagagtgggcagcagcgctgacatcctgtatgccagcagcggcagcagccgggactgggcccgggacatcggcatccccttctcctacacctttgagctgcgggacagcggcacctacggctttgtgctgcctgaggcccagatccagcccacctgtgaggagaccatggaggccgtgctgtctgtgctggatgatgtgtatgccaagcactggcacagcgacagcgctggccgggtgaccagcgccaccatgctgctgggcctgctggtgtcctgcatgagcctgctgtag

SEQ ID NO: 299492 - DNA, 1125 bp, Artificial Sequence
  derived and/or modified sequence
atgaagcccctgctggagaccctgtacctgctgggcatgctggtgcctggcggcctgggttacgatagaagcctggcgcagcaccgccaggaaatcgtggataaaagcgtctctccctggtccctcgaaacatacagctataacatttaccatccaatgggggaaatttacgaatggatgagggagatttctgagaagtataaagaagtcgtgactcagcactttttgggggttacttacgagacccaccctatgtactacctgaagattagtcagccatctggaaatccaaagaaaatcatctggatggattgcggaatccatgctcgggaatggatagcacctgcattctgccagtggtttgtgaaggaaatcctgcaaaatcacaaggataatagctctattcggaaattgctgagaaatttggatttctacgtcctgcccgtgctcaacatcgacggatacatctacacttggaccacggatcggttgtggcgcaagtctagatcccctcacaacaacgggacatgcttcgggacagatctgaacaggaacttcaacgcaagctggtgctcaattggggcttcacgcaactgccaggaccagacattttgcggtaccgggcctgtgtccgaacccgagacaaaagccgtggccagctttattgaatctaaaaaggatgacatactgtgtttcctgactatgcactcttatggccagctgatcctgactccttatggatataccaagaacaaaagttctaatcacccagaaatgattcaggtgggccagaaggccgctaatgcacttaaggcaaagtatggaacaaactatcgggtgggatcttcggcagatatcctatatgcctcttctggctctagcagagattgggcgcgtgatatcggtatacccttcagttacacattcgagcttagggattctggtacttatgggttcgtgttacctgaggcacaaatccaacccacctgcgaggagacaatggaggctgtgctctccgtgttggacgatgtttatgctaaacattggcacagcgatagtgcaggtcgcgtcacatcagccacaatgctgttgggactgttggtgagctgtatgagtttgctgtag

SEQ ID NO: 299493 - RNA, 1125 nt, Artificial Sequence
  derived and/or modified sequence
augaaaccucuccuugagacucuuuauuugcucggcaugcugguaccugguggcuugggauacgaccgcucccucgcacagcacaggcaggagauuguggacaagagcguuuccccauggucacuggagaccuauucuuacaauaucuaccauccuaugggcgagaucuaugaauggaugcgggagauaagcgagaaguacaaagaagucgucacucagcacuuucuuggagugacauacgaaacacaccccauguauuaucugaagauuagucagccuucagggaaucccaagaagaucauuuggauggacugcggaauccacgcuagggaguggaucgcaccagccuuuugccagugguuuguaaaggaaauacugcagaaucauaaagacaacucuucuauucgaaaacuccuacggaaccucgacuuuuauguacugccuguucuuaacauugauggauacaucuacacuuggaccacugaccgacuguggcgcaaaagcaggagcccccacaauaaugguacuuguuucggaacggaccugaaccgcaacuuuaacgccucuugguguucuauaggggcaagucggaauugccaggaucagacuuucugcggaaccgggccuguuagugagccagaaaccaaagcaguggcaaguuucaucgaaucaaagaaggaugacauucuguguuuccugaccaugcauaguuacggacagcugaucuuaacucccuauggcuauaccaaaaacaaaaguucaaaucacccugaaaugauccagguaggucaaaaggcagcaaaugcccugaaggccaaauacggcacuaauuacagagugggauccuccgcggacauacuguaugcaaguaguggcagcucaagggacugggcaagagacaucgguauuccauuuuccuauaccuucgaguugcgcgauucugguaccuaugguuucguccugccagaggcacagauccaaccuaccugugaggagacaauggaagccguguugagcguacuggacgauguuuacgccaagcacuggcacagcgacuccgccgggcgugugaccuccgccacaaugcugcugggacucuuagucagcugcaugagccuucuuuag

SEQ ID NO: 299494 - RNA, 1125 nt, Artificial Sequence
  derived and/or modified sequence
augaaaccccucuuagagacguuauaucugcucgguaugcuugucccaggcggacucggcuacgaucgcucauuagcucagcacaggcaagaaaucgucgauaaauccguaucgccuuggucucuugagacuuacagcuauaacaucuaucacccuaugggagaaauuuacgaauggaugcgagaaauuucagagaaguauaaagaagucguuacacagcacuuucucggggucacauaugaaacacaccccauguauuauuugaagauaucccagcccuccggaaacccaaagaaaauuauuuggauggacugcgggauacaugcccgggaguggauugcacccgcuuuuugucagugguucguuaaggaaauccugcaaaaccacaaggauaacucaucuauucggaagcuccuccguaaucuggauuucuauguuuugcccguauuaaauauugacgguuauauauauacguggaccacggaucgccucuggcgcaaaucuagaucuccucacaauaacgggaccuguuuugggacagaccucaaccguaauuuuaaugcuaguugguguucuaucggcgcuucccgaaacugccaagaccagacuuuuugugggaccggcccgguaucugagccugaaacuaaggccguugcaucauuuaucgaauccaaaaaagaugacauauuauguuuucugacaaugcacuccuacggacagcuuauacugacaccuuauggauacacgaaaaacaaguccucaaaucaccccgagaugauccaggucgggcaaaaggcagccaacgcauuaaaggccaaguacggaaccaacuacaggguuggaaguucagcagauauccuguaugcaagcagcgguuccagccgggauugggcuagagacaucgggauuccuuucuccuacacuuucgagcugcgcgauucuggcaccuauggauucguucugcccgaagcccagauacagcccacaugugaggagacuauggaagcuguauugucaguccucgaugacgucuaugcaaaacauuggcacuccgacuccgccggacgggugaccucagcuacuauguuacucggucucuugguuagcuguaugucgcuuuuauag

SEQ ID NO: 299495 - protein, 133 aa, Artificial Sequence
  derived and/or modified sequence
MRGEHNSTSYDSAVIYRGFWAVLMLLGVVAVVIASFLIICAAPFASHFLYKAGGGSYIAAGILFSLVVMLYVIWVQAVADMESYRNMKMKDCLDFTPSVLYGWSFFLAPAGIFFSLLAGLLFLVVGWHIQIHH

SEQ ID NO: 299496 - DNA, 402 bp, Artificial Sequence
  derived and/or modified sequence
atgagaggcgagcacaacagcaccagctacgacagcgccgtgatctacagaggcttctgggccgtgctgatgctgctgggcgtggtggccgtggtgatcgccagcttcctgatcatctgcgccgcccccttcgccagccacttcctgtacaaggccggcggcggcagctacatcgccgccggcatcctgttcagcctggtggtgatgctgtacgtgatctgggtgcaggccgtggccgacatggagagctacagaaacatgaagatgaaggactgcctggacttcacccccagcgtgctgtacggctggagcttcttcctggcccccgccggcatcttcttcagcctgctggccggcctgctgttcctggtggtgggctggcacatccagatccaccactag

SEQ ID NO: 299497 - DNA, 402 bp, Artificial Sequence
  derived and/or modified sequence
atgcgaggagaacataatagcaccagctatgatagtgcggtaatttacagggggttttgggctgtcctgatgttgctgggggtggttgccgtcgtcatcgcgagctttctgatcatctgcgcagcccctttcgcgtcccactttctgtataaagccggggggggctcatacatcgctgcaggcattctcttctctctggtggtaatgctctatgtcatttgggttcaggctgtggccgacatggagagttaccgcaatatgaaaatgaaagattgtcttgatttcaccccatctgtgctgtatggttggagcttctttctcgcccctgcgggaatcttcttttccctgctagccggtctattattcttggtagtaggctggcacatccagattcaccattag

SEQ ID NO: 299498 - DNA, 402 bp, Artificial Sequence
  derived and/or modified sequence
atgagaggagagcacaacagcaccagctatgacagcgctgtgatctaccggggcttctgggccgtgctgatgctgctgggcgtggtggccgtggtgattgccagcttcctgatcatctgtgccgccccctttgccagccacttcctgtacaaggccggcggcggcagctacatcgccgccggcatcctcttcagcctggtggtgatgctgtatgtgatctgggtgcaggccgtggccgacatggagagctacagaaacatgaagatgaaggactgcctggacttcacccccagcgtgctgtatggctggagcttcttcctggccccagctggcatcttcttcagcctgctggccggcctgctcttcctggtggtgggctggcacatccagatccaccactag

SEQ ID NO: 299499 - DNA, 402 bp, Artificial Sequence
  derived and/or modified sequence
atgcggggcgagcacaacagcaccagctacgacagcgccgtgatctaccgtggcttctgggccgtgttaatgttgcttggtgtggtcgcagttgtcattgcttcctttctgatcatttgtgccgctccatttgccagccactttttatacaaggcggggggcggatcctatatcgccgccggaattctgttttctttggtggtaatgctgtacgtgatttgggtccaggccgtggccgacatggaaagttaccggaacatgaagatgaaggattgcctcgacttcactccctccgtcctgtatgggtggagcttcttcctggcccctgcagggatctttttttctctcctcgctgggcttttgttcctggtggttggctggcacatacagatccaccactag

SEQ ID NO: 299500 - DNA, 402 bp, Artificial Sequence
  derived and/or modified sequence
atgaggggagaacataatagcacaagctatgactctgcggtgatctatagagggttttgggcggtgctgatgctgctgggagtcgtcgcagttgtcattgcctctttcctgattatctgtgcggctccattcgcaagccactttctctataaggccggaggaggatcctatatagcagcagggatactgttttccctagtcgtcatgttatatgtgatctgggtccaggccgtggcagatatggagtcctaccgcaacatgaaaatgaaggactgcctcgattttacgcctagtgtcctgtatggatggagttttttcctggcacccgctggcatctttttttctttgctggccggactactcttcctggtcgtgggctggcacattcagatccaccattag

SEQ ID NO: 299501 - DNA, 3112 bp, Artificial Sequence
  derived and/or modified sequence
agagagagggggcgggtgctacctggcagctccgcgggtgcgtggccggtgctggctgggagttctggtctcaggcaaggtggggactgggcacatcatcaatacgatagagaacgtcacttttcaccatgaagggttcttctggaggtgttggtttaatgggattgtggaagagaatgactccaatatttggaagttctggtacaccaatcagccaccgtccaagaactgcacacatgcttacctgtctccgtaccccttcatgagaggcgagcacaactcgacctcctatgactctgcagttatttaccgtggtttctgggcagtcctgatgctcctgggggtagttgctgtagtcatcgcaagctttttgatcatctgtgcagcccccttcgccagccattttctctacaaagctgggggaggctcatatattgctgcaggcatcctattttcattggtggtgatgctgtatgtcatctgggtccaggcagtggctgacatggaaagctaccgaaacatgaaaatgaaggactgcctggatttcaccccttctgttctgtatggctggtcatttttcctggccccagctgggatatttttttctttgctagctggattactatttctggttgttggatggcatattcagatacatcactaaatcaactgttgccacaagtattttcttgagagattttaaaacaaggaatactttttttccattttgtttcattgatcccagcataaagttagtagatataactttttagttgctattcaaattaatcattttactaaaattttcttcagtaagaaggtcctagaatctctccagacaccagcaagcctctatcttgtctaagtgctgtcaaggacctagttctttagggaataggtaaacaggtctccctttcattgaacatgttagagttcatgcaggtcgcaaaggcctgataatagcttaataccatgacatggggaaaatctcgatagatttggcttaaagtctccttggcattcacttctgctaattaaaaaaaatccttgaagaataattaagaatgggcaaggttgtcagagaatttattttgtttcttgcccacacagataatatccacatacacattcactggctcttgtgagcaaatgaatttaaaaatagacagcagttgttctaattagtgggagccatgtactcaccagttaaaatgggccacaacaaacaagactgagagcatgtacttatcttgctttttcaccaacagtggtttggttacctagttttattcacttaattgtgcatgcttacataaactttaaactacatttaaaactagcaaatctgcataccaaattatgtataacgtagattgaatttttatgaacttaaagtgagttaattgtataatgtaatattgtttaaaatatgtaaaaaccaagcatttccgcttggtccataattctatttgatattttaaaattctcatttaaaaattatattgctatcattcagcatgtgaaaatttattgataaaatgtgattttaatattttttagatataaactttcaacgtacttccatatgaggattataatagccctgctttattaaagaccataaaatattaactttccccaagatgttatgggttccagttcttctgatcatttgattcctttaattactgtccctcaatttcttcatctttacaatagatatattaacatttacagatcgactatttcctttaacctcctagaagaaagtttttgtggggaaagatgattctgtattattcagtagcatagacattttgcatatcaaagatgttcatttggcactaatgttgattgaaatcaaatccatctgagatgcctagctcgtatttgcattctggaagcctccatcgcaggggagctcggcagggtatgtgagctttgttggaggtgcggtgtttcattctgcagctgttgtgaggacagagaggcatggcccacaggcaaaaaaagtcaccacccagaagatgctctgggatagaggaactgctccttttcatcagctcttccaatgccgtgggagaggtgatcccagtcttctctgtacatcttgtgcttttccattaagacttgttccagtgggaaggagctttggaaaaattgcaaaggtctgaatcttcagggcattttcatgacaggacttgccaataataataataataataataataataataataataaagctccagaggcctaactggtttctcaagtcatttcagtgatatcattgaaacgtttttgtggtacttccctttgtctttcactgtttcatttttatattgcttcatttacttctttgcttttggctttgttattagaaaaaataattatgaggtctgttgtgcatgttgactgtgatattaagttatggcatgccattaagttttccagacgatgttggatgtatctgattagttcatgtcatctgtaaatacaattcttttttgtagtactttggaatggagcctttttctggtgtactgtatgccatttaagtttcacatacaagctgctttcggcaaaggcttgaatatttataaatttcagatggttatcctcactttatagtacacttaagtggctaccatatattttttatatgacaattggctgaatagctgatgtgtatgacacttttacacagatttgcactttggaactattttatagttgtaatgcatcaatcaaatacatttcaagcacatttcttgatcaatttaccagcaaccctctgaaggaatgaaggagagttgtgattgctatgtcaatgagtgaaatatacttaaaaatggcagagttatatagtacattattgtagcaaccttatatctgatttgagatactgtgttgccaaatgtccatgttatgtttatttctctattggttgtatttattaatttttagaagcctttaaactgtgttagaatctttttgaaaaatgttgattttgcatcataaagtttcaatttatcaaggatatcttttcagttacacttttagaaagagtgaataaaaagggcagtgagttatgctcttggacttggtgaaa

SEQ ID NO: 299502 - protein, 299 aa, Artificial Sequence
  derived and/or modified sequence
MESEIKSLLNEENIGNECLCDLTNFEQELSEQQCTYLKNVINPIQQLRADLKYRQHHTLQHSHPHIEFNSMKVLEEVDFVKKQLKTVFERLRLEQQRIENDLSDWSIKILDHSLEEKTNPLSELPIELESLECPYPDLKSSILSEFYKFTQKYQKKLQDFNLQLEDIYRNCQLSEEDHWIYQAILDQYPGDLFGRRTLYLDMLQRYFPHKSRHDLVEHEKYCDQYRFAIEQQNILISNWNKNKKDFIQKAVLTLTEACATHEMESMLAKDKKKQQELCADLKAKSQVCLYQQHENGLIQ

SEQ ID NO: 299503 - protein, 264 aa, Artificial Sequence
  derived and/or modified sequence
MNVFVTLQILVDFVKKQLKTVFERLRLEQQRIENDLSDWSIKILDHSLEEKTNPLSELPIELESLECPYPDLKSSILSEFYKFTQKYQKKLQDFNLQLEDIYRNCQLSEEDHWIYQAILDQYPGDLFGRRTLYLDMLQRYFPHKSRHDLVEHEKYCDQYRFAIEQQNILISNWNKNKKDFIQKAVLTLTEACATHEMESMLAKDKKKQQELCADLKAKVRQWRAHQEEVARLEMEISARRREKEEEKEKLWKKKELLQRAEKKK

SEQ ID NO: 299504 - protein, 1500 aa, Artificial Sequence
  derived and/or modified sequence
MTRILTAFKVVRTLKTGFGFTNVTAHQKWKFSRPGIRLLSVKAQTAHIVLEDGTKMKGYSFGHPSSVAGEVVFNTGLGGYPEAITDPAYKGQILTMANPIIGNGGAPDTTALDELGLSKYLESNGIKVSGLLVLDYSKDYNHWLATKSLGQWLQEEKVPAIYGVDTRMLTKIIRDKGTMLGKIEFEGQPVDFVDPNKQNLIAEVSTKDVKVYGKGNPTKVVAVDCGIKNNVIRLLVKRGAEVHLVPWNHDFTKMEYDGILIAGGPGNPALAEPLIQNVRKILESDRKEPLFGISTGNLITGLAAGAKTYKMSMANRGQNQPVLNITNKQAFITAQNHGYALDNTLPAGWKPLFVNVNDQTNEGIMHESKPFFAVQFHPEVTPGPIDTEYLFDSFFSLIKKGKATTITSVLPKPALVASRVEVSKVLILGSGGLSIGQAGEFDYSGSQAVKAMKEENVKTVLMNPNIASVQTNEVGLKQADTVYFLPITPQFVTEVIKAEQPDGLILGMGGQTALNCGVELFKRGVLKEYGVKVLGTSVESIMATEDRQLFSDKLNEINEKIAPSFAVESIEDALKAADTIGYPVMIRSAYALGGLGSGICPNRETLMDLSTKAFAMTNQILVEKSVTGWKEIEYEVVRDADDNCVTVCNMENVDAMGVHTGDSVVVAPAQTLSNAEFQMLRRTSINVVRHLGIVGECNIQFALHPTSMEYCIIEVNARLSRSSALASKATGYPLAFIAAKIALGIPLPEIKNVVSGKTSACFEPSLDYMVTKIPRWDLDRFHGTSSRIGSSMKSVGEVMAIGRTFEESFQKALRMCHPSIEGFTPRLPMNKEWPSNLDLRKELSEPSSTRIYAIAKAIDDNMSLDEIEKLTYIDKWFLYKMRDILNMEKTLKGLNSESMTEETLKRAKEIGFSDKQISKCLGLTEAQTRELRLKKNIHPWVKQIDTLAAEYPSVTNYLYVTYNGQEHDVNFDDHGMMVLGCGPYHIGSSVEFDWCAVSSIRTLRQLGKKTVVVNCNPETVSTDFDECDKLYFEELSLERILDIYHQEACGGCIISVGGQIPNNLAVPLYKNGVKIMGTSPLQIDRAEDRSIFSAVLDELKVAQAPWKAVNTLNEALEFAKSVDYPCLLRPSYVLSGSAMNVVFSEDEMKKFLEEATRVSQEHPVVLTKFVEGAREVEMDAVGKDGRVISHAISEHVEDAGVHSGDATLMLPTQTISQGAIEKVKDATRKIAKAFAISGPFNVQFLVKGNDVLVIECNLRASRSFPFVSKTLGVDFIDVATKVMIGENVDEKHLPTLDHPIIPADYVAIKAPMFSWPRLRDADPILRCEMASTGEVACFGEGIHTAFLKAMLSTGFKIPQKGILIGIQQSFRPRFLGVAEQLHNEGFKLFATEATSDWLNANNVPATPVAWPSQEGQNPSLSSIRKLIRDGSIDLVINLPNNNTKFVHDNYVIRRTAVDSGIPLLTNFQVTKLFAEAVQKSRKVDSKSLFHYRQYSAGKAA

SEQ ID NO: 299505 - protein, 1508 aa, Artificial Sequence
  derived and/or modified sequence
RPRPQIIKMTRILTAFKVVRTLKTGFGFTNVTAHQKWKFSRPGIRLLSVKAQTAHIVLEDGTKMKGYSFGHPSSVAGEVVFNTGLGGYPEAITDPAYKGQILTMANPIIGNGGAPDTTALDELGLSKYLESNGIKVSGLLVLDYSKDYNHWLATKSLGQWLQEEKVPAIYGVDTRMLTKIIRDKGTMLGKIEFEGQPVDFVDPNKQNLIAEVSTKDVKVYGKGNPTKVVAVDCGIKNNVIRLLVKRGAEVHLVPWNHDFTKMEYDGILIAGGPGNPALAEPLIQNVRKILESDRKEPLFGISTGNLITGLAAGAKTYKMSMANRGQNQPVLNITNKQAFITAQNHGYALDNTLPAGWKPLFVNVNDQTNEGIMHESKPFFAVQFHPEVTPGPIDTEYLFDSFFSLIKKGKATTITSVLPKPALVASRVEVSKVLILGSGGLSIGQAGEFDYSGSQAVKAMKEENVKTVLMNPNIASVQTNEVGLKQADTVYFLPITPQFVTEVIKAEQPDGLILGMGGQTALNCGVELFKRGVLKEYGVKVLGTSVESIMATEDRQLFSDKLNEINEKIAPSFAVESIEDALKAADTIGYPVMIRSAYALGGLGSGICPNRETLMDLSTKAFAMTNQILVEKSVTGWKEIEYEVVRDADDNCVTVCNMENVDAMGVHTGDSVVVAPAQTLSNAEFQMLRRTSINVVRHLGIVGECNIQFALHPTSMEYCIIEVNARLSRSSALASKATGYPLAFIAAKIALGIPLPEIKNVVSGKTSACFEPSLDYMVTKIPRWDLDRFHGTSSRIGSSMKSVGEVMAIGRTFEESFQKALRMCHPSIEGFTPRLPMNKEWPSNLDLRKELSEPSSTRIYAIAKAIDDNMSLDEIEKLTYIDKWFLYKMRDILNMEKTLKGLNSESMTEETLKRAKEIGFSDKQISKCLGLTEAQTRELRLKKNIHPWVKQIDTLAAEYPSVTNYLYVTYNGQEHDVNFDDHGMMVLGCGPYHIGSSVEFDWCAVSSIRTLRQLGKKTVVVNCNPETVSTDFDECDKLYFEELSLERILDIYHQEACGGCIISVGGQIPNNLAVPLYKNGVKIMGTSPLQIDRAEDRSIFSAVLDELKVAQAPWKAVNTLNEALEFAKSVDYPCLLRPSYVLSGSAMNVVFSEDEMKKFLEEATRVSQEHPVVLTKFVEGAREVEMDAVGKDGRVISHAISEHVEDAGVHSGDATLMLPTQTISQGAIEKVKDATRKIAKAFAISGPFNVQFLVKGNDVLVIECNLRASRSFPFVSKTLGVDFIDVATKVMIGENVDEKHLPTLDHPIIPADYVAIKAPMFSWPRLRDADPILRCEMASTGEVACFGEGIHTAFLKAMLSTGFKIPQKGILIGIQQSFRPRFLGVAEQLHNEGFKLFATEATSDWLNANNVPATPVAWPSQEGQNPSLSSIRKLIRDGSIDLVINLPNNNTKFVHDNYVIRRTAVDSGIPLLTNFQVTKLFAEAVQKSRKVDSKSLFHYRQYSAGKAA

SEQ ID NO: 299506 - DNA, 363 bp, Artificial Sequence
  derived and/or modified sequence
atgacccgcatcctgaccgccttcaaggtggtgcgcaccctgaagaccggcttcggcttcaccaacgtgaccgcccaccagaagtggaagttcagccgccccggcatccgcctgctgagcgtgaaggcccagaccgcccacatcgtgctggaggacggcaccaagatgaagggctacagcttcggccaccccagcagcgtggccggcgaggtggtgttcaacaccggcctgggcggctaccccgaggccatcaccgaccccgcctacaagggccagatcctgaccatggccaaccccatcatcggcaacggcggcgcccccgacaccaccgccctggacgagctgggcctgagcaagtacctg

SEQ ID NO: 299507 - DNA, 366 bp, Artificial Sequence
  derived and/or modified sequence
atgaccagaatcctgaccgccttcaaggtggtgagaaccctgaagaccggcttcggcttcaccaacgtgaccgcccaccagaagtggaagttcagcagacccggcatcagactgctgagcgtgaaggcccagaccgcccacatcgtgctggaggacggcaccaagatgaagggctacagcttcggccaccccagcagcgtggccggcgaggtggtgttcaacaccggcctgggcggctaccccgaggccatcaccgaccccgcctacaagggccagatcctgaccatggccaaccccatcatcggcaacggcggcgcccccgacaccaccgccctggacgagctgggcctgagcaagtacctgtag

SEQ ID NO: 299508 - DNA, 366 bp, Artificial Sequence
  derived and/or modified sequence
atgaccaggatcctcacagccttcaaggttgtcaggaccctgaaaaccggcttcggtttcaccaacgtgaccgcccaccagaagtggaagtttagccggccagggatcagactgcttagtgtcaaggcccagacagcacatatcgttttagaggatggcactaagatgaaaggttacagtttcgggcacccctcctccgtggcgggagaagtcgtctttaacacgggcctagggggctatccggaggctataacagacccagcgtataagggacagatactcaccatggccaatccaattatcgggaacggtggagcacctgacacaactgctttggacgaattgggtctgtctaagtatctgtag

SEQ ID NO: 299509 - DNA, 366 bp, Artificial Sequence
  derived and/or modified sequence
atgactcgcatacttacagcattcaaggtcgtgcgaacactgaagactggtttcgggtttacgaatgtcaccgctcatcagaagtggaagttcagccgaccaggaattcgcctgctatccgtaaaggcgcaaacggcccacatcgtactcgaggacgggactaaaatgaagggatactctttcggtcacccaagcagcgtggctggagaggtagtcttcaacacaggccttggaggctaccctgaagccataactgatcccgcctacaagggccagatactcaccatggcaaatccaataattgggaatggcggcgcccccgacactaccgccttggacgagttaggtctgagcaaatacctgtag

SEQ ID NO: 299510 - DNA, 699 bp, Artificial Sequence
  derived and/or modified sequence
gctcttttaaaatagttgctttcttaggaaatgtagttgctttcttaacctcatcaaattcatgaagatttagccgaggcccatgctacccattatcttctaaatggccttcagaaatgatggagaaactgacacgttatgagtatttcctgccctacatggattttgaacttgaattcccagcctcgcttgcatctagacacaggcacgtgacccaagccccaccagtcagacaaacccaattgaaactttagttcaaaagcatccagtatgagggagcagtgaagtttgcattttcctgatgaaaatgttggaagagccacaaatcatcaaaatgacgaggattttgacagctttcaaagtggtgaggacactgaagactggttttggctttaccaatgtgactgcacaccaaaaatggaaattttcaagacctggcatcaggctcctttctgtcaaggcacagacagcacacattgtcctggaagatggaactaagatgaaaggttactcctttggccatccatcctctgttgctggtgaagtggtttttaatactggcctgggagggtacccagaagctattactgaccctgcctacaaaggacagattctcacaatggccaaccctattattgggaatggtggagctcctgatactactgctctggatgaactgggacttagcaaatatttgga

SEQ ID NO: 299511 - DNA, 585 bp, Artificial Sequence
  derived and/or modified sequence
gctcttttaaaatagttgctttcttaggaaatgtagttgctttcttaacctcatcaaattcatgaagatttagccgaggcccatgctacccattatcttctaaatggccttcagaaatgatggagaaactgacacgttatgagtatttcctgccctacatggattttgaacttgaattcccagcctcgcttgcatctagacacagccacaaatcatcaaaatgacgaggattttgacagctttcaaagtggtgaggacactgaagactggttttggctttaccaatgtgactgcacaccaaaaatggaaattttcaagacctggcatcaggctcctttctgtcaaggcacagacagcacacattgtcctggaagatggaactaagatgaaaggttactcctttggccatccatcctctgttgctggtgaagtggtttttaatactggcctgggagggtacccagaagctattactgaccctgcctacaaaggacagattctcacaatggccaaccctattattgggaatggtggagctcctgatactactgctctggatgaactgggacttagcaaatatttgga

SEQ ID NO: 299512 - DNA, 366 bp, Artificial Sequence
  derived and/or modified sequence
atgacccgcatcctgacagccttcaaggtggtgaggaccctgaagacaggcttcggcttcaccaacgtgacagcccaccagaagtggaagttcagccggcccggcatccggctgctgtctgtgaaggcccagacagcccacatcgtgctggaggatggcaccaagatgaagggctacagctttggccaccccagctctgtggccggggaggtggtgttcaacacaggcctgggcggctacccagaggccatcacagatcctgcctacaagggccagatcctgaccatggccaaccccatcattggaaatggaggagccccagacaccacagccctggatgagctgggcctgagcaagtacctgtag

SEQ ID NO: 299513 - DNA, 366 bp, Artificial Sequence
  derived and/or modified sequence
atgacccggatcctgaccgccttcaaggtggtgcggaccctgaagacgggattcggcttcacgaacgtcacagctcaccagaagtggaaattttctaggcccgggattcggctcctctccgtaaaagctcagacggctcatatcgtcctggaagacgggactaagatgaaaggttactcgtttggccaccccagcagtgtggccggggaagtggtcttcaatacaggcttgggggggtaccctgaggccataaccgaccctgcatataaaggccaaatcctgaccatggccaatcccattatcggaaacggcggggccccagacactactgcccttgatgagctgggtctgtcaaaatatctctag

SEQ ID NO: 299514 - DNA, 366 bp, Artificial Sequence
  derived and/or modified sequence
atgacccggatcctgaccgccttcaaggtggtgcggaccctgaagacggggtttggcttcacaaacgtcaccgcccatcagaagtggaaattctctagaccaggcattcgacttctgtccgttaaggctcaaactgctcacatcgtgttggaggacggaacgaagatgaagggatatagtttcgggcatccctcctctgtggcgggcgaggtggtctttaataccggcctgggcggataccccgaagctataacagatccagcctataaagggcaaatcttgacgatggccaaccctatcattggcaacgggggcgctccagacacaacggccttagatgaactggggctgtctaaatacctctag

SEQ ID NO: 299515 - DNA, 366 bp, Artificial Sequence
  derived and/or modified sequence
atgacacggatcctcactgcctttaaggtcgtgcgcacactgaaaacggggttcggctttaccaatgttacagcccatcaaaagtggaagttcagccgccctggcataaggctgctgtccgtgaaagcgcaaaccgcacacattgtgctggaggatggaactaagatgaaaggttattcgttcggacatcctagttctgtagcaggcgaggtcgtgttcaatacgggtctgggtgggtatcccgaggccataaccgatccagcttacaaaggtcagatcctgaccatggccaatccaatcattggcaatggaggagcgccagatactaccgccctcgatgaacttgggctgtccaaatacttgtag

SEQ ID NO: 299516 - DNA, 366 bp, Artificial Sequence
  derived and/or modified sequence
atgacacggatcctaacagctttcaaagtcgttcgaactttgaaaacagggttcggtttcacgaacgtcacggcacaccagaaatggaagttctcccgtccagggattcgcctgctgtccgtcaaagcccagaccgcccatatcgtgctggaggatggcactaaaatgaagggctattcctttggacatccttcaagcgtggctggcgaagtggtgttcaataccggattgggaggataccccgaagcaatcacagatccagcctacaagggacaaatactgaccatggccaacccgattatcggtaacggcggagcccctgacacaactgccctagacgaactaggcttgtccaaatacctttag

SEQ ID NO: 299517 - protein, 79 aa, Artificial Sequence
  derived and/or modified sequence
MTMESGAENQQSGDAAVTEAENQQMTVQAQPQIATLAQVSMPAAHATSSAPTVTLVQLPNGQTVQVHGVIQAAQPSVIQ

SEQ ID NO: 299518 - protein, 341 aa, Artificial Sequence
  derived and/or modified sequence
MTMESGAENQQSGDAAVTEAENQQMTVQAQPQIATLAQVSMPAAHATSSAPTVTLVQLPNGQTVQVHGVIQAAQPSVIQSPQVQTVQSSCKDLKRLFSGTQISTIAESEDSQESVDSVTDSQKRREILSRRPSYRKILNDLSSDAPGVPRIEEEKSEEETSAPAITTVTVPTPIYQTSSGQYIAITQGGAIQLANNGTDGVQGLQTLTMTNAAATQPGTTILQYAQTTDGQQILVPSNQVVVQAASGDVQTYQIRTAPTSTIAPGVVMASSPALPTQPAEEAARKREVRLMKNREAARECRRKKKEYVKCLENRVAVLENQNKTLIEELKALKDLYCHKSD

SEQ ID NO: 299519 - protein, 132 aa, Artificial Sequence
  derived and/or modified sequence
MTMESGAENQQSGDAAVTEAENQQMTVQAQPQIATLAQVSMPAAHATSSAPTVTLVQLPNGQTVQVHGVIQAAQPSVIQSPQVQTVQSSCKDLKRLFSGTQISTIAESEDSQESVDSVTDSQKRREILSRRP

SEQ ID NO: 299520 - DNA, 1026 bp, Artificial Sequence
  derived and/or modified sequence
atgaccatggagagtggagccgaaaaccagcagtcaggagacgccgccgtcactgaagccgaaaatcagcagatgaccgttcaggcgcagccccagatcgccacactagcccaagtctcaatgcccgcagcgcatgcaacttcgagtgccccaacagttaccctggtgcagttgccaaatggccagaccgtccaggtgcatggggtgattcaagctgctcagccttctgtgatccaatctcctcaggtccagactgtgcaatcaagctgcaaggatctgaagaggctcttctccggtactcaaatttcaacaatagcagagagcgaggattcccaggaatcagttgactcagtcaccgattcacagaagcgtcgagagatactttcccggcggcccagttaccgaaagattctaaacgatctgagttccgacgctcctggtgtgccgcgaatagaggaagagaaatccgaggaagaaacatctgcacctgccatcactactgtgaccgttcccacccctatttatcagacgtcatctggacagtacattgcgattacacagggcggcgcaattcaactggcaaataacggcacagatggcgtccagggtctgcagacccttacaatgactaatgcagccgcgactcagcctggaactactattttgcagtatgcccagaccacagacggtcagcagattctcgttccttcaaatcaggtcgtggtgcaggcagccagcggcgatgtgcagacttaccagatcaggaccgcccccacctccactatagcccctggggtggtcatggctagctcccccgccctgcccactcaacccgcagaggaggcggccagaaaaagagaagtcagacttatgaaaaatagagaagctgcccgtgagtgccggcgaaagaaaaaagagtatgtcaaatgcctggagaaccgagtggcagttctggagaaccagaacaagactctaatcgaggaattaaaagctcttaaagacctatactgccataagtccgactag

SEQ ID NO: 299521 - DNA, 1026 bp, Artificial Sequence
  derived and/or modified sequence
atgaccatggagagcggggctgagaaccagcagagcggagatgctgctgtgacagaagctgagaaccagcagatgacagtgcaggcccagccccagatcgccaccctggcccaggtgtccatgcctgctgcccacgccaccagcagcgcccccaccgtgaccctggtgcagctgcccaacggccagacagtgcaggtgcatggagtcatccaggccgcccagcccagcgtcatccagagcccccaggtgcagacagtgcagagcagctgcaaggacctgaagaggctcttcagcggcacccagatcagcaccatcgccgagagcgaggacagccaggagagcgtggacagcgtgacagacagccagaagaggcgggagatcctgagccggcggcccagctacaggaagatcctgaatgacctgagcagtgatgcccctggggtgcccagaattgaggaggagaagtctgaggaggagaccagcgccccagccatcaccaccgtgacagtgcccacccccatctaccagaccagcagcggccagtacatcgccatcacccagggcggggccatccagctggccaacaacggcacagatggagtgcagggcctgcagaccctgaccatgaccaatgctgctgccacccagcccggcaccaccatcctgcagtatgcccagaccacagatggccagcagatcctggtgcccagcaaccaggtggtggtgcaggccgccagcggagatgtgcagacctaccagatcagaacagcccccaccagcaccatcgcccctggggtggtgatggccagcagccctgccctgcccacccagcctgctgaggaggccgccaggaagcgggaggtgcggctgatgaagaaccgggaggccgccagagaatgtagaaggaagaagaaggagtatgtgaagtgcctggagaacagagtggccgtgctggagaaccagaacaagaccctcatcgaggagctgaaggccctgaaggacctgtactgccacaagagtgactag

SEQ ID NO: 299522 - DNA, 1026 bp, Artificial Sequence
  derived and/or modified sequence
atgaccatggagagcggcgccgagaaccagcagagcggcgacgccgccgttaccgaagccgaaaaccagcagatgacagtccaggcgcagccccaaattgccacactggcccaggtttctatgccggccgcccacgcgactagctcagcacctaccgttacattggtgcaattgcctaatggtcagaccgtccaggttcacggggtcatccaagcagctcagccatcagtcatccagagccctcaggtgcaaactgttcagtccagctgtaaggatcttaagcgcctgttctccgggacccaaatctcaaccatcgccgaatccgaggatagccaggagtcagtcgacagtgtcactgattcacagaagaggagggagattctgtcacggcgcccctcttatagaaagatactcaacgatctgagtagcgatgccccaggcgtcccccggatagaggaagagaaatccgaggaggaaactagtgccccagccatcacaactgtgaccgtccctacgcccatctatcagacatcttccggccagtatatcgcaatcacgcagggaggcgcgattcaactcgccaataatggtaccgacggtgtacaggggctgcagacgctgacaatgactaatgctgcagccacccagccaggaacgaccattctgcagtatgctcagactactgatgggcagcagatcctcgtccctagcaaccaggtagttgtgcaagcagcaagcggggacgttcaaacatatcaaatccggactgcccccacatctacaatcgctcctggcgtagtaatggcatcatcaccagcgctgccaacccagccagcggaagaagccgctagaaaaagagaggtgcgcctgatgaaaaacagagaggccgcacgcgagtgtcggaggaagaagaaggaatatgtgaagtgtctcgagaatcgggtagccgtcctggaaaaccagaacaagaccttgatagaagagcttaaagcactgaaagacctctactgccataaaagtgattag

SEQ ID NO: 299523 - DNA, 1026 bp, Artificial Sequence
  derived and/or modified sequence
atgacgatggaaagcggcgctgagaatcagcagtctggtgatgccgctgtgacggaggccgagaatcagcaaatgaccgtgcaagcccagccccagatcgccacactcgctcaagttagcatgcctgccgcacacgctacaagcagtgccccaaccgttacgctggtccagttgccaaacggccagacggtgcaggtgcacggcgttatacaggctgctcagccctcagtcatacagtctccccaggtccagactgtgcagagttcctgcaaagaccttaaacgccttttcagcggcacacaaatcagcacaatcgctgaatctgaggactcgcaggaaagcgtggattcggtcaccgattcacagaagcggagggagatactcagcaggcggccatcgtaccggaaaatcctgaatgacctttcttctgacgcgccaggtgtaccacggatcgaggaggagaaatctgaagaggaaacaagtgctcctgcaattactaccgtgactgtgcctactcccatctatcaaacttcatccgggcagtatatcgctattacccagggtggcgcaattcagttggccaataatgggacggatggcgttcagggacttcagacacttacaatgactaatgcagccgcaacccaaccgggaacaactattctgcaatatgcccagacgacagacgggcaacagattcttgttccttctaaccaggtggttgttcaggcagcctctggggatgttcagacgtatcagatccgaaccgccccaaccagcactatcgcacccggtgtggtgatggcctccagccccgctctgcctacgcagcccgcagaggaagccgctagaaaaagagaagtccgcctaatgaagaaccgggaggctgcacgggagtgtcgtcgcaagaagaaagagtatgtgaagtgcttggagaatcgcgtcgccgtgctcgagaatcagaataagacactgatcgaggagctgaaggccctgaaagatttgtactgtcacaagtctgactag

SEQ ID NO: 299524 - DNA, 1172 bp, Artificial Sequence
  derived and/or modified sequence
agaccactcctcccggcgccgggctcagcccgccttcgccttccctctccccgcggtgtgttacgtgggggagagaataaaactccagcgagatccgggccgtgaacgaaagcagtgacggaggagcttgtaccaccggtaactaaatgaccatggaatctggagccgagaaccagcagagtggagatgcagctgtaacagaagctgaaaaccaacaaatgacagttcaagcccagccacagattgccacattagcccaggtatctatgccagcagctcatgcaacatcatctgctcccaccgtaactctagtacagctgcccaatgggcagacagttcaagtccatggagtcattcaggcggcccagccatcagttattcagtctccacaagtccaaacagttcagtcttcctgtaaggacttaaaaagacttttctccggaacacagatttcaactattgcagaaagtgaagattcacaggagtcagtggatagtgtaactgattcccaaaagcgaagggaaattctttcaaggaggccttcctacaggaaaattttgaatgacttatcttctgatgcaccaggagtgccaaggattgaagaagagaagtctgaagaggagacttcagcacctgccatcaccactgtaacggtgccaactccaatttaccaaactagcagtggacagtatattgccattacccagggaggagcaatacagctggctaacaatggtaccgatggggtacagggcctgcaaacattaaccatgaccaatgcagcagccactcagccgggtactaccattctacagtatgcacagaccactgatggacagcagatcttagtgcccagcaaccaagttgttgttcaagctgcctctggagacgtacaaacataccagattcgcacagcacccactagcactattgcccctggagttgttatggcatcctccccagcacttcctacacagcctgctgaagaagcagcacgaaagagagaggtccgtctaatgaagaacagggaagcagctcgagagtgtcgtagaaagaagaaagaatatgtgaaatgtttagaaaacagagtggcagtgcttgaaaatcaaaacaagacattgattgaggagctaaaagcacttaaggacctttactgccacaaatcagattaa

SEQ ID NO: 299525 - DNA, 7650 bp, Artificial Sequence
  derived and/or modified sequence
tgtttccgtgcgcggccgctgcgcactcggcactgggcggcgctggctggctccctggctgcggctcctcagtcggcggcggctgctgctgcctgtggcccgggcggctgggagaagcggagtgttggtgagtgacgcggcggaggtgtagtttgacgcggtgtgttacgtgggggagagaataaaactccagcgagatccgggccgtgaacgaaagcagtgacggaggagcttgtaccaccggtaactaaatgaccatggaatctggagccgagaaccagcagagtggagatgcagctgtaacagaagctgaaaaccaacaaatgacagttcaagcccagccacagattgccacattagcccaggtatctatgccagcagctcatgcaacatcatctgctcccaccgtaactctagtacagctgcccaatgggcagacagttcaagtccatggagtcattcaggcggcccagccatcagttattcagtctccacaagtccaaacagttcagtcttcctgtaaggacttaaaaagacttttctccggaacacagatttcaactattgcagaaagtgaagattcacaggagtcagtggatagtgtaactgattcccaaaagcgaagggaaattctttcaaggaggccttcctacaggaaaattttgaatgacttatcttctgatgcaccaggagtgccaaggattgaagaagagaagtctgaagaggagacttcagcacctgccatcaccactgtaacggtgccaactccaatttaccaaactagcagtggacagtatattgccattacccagggaggagcaatacagctggctaacaatggtaccgatggggtacagggcctgcaaacattaaccatgaccaatgcagcagccactcagccgggtactaccattctacagtatgcacagaccactgatggacagcagatcttagtgcccagcaaccaagttgttgttcaagctgcctctggagacgtacaaacataccagattcgcacagcacccactagcactattgcccctggagttgttatggcatcctccccagcacttcctacacagcctgctgaagaagcagcacgaaagagagaggtccgtctaatgaagaacagggaagcagctcgagagtgtcgtagaaagaagaaagaatatgtgaaatgtttagaaaacagagtggcagtgcttgaaaatcaaaacaagacattgattgaggagctaaaagcacttaaggacctttactgccacaaatcagattaatttgggatttaaattttcacctgttaaggtggaaaatggactggcttggccacaacctgaaagacaaaataaacattttattttctaaacatttctttttttctatgcgcaaaactgcctgaaagcaactacagaatttcattcatttgtgcttttgcattaaactgtgaatgttccaacacctgcctccacttctcccctcaagaaattttcaacgccaggaatcatgaagagacttctgcttttcaacccccaccctcctcaagaagtaataatttgtttacttgtaaattgatgggagaaatgaggaaaagaaaatctttttaaaaatgatttcaaggtttgtgctgagctccttgattgccttagggacagaattaccccagcctcttgagctgaagtaatgtgtgggccgcatgcataaagtaagtaaggtgcaatgaagaagtgttgattgccaaattgacatgttgtcacattctcattgtgaattatgtaaagttgttaagagacataccctctaaaaaagaactttagcatggtattgaaggaattagaaatgaatttggagtgctttttatgtatgttgtcttcttcaatactgaaaatttgtccttggttcttaaaagcattctgtactaatacagctcttccatagggcagttgttgcttcttaattcagttctgtatgtgttcaacatttttgaatacattaaaagaagtaaccaactgaacgacaaagcatggtatttgaattttaaattaaagcaaagtaaataaaagtacaaagcatattttagttagtactaaattcttagtaaaatgctgatcagtaaaccaatcccttgagttatataacaagatttttaaataaatgttattgtcctcaccttcaaaaatatttatattgtcactcatttacgtaaaaagatatttctaatttactgttgcccattgcacttacataccaccaccaagaaagccttcaagatgtcaaataaagcaaagtgatatatatttgtttatgaaatgttacatgtagaaaaatactgattttaaatattttccatattaacaatttaacagagaatctctagtgaattttttaaatgaaagaagttgtaaggatataaaaagtacagtgttagatgtgcacaaggaaagttattttcagacatatttgaatgactgctgtactgcaatatttggattgtcattcttacaaaacatttttttgttctcttgtaaaaagagtagttattagttctgctttagctttccaatatgctgtatagcctttgtcattttataattttaattcctgattaaaacagtctgtatttgtgtatatcatacattgttttcaataccacttttaattgttactcattttattcactaagctcgataaatctaacagttactcttaaaaaaaaaaaaaaaagactaaggtggattttaaaaattggaaactgacataatgttaggttataatttctcatttggagccgggcgcagtggctcacgcctgtaatcccagcactttgggaggccaaggtgggtggatcacctgtggtcaagagttcaagaccagcctggccatcatggtgaaaccccatctctactaaaaatacaaaaattagccaggcgtggtggctggcgcctgtaatcccagctactcaggaggttgaggcagcagaattgcttgaacccaggaggcagagggttgcagtgagccgagatagcaccattgcactccagcctgggcgactccatctcaaaaaataaaaataaaaaaaatgtctcatttgggaaggaaattccttttaaaaaagagttgagacacttagaaaactaatgttttatatttagtcaagagttatttaagaaagtcaagcttgtttaacaacaaaatatgaagatttaagtgttaattgctggatccattttaaaataagattttaattaacatttgtaaatggtatattttcgtttgtaacaaaccattgtcttttttcaaggatgaacagagtttatgaaggagcatcattctaagaattaagtgatgtagtctttatgtttggacagttcaccagattctcaagaaggctttcaaacaactataaagtttgatgtttgtcctgctgagctaatggggaaagttatagcataaaaattgtgtaaccgcatagatatgtcatttttaaaaactggtttaacagaaatcaagcaaagtcacaaatatgttcacaagttggaattatttattgagtcaaaatgtcgaatcgaacattttgaatgaagtaagtgttataaatgaaaaattgcctgatgtttagcagtttgtattctctaaagctttttttcaaaagttcaggctttctacttactgggaagttggtggtcctcttagtccctgataaatcaaggcaatcacattcatgtgagctggatgaatttataagttataaagaccttatccttcataccttgaggatgattgcactggttttgaagtcagttgcttaatgatgaggtgagaaatgtatcctgttgctaaatctgtcttagacccttggtgaaacttgaagatttcagtttataaagataaaatcaagcatcttttgtgcagttttctttttttaatgcaagaatggtggggaggtttgtttgtaagcatgaaactttgagaatctttattaagaaaatgacataatttttaaaaaccttgtagccaagaacatatgtggccacattaccagtaataaatgtttttctctttatattggccaaaagggaataaaaatgtcatcataggaatttgtacatatgctactgatttgcctagaaaatagcaagtttgatattgctcactttgcaaatatagggccatgtggcacttttatctataggacagattaataaaaatgaagtggggaggggtttatttttgatatattactcttatgagttttcaagctttgataatgtttaactgaaaagtggcttagaaagggctagatccaatgtgttcattattaaataattgctatcagatacaattttaagttcattctttttcaaactcaagtaccatattggcaaccataatattgtcataggtgctctcttcatttagatattcttggggggggtggcatttgtataatatatgtgtacatatatatatatatatatatatatacatacagtatataatctaaagctctgagagctcttaagtcaggaatgctgagtattatagtatattgaggtcagatgaaattttacatttttgtgtgttctgttgcattccttctggtagtttctatgactgcattactccagcactcatgattgattttatcttctaattttcttccaagtattttattttttattagttttctttggcttgatacttttaaatatgttactagtcacttgaaagcctctcccccaaaagtatttggtttgtatgctttgtctgtggcagctataacagtggtaagaacattttgaagatagctttttaaaggaaccactgattttttcaaaaatcatcctgggggaggaattttggcatttcatttgagcagggattttgtcagaaaatgtgttttgatggtaggtcagcagcagtgctagtctctgaaagcacaataccagtcaggcagcctatcccatcagatgtcatctggctgaagtttatctctgtctctcaggataaatccctgtaggacaaatccctactatcatttctaccttttggggtgacatgtggaatcatacaaaggcttaggaagaaatacgtttgtttaaaccaggatgctttacttacttgaagtgacttcaatctagatttcttttaatatttaacaaatttttaattctatgatcagccacagtcagctattaccataaattggtctctgtttattttgaagatcacggctgcttcattttgcaggattaagtagggctaatgtatcttaaagttaagatcttgaattaaagtgagttttagaaatagtgttacataccttttcagttgttttcaagaggctttatttttgttgcctttgtagccctgaaagctgttggtatattttttccctcatggacccaatagaaaagttgtatatttatttggattatatttacattctgtcctttgtaaatgtttggtgtaacttgcacttttttaaatgacccagtttgggtattagcaacttaagaaattccctcatcaagtaattctcaactttttagtctttctcctctcttcaaatcatgtgactttttaaatggaagtttttcattgattaaaatattttagcacctaaaagctagccttaaaaacagctgtaaaagaaaaacatcaggaaattagatatgactagcccagttaattaaaagacgggctcaaaccttgttttattctttttcatcttggatgaagattgaagggaaaataactcaagtgcataatatttattttcaatttttaatgagactttatcctcatcacaacattaatactgtacatagtatgccaaaatatccattaatttgtctagaatagtacaagactttttaaagcaattgtcctcacagagaccacatgtaatatactgaaatatgttcatttttaatggctttgttaacatcaaagaaatgctgcctaaatttgatttcagatgaggaaggagaaagtaaagtgtgcatagtaaggctgtaggtgaagagttgtgagataaatagttcactcagttgtacaaagcacaactagaactttttgttgggaggcttacatacatcttgaatattcttaatgtaataatgttgactattaagttggctacacagtcactgtatgtactaggaactggtttccttgacattctagaatcaatggctaggagaggcattaatctttgaggggctgaacatatcatgaagctgagtcagtatggaaaattttcaaataaacagggtgctgaagttccatctgtctcatctgcttatgataagttcttattgattagtgaatgtagcttaagcctttgtatgtgtcctcagggggcagaccgactttaagagggaccagataacgtttgaatggagggattatatttcaggtgttttagcttgaaatttattttttaaaaaaagaaaaatttaaaaaatatataaataaaatagaacaaagccggtgatgcaagttgatattataaacaggcagttttagcacagaaagaaaatactgacctgtctgcattctggtacggtgggtgcaggtcccagctgggtatgacatgatacatttttaattattctcaccagcaagtaaaaggaaaatgaacaatcttttggaattgtctttgaaaaggatcaaagagtaggaaattcacatttgacctaacattacttgcctatagaagtatggcatttccaagcttttgtctgaggagcatctcagagaagtgagagtaaatctgagttagcttaaaaattggtagggaggaagaaaatctctgcaaataatgattttatgtttgttggccaagtgaaatgatctatcattgtgtttgggaggttttattttcttatgtttttaaaattggtaaatgctttatagatgtatttttatccaagtgccactccaatttgtgtatgtaataaaattatttatattaaaagtgggaaataattgtcaacattttttttgagtatagatttattaggggtggcaaagaagagtgctagttagcagttttccatgtaaagttgtccttgactgatttgtccacatgtcagttgtaactcccccactccctgcaaaaggaattatttctaacccagatgtatcacttgaaactttttagaagcaaaataatcagggaagttcctagaaaggtgtttggctttttggtttttgagggttggggtaaagaagacttcccccacaactgtcagcacaaaacagggtattgatttttaactctgatgtttctattggagttgaatactaaataaataactataatgagggaaatacatttctaataaaattccctacattctagaaacatccctgttttaatttttttatctaaatctttttgtgctttatgtgtaaagaaaaaaatgtactgagttacaatgcattttattaacactatgtacataatagctgctttgtgttcagaatagtagcagttgctttgtatattaaagtgatccttgtgaatttgtgaaatattgtcataaagtgctttttcttactgtaatctttgtggtatcaactgtcataatgctctttttacacaaacatttatgtgcagtcacataaacatgcttttaaaaactc

SEQ ID NO: 299526 - DNA, 1029 bp, Artificial Sequence
  derived and/or modified sequence
atacatcatacagtaacacacttatgtgcaccattggtgctgagctgctggttatcccactctgccatgtgtgctgtttctctttgcttttgccactactccactctgtgcttgaaattctgtgactcttccctgtatctatgccagcagctcatgcaacatcatctgctcccaccgtaactctagtacagctgcccaatgggcagacagttcaagtccatggagtcattcaggcggcccagccatcagttattcagtctccacaagtccaaacagttcagtcttcctgtaaggacttaaaaagacttttctccggaacacagatttcaactattgcagaaagtgaagattcacaggagtcagtggatagtgtaactgattcccaaaagcgaagggaaattctttcaaggaggccttcctacaggaaaattttgaatgacttatcttctgatgcaccaggagtgccaaggattgaagaagagaagtctgaagaggagacttcagcacctgccatcaccactgtaacggtgccaactccaatttaccaaactagcagtggacagtatacatacctgagggatacaacatactcctgtcagtaacagattcactgttacagagattctcacttgaactaggaagcatgctctttaggaaagaggcctatcagaatctaaaaaggggaaatgaagttgccattacccagggaggagcaatacagctggctaacaatggtaccgatggggtacagggcctgcaaacattaaccatgaccaatgcagcagccactcagccgggtactaccattctacagtatgcacagaccactgatggacagcagatcttagtgcccagcaaccaagttgttgttcaaggtactcaaaaattgtaaagcaggatgtcagtgaatttgaattctgaacgtcagtttgaagatgagtctacttgaaattttttaatatgaatttaccaatatcaaaggaagacactgaggactatactctatctaggaagatcatccaagctgtg

SEQ ID NO: 299527 - DNA, 1026 bp, Artificial Sequence
  derived and/or modified sequence
atgaccatggagagcggcgccgagaaccagcagagcggcgacgccgccgtgaccgaggccgagaaccagcagatgaccgtgcaggcccagccccagatcgccaccctggcccaggtgagcatgcccgccgcccacgccaccagcagcgcccccaccgtgaccctggtgcagctgcccaacggccagaccgtgcaggtgcacggcgtgatccaggccgcccagcccagcgtgatccagagcccccaggtgcagaccgtgcagagcagctgcaaggacctgaagagactgttcagcggcacccagatcagcaccatcgccgagagcgaggacagccaggagagcgtggacagcgtgaccgacagccagaagagaagagagatcctgagcagaagacccagctacagaaagatcctgaacgacctgagcagcgacgcccccggcgtgcccagaatcgaggaggagaagagcgaggaggagaccagcgcccccgccatcaccaccgtgaccgtgcccacccccatctaccagaccagcagcggccagtacatcgccatcacccagggcggcgccatccagctggccaacaacggcaccgacggcgtgcagggcctgcagaccctgaccatgaccaacgccgccgccacccagcccggcaccaccatcctgcagtacgcccagaccaccgacggccagcagatcctggtgcccagcaaccaggtggtggtgcaggccgccagcggcgacgtgcagacctaccagatcagaaccgcccccaccagcaccatcgcccccggcgtggtgatggccagcagccccgccctgcccacccagcccgccgaggaggccgccagaaagagagaggtgagactgatgaagaacagagaggccgccagagagtgcagaagaaagaagaaggagtacgtgaagtgcctggagaacagagtggccgtgctggagaaccagaacaagaccctgatcgaggagctgaaggccctgaaggacctgtactgccacaagagcgactag

SEQ ID NO: 299528 - protein, 182 aa, Artificial Sequence
  derived and/or modified sequence
MTMESGAENQQSGDAAVTEAENQQMTVQAQPQIATLAQVSMPAAHATSSAPTVTLVQLPNGQTVQVHGVIQAAQPSVIQSPQVQTVQSSCKDLKRLFSGTQISTIAESEDSQESVDSVTDSQKRREILSRRPSYRKILNDLSSDAPGVPRIEEEKSEEETSAPAITTVTVPTPIYQTSSGQY

SEQ ID NO: 299529 - protein, 327 aa, Artificial Sequence
  derived and/or modified sequence
MTMESGAENQQSGDAAVTEAENQQMTVQAQPQIATLAQVSMPAAHATSSAPTVTLVQLPNGQTVQVHGVIQAAQPSVIQSPQVQTVQISTIAESEDSQESVDSVTDSQKRREILSRRPSYRKILNDLSSDAPGVPRIEEEKSEEETSAPAITTVTVPTPIYQTSSGQYIAITQGGAIQLANNGTDGVQGLQTLTMTNAAATQPGTTILQYAQTTDGQQILVPSNQVVVQAASGDVQTYQIRTAPTSTIAPGVVMASSPALPTQPAEEAARKREVRLMKNREAARECRRKKKEYVKCLENRVAVLENQNKTLIEELKALKDLYCHKSD

SEQ ID NO: 299530 - protein, 234 aa, Artificial Sequence
  derived and/or modified sequence
MTMESGAENQQSGDAAVTEAENQQMTVQAQPQIATLAQVSMPAAHATSSAPTVTLVQLPNGQTVQVHGVIQAAQPSVIQSPQVQTVQISTIAESEDSQESVDSVTDSQKRREILSRRPSYRKILNDLSSDAPGVPRIEEEKSEEETSAPAITTVTVPTPIYQTSSGQYIAITQGGAIQLANNGTDGVQGLQTLTMTNAAATQPGTTILQYAQTTDGQQILVPSNQVVVQGTQKL

SEQ ID NO: 299531 - DNA, 9752 bp, Artificial Sequence
  derived and/or modified sequence
tgtttccgtgcgcggccgctgcgcactcggcactgggcggcgctggctggctccctggctgcggctcctcagtcggcggcggctgctgctgcctgtggcccgggcggctgggagaagcggagtgttggtgagtgacgcggcggaggtgtagtttgacgcggtgtgttacgtgggggagagaataaaactccagcgagatccgggccgtgaacgaaagcagtgacggaggagcttgtaccaccggtaactaaatgaccatggaatctggagccgagaaccagcagagtggagatgcagctgtaacagaagctgaaaaccaacaaatgacagttcaagcccagccacagattgccacattagcccaggtatctatgccagcagctcatgcaacatcatctgctcccaccgtaactctagtacagctgcccaatgggcagacagttcaagtccatggagtcattcaggcggcccagccatcagttattcagtctccacaagtccaaacagttcagatttcaactattgcagaaagtgaagattcacaggagtcagtggatagtgtaactgattcccaaaagcgaagggaaattctttcaaggaggccttcctacaggaaaattttgaatgacttatcttctgatgcaccaggagtgccaaggattgaagaagagaagtctgaagaggagacttcagcacctgccatcaccactgtaacggtgccaactccaatttaccaaactagcagtggacagtatattgccattacccagggaggagcaatacagctggctaacaatggtaccgatggggtacagggcctgcaaacattaaccatgaccaatgcagcagccactcagccgggtactaccattctacagtatgcacagaccactgatggacagcagatcttagtgcccagcaaccaagttgttgttcaagctgcctctggagacgtacaaacataccagattcgcacagcacccactagcactattgcccctggagttgttatggcatcctccccagcacttcctacacagcctgctgaagaagcagcacgaaagagagaggtccgtctaatgaagaacagggaagcagctcgagagtgtcgtagaaagaagaaagaatatgtgaaatgtttagaaaacagagtggcagtgcttgaaaatcaaaacaagacattgattgaggagctaaaagcacttaaggacctttactgccacaaatcagattaatttgggatttaaattttcacctgttaaggtggaaaatggactggcttggccacaacctgaaagacaaaataaacattttattttctaaacatttctttttttctatgcgcaaaactgcctgaaagcaactacagaatttcattcatttgtgcttttgcattaaactgtgaatgttccaacacctgcctccacttctcccctcaagaaattttcaacgccaggaatcatgaagagacttctgcttttcaacccccaccctcctcaagaagtaataatttgtttacttgtaaattgatgggagaaatgaggaaaagaaaatctttttaaaaatgatttcaaggtttgtgctgagctccttgattgccttagggacagaattaccccagcctcttgagctgaagtaatgtgtgggccgcatgcataaagtaagtaaggtgcaatgaagaagtgttgattgccaaattgacatgttgtcacattctcattgtgaattatgtaaagttgttaagagacataccctctaaaaaagaactttagcatggtattgaaggaattagaaatgaatttggagtgctttttatgtatgttgtcttcttcaatactgaaaatttgtccttggttcttaaaagcattctgtactaatacagctcttccatagggcagttgttgcttcttaattcagttctgtatgtgttcaacatttttgaatacattaaaagaagtaaccaactgaacgacaaagcatggtatttgaattttaaattaaagcaaagtaaataaaagtacaaagcatattttagttagtactaaattcttagtaaaatgctgatcagtaaaccaatcccttgagttatataacaagatttttaaataaatgttattgtcctcaccttcaaaaatatttatattgtcactcatttacgtaaaaagatatttctaatttactgttgcccattgcacttacataccaccaccaagaaagccttcaagatgtcaaataaagcaaagtgatatatatttgtttatgaaatgttacatgtagaaaaatactgattttaaatattttccatattaacaatttaacagagaatctctagtgaattttttaaatgaaagaagttgtaaggatataaaaagtacagtgttagatgtgcacaaggaaagttattttcagacatatttgaatgactgctgtactgcaatatttggattgtcattcttacaaaacatttttttgttctcttgtaaaaagagtagttattagttctgctttagctttccaatatgctgtatagcctttgtcattttataattttaattcctgattaaaacagtctgtatttgtgtatatcatacattgttttcaataccacttttaattgttactcattttattcactaagctcgataaatctaacagttactcttaaaaaaaaaaaaaaaagactaaggtggattttaaaaattggaaactgacataatgttaggttataatttctcatttggagccgggcgcagtggctcacgcctgtaatcccagcactttgggaggccaaggtgggtggatcacctgtggtcaagagttcaagaccagcctggccatcatggtgaaaccccatctctactaaaaatacaaaaattagccaggcgtggtggctggcgcctgtaatcccagctactcaggaggttgaggcagcagaattgcttgaacccaggaggcagagggttgcagtgagccgagatagcaccattgcactccagcctgggcgactccatctcaaaaaataaaaataaaaaaaatgtctcatttgggaaggaaattccttttaaaaaagagttgagacacttagaaaactaatgttttatatttagtcaagagttatttaagaaagtcaagcttgtttaacaacaaaatatgaagatttaagtgttaattgctggatccattttaaaataagattttaattaacatttgtaaatggtatattttcgtttgtaacaaaccattgtcttttttcaaggatgaacagagtttatgaaggagcatcattctaagaattaagtgatgtagtctttatgtttggacagttcaccagattctcaagaaggctttcaaacaactataaagtttgatgtttgtcctgctgagctaatggggaaagttatagcataaaaattgtgtaaccgcatagatatgtcatttttaaaaactggtttaacagaaatcaagcaaagtcacaaatatgttcacaagttggaattatttattgagtcaaaatgtcgaatcgaacattttgaatgaagtaagtgttataaatgaaaaattgcctgatgtttagcagtttgtattctctaaagctttttttcaaaagttcaggctttctacttactgggaagttggtggtcctcttagtccctgataaatcaaggcaatcacattcatgtgagctggatgaatttataagttataaagaccttatccttcataccttgaggatgattgcactggttttgaagtcagttgcttaatgatgaggtgagaaatgtatcctgttgctaaatctgtcttagacccttggtgaaacttgaagatttcagtttataaagataaaatcaagcatcttttgtgcagttttctttttttaatgcaagaatggtggggaggtttgtttgtaagcatgaaactttgagaatctttattaagaaaatgacataatttttaaaaaccttgtagccaagaacatatgtggccacattaccagtaataaatgtttttctctttatattggccaaaagggaataaaaatgtcatcataggaatttgtacatatgctactgatttgcctagaaaatagcaagtttgatattgctcactttgcaaatatagggccatgtggcacttttatctataggacagattaataaaaatgaagtggggaggggtttatttttgatatattactcttatgagttttcaagctttgataatgtttaactgaaaagtggcttagaaagggctagatccaatgtgttcattattaaataattgctatcagatacaattttaagttcattctttttcaaactcaagtaccatattggcaaccataatattgtcataggtgctctcttcatttagatattcttggggggggtggcatttgtataatatatgtgtacatatatatatatatatatatatatacatacagtatataatctaaagctctgagagctcttaagtcaggaatgctgagtattatagtatattgaggtcagatgaaattttacatttttgtgtgttctgttgcattccttctggtagtttctatgactgcattactccagcactcatgattgattttatcttctaattttcttccaagtattttattttttattagttttctttggcttgatacttttaaatatgttactagtcacttgaaagcctctcccccaaaagtatttggtttgtatgctttgtctgtggcagctataacagtggtaagaacattttgaagatagctttttaaaggaaccactgattttttcaaaaatcatcctgggggaggaattttggcatttcatttgagcagggattttgtcagaaaatgtgttttgatggtaggtcagcagcagtgctagtctctgaaagcacaataccagtcaggcagcctatcccatcagatgtcatctggctgaagtttatctctgtctctcaggataaatccctgtaggacaaatccctactatcatttctaccttttggggtgacatgtggaatcatacaaaggcttaggaagaaatacgtttgtttaaaccaggatgctttacttacttgaagtgacttcaatctagatttcttttaatatttaacaaatttttaattctatgatcagccacagtcagctattaccataaattggtctctgtttattttgaagatcacggctgcttcattttgcaggattaagtagggctaatgtatcttaaagttaagatcttgaattaaagtgagttttagaaatagtgttacataccttttcagttgttttcaagaggctttatttttgttgcctttgtagccctgaaagctgttggtatattttttccctcatggacccaatagaaaagttgtatatttatttggattatatttacattctgtcctttgtaaatgtttggtgtaacttgcacttttttaaatgacccagtttgggtattagcaacttaagaaattccctcatcaagtaattctcaactttttagtctttctcctctcttcaaatcatgtgactttttaaatggaagtttttcattgattaaaatattttagcacctaaaagctagccttaaaaacagctgtaaaagaaaaacatcaggaaattagatatgactagcccagttaattaaaagacgggctcaaaccttgttttattctttttcatcttggatgaagattgaagggaaaataactcaagtgcataatatttattttcaatttttaatgagactttatcctcatcacaacattaatactgtacatagtatgccaaaatatccattaatttgtctagaatagtacaagactttttaaagcaattgtcctcacagagaccacatgtaatatactgaaatatgttcatttttaatggctttgttaacatcaaagaaatgctgcctaaatttgatttcagatgaggaaggagaaagtaaagtgtgcatagtaaggctgtaggtgaagagttgtgagataaatagttcactcagttgtacaaagcacaactagaactttttgttgggaggcttacatacatcttgaatattcttaatgtaataatgttgactattaagttggctacacagtcactgtatgtactaggaactggtttccttgacattctagaatcaatggctaggagaggcattaatctttgaggggctgaacatatcatgaagctgagtcagtatggaaaattttcaaataaacagggtgctgaagttccatctgtctcatctgcttatgataagttcttattgattagtgaatgtagcttaagcctttgtatgtgtcctcagggggcagaccgactttaagagggaccagataacgtttgaatggagggattatatttcaggtgttttagcttgaaatttattttttaaaaaaagaaaaatttaaaaaatatataaataaaatagaacaaagccggtgatgcaagttgatattataaacaggcagttttagcacagaaagaaaatactgacctgtctgcattctggtacggtgggtgcaggtcccagctgggtatgacatgatacatttttaattattctcaccagcaagtaaaaggaaaatgaacaatcttttggaattgtctttgaaaaggatcaaagagtaggaaattcacatttgacctaacattacttgcctatagaagtatggcatttccaagcttttgtctgaggagcatctcagagaagtgagagtaaatctgagttagcttaaaaattggtagggaggaagaaaatctctgcaaataatgattttatgtttgttggccaagtgaaatgatctatcattgtgtttgggaggttttattttcttatgtttttaaaattggtaaatgctttatagatgtatttttatccaagtgccactccaatttgtgtatgtaataaaattatttatattaaaagtgggaaataattgtcaacattttttttgagtatagatttattaggggtggcaaagaagagtgctagttagcagttttccatgtaaagttgtccttgactgatttgtccacatgtcagttgtaactcccccactccctgcaaaaggaattatttctaacccagatgtatcacttgaaactttttagaagcaaaataatcagggaagttcctagaaaggtgtttggctttttggtttttgagggttggggtaaagaagacttcccccacaactgtcagcacaaaacagggtattgatttttaactctgatgtttctattggagttgaatactaaataaataactataatgagggaaatacatttctaataaaattccctacattctagaaacatccctgttttaatttttttatctaaatctttttgtgctttatgtgtaaagaaaaaaatgtactgagttacaatgcattttattaacactatgtacataatagctgctttgtgttcagaatagtagcagttgctttgtatattaaagtgatccttgtgaatttgtgaaatattgtcataaagtgctttttcttactgtaatctttgtggtatcaactgtcataatgctctttttacacaaacatttatgtgcagtcacataaacatgcttttaaaaactctgtaagtctcttttttggggatgggatctctatattttgttgggttttttttgctagtagtgtgaagccatgttttattggacttaaagttacaatatattacaagcttgtgttggaaggcagcaaaactaattcagacaacaacatgtcttcagttactggatccctaattttcaggacaaaacctgtttttcaataagattgaacagtgcctatttgtggatttggagatgttactgtcaagatgactaatggagacatacgaccagctgtgtctgatgtcataaaacacgtgttcactgaaaggacaataagactatataccttctcaggtccccttgcaattctaaaactctgtgatcatataaattggaaggaaaggggaggggatatggttaatctttgcttaagctgtaagaataaaaaagttatctcctatactattaacttctgaaataagttctgagacgagacatctgaaaataagcagctgcattatttgtatgtttcttcactgccaagatgtgttcaagcctgctatacctgccattgtattggaaggcttaatgaatttcatttattttctgcaacaacgattacagaatttattgcacaaaatgagacattttgagagtgatattaattacatgagggacaataggcatgaactaggattgttctaagcaaatcggaatcgggtcaccctgccacgttcaggtgcttggaccttcaggaaaagattgcccatcttgtcatttgaccaggcactgaagtgacaagaccatccttgagaagtcacatccaaagataaaattctgatccatttctagttttagtgtttcgccactgaagacttaacatatgtcttttacactcaggttgcaaaacacaggcccaagacaaacttaacttctcccccaaatcttccttccgctggtttttccatctcgtaagtggtgccactatccatctgttaaattgtttaggggaaacctagaaaagcactaccttaatcagtgttatccttcttcttaactgtgcgtcctaatttctccacatctttcttaagtgcagtgaccaaaccggatgagaattctaacacgggcctgacatcaaatggaaaggaaggataatgtccaggagttggaatgttatccttgtttttaattaagatgcaattcacataaattaactttttaagtgaacaattaagtggtagtacatccacaatggtgtacaaccaccacttctatctagctccaaaacattctcatcactccaaaagtaaagtcccgttactctccattttctcctcccaccgcccttgtccctggcaaccaccaatctgcttcctgtttctttggatttacatccgggtatttcatgtgagactcatacactgtgtattacttctttcgtctagctttaatgtgttgttgaggttgatccattgtaacatgttatcactacttcattcctttttatagctaagtatactttttatagtaagtatgccattgtagatatataccacaagtttatcgattcatccagttgagttgtttctactgtttggctaatgttcatagtgctgttatgaatgttcgtgtacaagtatttgagtccgtgttttcaattatttggggtatatgcctgggagtggagttgctgggtcatgttgaaatcgcacatttaactttttgaggaactgtcaaactttccctcagcagctgtaccgttttaccttccaccattgatgtatgagggttccaatttctccacaccttcaccaacacttattttgccattttaaaaattatagccatcctcatgggtgtggtctctcattgtggttttgatttgcatttccctgattactaatgatgtggagcatcttttgttgtctttggccatctgcgtatcttctttgaagaaatgtctgttgaggtcctttgttcattgaaattttgttgttgggttctgagttccttatatattctgggtactaggcccttataatattttcgcctataagtttttgctttataatgtcctcattgttttcaaacttactttatgtaatatgtacacttctaaaaaaaagaaacatggaaaagggcaaactgtaaaaaaaaaaaaaaaaa

SEQ ID NO: 299532 - DNA, 984 bp, Artificial Sequence
  derived and/or modified sequence
atgactatggagtcgggagctgagaaccagcagtctggcgatgctgctgttacagaggccgagaatcaacagatgacagtccaggcccaaccgcaaatagccacccttgctcaggtaagcatgccagcagcccacgccacatcctcagcccctaccgtgaccttggtgcagttgcctaacggacaaacggtacaggtacatggggtgattcaggctgctcagccgtctgtgattcaatccccgcaggtacagactgttcaaatctccactatagctgagagcgaagactcgcaggaaagcgtggactctgtaaccgattctcaaaaacgccgggaaatactaagcaggcgtccaagctacagaaaaatactcaacgacctttcctcagatgctcccggagttcccaggatcgaggaggaaaaaagcgaggaagagacaagtgcccccgctatcacaaccgtcactgtgcccactcctatttatcagaccagttccggacagtacattgccatcacgcaaggcggagcaattcagctagccaataatggcacggatggagtacagggcctccagaccctaactatgaccaatgcagcagctacacagcccgggaccaccattctgcagtacgcccagacgacagacggccagcagattcttgtgccttctaaccaggttgttgtacaggccgcctccggagatgttcagacctatcagatacgcaccgcacctacgagcactattgcaccaggtgtggtgatggcttcatccccagccctgcccacccagccggccgaagaggctgcccggaaaagggaggtccgactgatgaagaatcgggaggcggcaagagagtgcagaagaaagaaaaaagagtatgtaaagtgcctggagaatagggtggcagtccttgaaaaccagaacaaaaccctgatcgaggagttgaaagctttgaaagacctgtattgccacaagagcgactag

SEQ ID NO: 299533 - DNA, 984 bp, Artificial Sequence
  derived and/or modified sequence
atgactatggagtctggagcggagaatcaacagtcgggcgatgccgcagtgacagaggccgagaaccagcaaatgaccgtgcaggcgcaaccgcaaatcgctacattggcccaggtctcgatgccggctgctcacgccacaagttcagcccctacggtcaccttagtgcaactgcctaatggacagactgtgcaggtgcacggggttatccaggcagcacaaccttccgtgattcagtcgccccaggtacagactgttcagatctctaccattgctgagtcggaagactctcaggaaagtgtggacagtgtaacggatagtcagaaaagaagggaaatcctgtcacgtaggccttcttatcgaaaaatcctgaatgatctgtcttctgacgcgcccggggtgcctaggatcgaggaggaaaaaagcgaagaggagacctctgctccagctattaccacagtgactgtgcccacacctatctatcaaacaagttccggtcaatacattgcaatcacacaggggggcgctatacagctggcgaacaacggaacagacggggtccagggcctgcagactctgacgatgacgaatgccgccgcaacacagcctggtaccaccatcctccagtacgcacaaacaactgacggtcagcagatcttggtgccaagtaaccaggtcgtggtgcaagctgcctcaggtgacgtacagacgtaccagatacgaactgctccgacgagcacaattgcccccggggtggttatggctagtagccccgctcttcctactcagccggcagaagaagctgcccggaaacgggaagtgaggctcatgaagaatagggaagccgctagagaatgcaggaggaagaaaaaagagtacgtcaagtgtcttgagaatagggttgctgtgctcgaaaatcagaataaaaccctgattgaggaactcaaggccctcaaagacctgtactgtcacaaatctgactag

SEQ ID NO: 299534 - DNA, 705 bp, Artificial Sequence
  derived and/or modified sequence
atgactatggagtctggagccgaaaaccagcaaagcggggatgccgcagtgacagaagccgaaaaccagcagatgacagtgcaggcccagcctcagattgctacccttgcccaggtgtcaatgccagccgctcatgccaccagtagcgcccccacagtgacgctcgtgcagctcccaaacggccagaccgtgcaagtgcacggagtgattcaggctgcgcaacctagtgtgattcagagtccccaggttcaaactgttcagatttcgactatagccgaatccgaggactcacaggagagtgttgattccgtgactgacagccagaagaggcgtgagatcttatcccgtcggccatcttatcggaagatactgaacgatctctcgtcagatgctcctggcgttccacgcatcgaagaagagaaaagcgaagaggaaacatcagcacctgccattaccaccgtgactgtgccaactcctatctatcagacttcctctgggcaatacatagcgattacccaaggtggggccatccagctggcaaacaatggtacagatggggtgcaggggctgcagactttgaccatgaccaacgcagctgccacacaacctggcaccacgatccttcaatatgcccagaccacggacggccaacagattctagtgccctccaatcaagtggtagtgcaagggacccagaaattatag

SEQ ID NO: 299535 - DNA, 984 bp, Artificial Sequence
  derived and/or modified sequence
atgaccatggagagcggggctgagaaccagcagagcggagatgctgctgtgacagaagctgagaaccagcagatgacagtgcaggcccagccccagatcgccaccctggcccaggtgtccatgcctgctgcccacgccaccagcagcgcccccaccgtgaccctggtgcagctgcccaacggccagacagtgcaggtgcatggagtcatccaggccgcccagcccagcgtcatccagagcccccaggtgcagacagtgcagatcagcaccatcgccgagagcgaggacagccaggagagcgtggacagcgtgacagacagccagaagaggcgggagatcctgagccggcggcccagctacaggaagatcctgaatgacctgagcagtgatgcccctggggtgcccagaattgaggaggagaagtctgaggaggagaccagcgccccagccatcaccaccgtgacagtgcccacccccatctaccagaccagcagcggccagtacatcgccatcacccagggcggggccatccagctggccaacaacggcacagatggagtgcagggcctgcagaccctgaccatgaccaatgctgctgccacccagcccggcaccaccatcctgcagtatgcccagaccacagatggccagcagatcctggtgcccagcaaccaggtggtggtgcaggccgccagcggagatgtgcagacctaccagatcagaacagcccccaccagcaccatcgcccctggggtggtgatggccagcagccctgccctgcccacccagcctgctgaggaggccgccaggaagcgggaggtgcggctgatgaagaaccgggaggccgccagagaatgtagaaggaagaagaaggagtatgtgaagtgcctggagaacagagtggccgtgctggagaaccagaacaagaccctcatcgaggagctgaaggccctgaaggacctgtactgccacaagagtgactag

SEQ ID NO: 299536 - DNA, 705 bp, Artificial Sequence
  derived and/or modified sequence
atgaccatggagagcggggctgagaaccagcagagcggagatgctgctgtgacagaagctgagaaccagcagatgacagtgcaggcccagccccagatcgccaccctggcccaggtgtccatgcctgctgcccacgccaccagcagcgcccccaccgtgaccctggtgcagctgcccaacggccagacagtgcaggtgcatggagtcatccaggccgcccagcccagcgtcatccagagcccccaggtgcagacagtgcagatcagcaccatcgccgagagcgaggacagccaggagagcgtggacagcgtgacagacagccagaagaggcgggagatcctgagccggcggcccagctacaggaagatcctgaatgacctgagcagtgatgcccctggggtgcccagaattgaggaggagaagtctgaggaggagaccagcgccccagccatcaccaccgtgacagtgcccacccccatctaccagaccagcagcggccagtacatcgccatcacccagggcggggccatccagctggccaacaacggcacagatggagtgcagggcctgcagaccctgaccatgaccaatgctgctgccacccagcccggcaccaccatcctgcagtatgcccagaccacagatggccagcagatcctggtgcccagcaaccaggtggtggtgcagggcacccagaagctgtag

SEQ ID NO: 299537 - DNA, 984 bp, Artificial Sequence
  derived and/or modified sequence
atgaccatggagagcggcgccgagaaccagcagagcggcgacgccgccgttacggaagccgagaatcagcagatgacagtgcaggctcagcctcaaatcgctacactggctcaagtgagcatgccagctgcccatgccacctcatcagctcctaccgtgaccctggttcagcttccaaacggtcagacagtgcaggtccacggtgtcattcaggcagcacaaccctctgtcattcagagcccccaggttcaaacagttcagatctcaacaattgccgagtctgaagactcgcaagaatcagtggactctgtgaccgacagtcagaaaagacgagagattctgagtcgccgccccagctataggaagattcttaacgatttgtctagcgacgctcccggagtcccacgcatcgaggaggagaaatctgaagaagagacatcagcccccgcaatcacaactgtgactgttcccacgccaatttaccagacatcgagcggccaatacatcgccattacccaaggtggcgcgatccagctagccaacaatggcacggacggagtccagggactgcagactttaactatgaccaatgccgccgcgacccagccggggaccacaattctgcagtacgcacagacgacagatggacagcaaattctggtgccatcaaatcaggtggttgttcaggccgccagcggcgacgttcagacatatcagatcagaaccgcccccacttctaccatcgcacccggcgttgttatggcaagcagccctgccctgcctacacagcccgcagaagaagccgcccggaagcgagaggtcaggttaatgaagaaccgcgaggccgcccgcgagtgtcgcagaaagaagaaagaatatgtaaagtgcttagaaaatagagtcgcagtcctggagaaccaaaacaaaacgctgatagaggaactcaaggccttgaaagatctatactgccacaaaagcgactag

SEQ ID NO: 299538 - DNA, 984 bp, Artificial Sequence
  derived and/or modified sequence
atgaccatggagagcggcgccgagaaccagcagagcggcgacgccgccgtgacagaggcagagaaccagcagatgaccgtccaggcacagccacagattgctacactcgcacaggtcagcatgcctgccgcccacgccacttccagcgcgccgacagtgacactggtgcagctccccaacggccagacagtgcaggtacacggcgtaatccaagctgcccagccctcggtgattcagtcaccccaggtacagactgtccagattagtaccatcgcagagagtgaggactcccaggaatctgtggactccgttaccgacagtcaaaagaggcgtgagattctaagccgacgcccatcctaccgcaagattctgaacgatcttagcagcgacgcaccaggggtcccccgcattgaagaagaaaaatctgaggaagagactagtgccccggccataaccaccgtgacggtgcctactcccatctatcagacctccagtgggcagtacatcgctattactcaaggaggggcgattcagctggctaacaacggcacagacggagtgcagggcctgcagactctaactatgaccaacgcagccgccacgcagcctgggaccacgatcctccagtacgcacaaacaactgacgggcagcagatcctggtgccctcaaaccaggtggtggtgcaagctgcttctggagatgttcagacatatcagattcggacggcccctacaagtacaatcgcacccggggttgtcatggcttcctccccagcactacccacgcaacctgcagaagaggcggcccgcaaacgggaagtgcgtctgatgaagaatcgggaggcagctagggaatgcaggagaaagaaaaaagaatatgtcaagtgcctggaaaaccgggtggccgtcctggagaaccaaaataaaactctgatcgaggaactgaaagccctcaaggacctgtattgccacaagtcagattag

SEQ ID NO: 299539 - DNA, 705 bp, Artificial Sequence
  derived and/or modified sequence
atgaccatggagagcggcgccgagaaccagcagagcggcgacgccgctgtgacagaggctgagaaccagcagatgaccgtacaggcacagcctcagattgccacgctggcacaggtatcaatgccagccgcacacgctaccagcagtgctccgactgtgaccctcgtccagctgcctaacggccagaccgtccaggtgcacggtgtaatccaggcggcgcaaccaagcgtgatccagtccccccaggtgcagacagtccagatctctaccattgcagagtccgaggactcccaagaatccgtggattctgtcacagacagccagaaaagaagggagattctgtcccgccgcccttcctaccggaagattcttaatgatctgagttcggatgcacctggagtgccccggatcgaagaggagaagagtgaagaggaaactagcgcccctgcgattactaccgtgaccgtgcccactcccatttatcaaacgagttctggccagtacatcgccattacacagggcggggctattcaacttgctaataacggcacagatggcgtacagggcctgcagaccctcaccatgaccaacgctgctgctacacagccaggaacaaccatactgcagtatgcccaaaccactgacggtcagcagatactggtgccatctaaccaggtagtggtccagggaacccagaagctctag

SEQ ID NO: 299540 - DNA, 984 bp, Artificial Sequence
  derived and/or modified sequence
atgaccatggagtcgggcgctgagaatcagcagtcgggtgatgcagccgttaccgaagctgagaaccagcagatgaccgtgcaagcacagccacagatcgccaccctcgcgcaggtgtcaatgcctgccgcacacgccacctcaagcgcacctacggtaaccttggtgcagctgccgaatggccagaccgtgcaggtacacggcgtcatacaggccgcacagccatcggtcatccaatcaccccaggttcaaactgtacagatatcaacgatcgccgaaagcgaggatagccaggaaagcgtggatagtgtgaccgactcacagaagcggagagagatcctgagccgtcgaccctcttaccgaaagatcctgaatgacctctccagcgatgcacctggcgtgccccgtattgaggaagaaaagtctgaagaagaaactagcgcacctgcgatcacgaccgtgaccgtacccactccaatctaccagacatcatcagggcagtatatcgcgatcactcagggaggtgctatccagctggctaacaatggtacagacggcgtgcaggggttgcaaaccctgaccatgacaaacgcagccgctacccagcccggaactacaattctacaatatgcgcagacgacagatggccaacagatcctggtgccaagcaatcaggttgtcgttcaggcggcttcaggtgatgtgcagacctatcaaatccgcaccgctccaacaagtaccatcgctcccggtgtagttatggcctcctcgcctgccctgcctacgcagccagcagaagaagccgcaaggaagagggaagttcgactgatgaagaatcgggaggccgcacgggaatgcagacgcaagaagaaggaatacgttaaatgtctggagaacagggtcgcggtgctggagaatcagaataaaaccctgatcgaggaacttaaagccctgaaggacctttactgtcacaagagcgactag

SEQ ID NO: 299541 - DNA, 984 bp, Artificial Sequence
  derived and/or modified sequence
atgaccatggagagtggagccgagaatcaacagtccggcgatgccgcagttaccgaggctgagaatcagcagatgacggtgcaggcacagcctcagatagccacactagctcaggtcagcatgcccgcagctcacgcaacaagctcagctcctactgtgactctggtgcaattgccgaacggacagacagttcaggtgcacggagtgattcaggcagcccagcctagcgttatccagagcccacaggtccagaccgtccagatttcaactatcgcagagagcgaagatagccaggaaagtgtggatagtgtgactgatagccagaaacgaagggaaattctgagtagacggccatcataccgtaagatcctaaacgacctgagtagcgacgccccaggggtccctaggattgaagaagagaagtctgaagaagagacctcagcaccagccatcaccacagtgactgtccctactccgatttaccagacaagcagtggacagtatatcgcaatcacccagggtggggcaatccagctggcgaataacggcacagatggggtgcagggattgcaaaccttgaccatgaccaatgcagctgctacccagcccggaacaacaattctgcagtatgctcagacaacagacggacaacagattctggttccctcaaatcaggtggtcgttcaggcagcgtccggagatgtccagacgtaccagatcaggaccgcaccgacaagtactatcgccccaggcgttgtgatggccagctcgcctgccctgccaacacagcctgcagaagaggccgctcgcaaacgagaggtaagactgatgaaaaatagggaggccgcacgtgaatgtcggcgaaaaaaaaaagagtatgtcaaatgcctcgaaaatcgggttgcggtgctcgaaaaccaaaacaaaaccttaatcgaggaactgaaagctcttaaggatctttactgtcacaagtccgattag

SEQ ID NO: 299542 - DNA, 705 bp, Artificial Sequence
  derived and/or modified sequence
atgacgatggagtctggtgcggagaaccagcagagtggggatgccgcagtcacagaagcagagaatcagcaaatgaccgtccaggcccaaccacaaatagcaactctggcccaagtgtccatgcccgctgcccatgccacatcttcagcgccaacagtcaccctcgttcagctgcccaatggccagacagtgcaggtccatggtgtaatccaggccgctcagccatcagtcattcagagtcctcaggttcagactgttcagatttctacgatcgccgagagcgaggattcacaggaatctgtggactccgtgacagattcacagaagcgaagagagatcttgtcccggaggccctcgtacagaaaaatcttgaatgacctgtctagcgacgccccaggagtccccagaatcgaggaagagaagtccgaggaggaaacctcggcccctgcaattaccaccgtgactgtgcccacacccatctatcagacaagctccgggcagtatattgccatcactcagggtggcgctatccagcttgccaacaacggtacagatggcgtgcaggggctgcagacactgaccatgactaatgccgctgccacccagcctggaaccacaatcctgcaatacgctcagacgacggacgggcaacaaatattagtgccgtcaaatcaagtagtcgtgcagggaacccagaaattgtag

SEQ ID NO: 299543 - DNA, 7588 bp, Artificial Sequence
  derived and/or modified sequence
gcgcactcggcactgggcggcgctggctggctccctggctgcggctcctcagtcggcggcggctgctgctgcctgtggcccgggcggctgggagaagcggagtgttggtgagtgacgcggcggaggtgtagtttgacgcggtgtgttacgtgggggagagaataaaactccagcgagatccgggccgtgaacgaaagcagtgacggaggagcttgtaccaccggtaactaaatgaccatggaatctggagccgagaaccagcagagtggagatgcagctgtaacagaagctgaaaaccaacaaatgacagttcaagcccagccacagattgccacattagcccaggtatctatgccagcagctcatgcaacatcatctgctcccaccgtaactctagtacagctgcccaatgggcagacagttcaagtccatggagtcattcaggcggcccagccatcagttattcagtctccacaagtccaaacagttcagatttcaactattgcagaaagtgaagattcacaggagtcagtggatagtgtaactgattcccaaaagcgaagggaaattctttcaaggaggccttcctacaggaaaattttgaatgacttatcttctgatgcaccaggagtgccaaggattgaagaagagaagtctgaagaggagacttcagcacctgccatcaccactgtaacggtgccaactccaatttaccaaactagcagtggacagtatattgccattacccagggaggagcaatacagctggctaacaatggtaccgatggggtacagggcctgcaaacattaaccatgaccaatgcagcagccactcagccgggtactaccattctacagtatgcacagaccactgatggacagcagatcttagtgcccagcaaccaagttgttgttcaagctgcctctggagacgtacaaacataccagattcgcacagcacccactagcactattgcccctggagttgttatggcatcctccccagcacttcctacacagcctgctgaagaagcagcacgaaagagagaggtccgtctaatgaagaacagggaagcagctcgagagtgtcgtagaaagaagaaagaatatgtgaaatgtttagaaaacagagtggcagtgcttgaaaatcaaaacaagacattgattgaggagctaaaagcacttaaggacctttactgccacaaatcagattaatttgggatttaaattttcacctgttaaggtggaaaatggactggcttggccacaacctgaaagacaaaataaacattttattttctaaacatttctttttttctatgcgcaaaactgcctgaaagcaactacagaatttcattcatttgtgcttttgcattaaactgtgaatgttccaacacctgcctccacttctcccctcaagaaattttcaacgccaggaatcatgaagagacttctgcttttcaacccccaccctcctcaagaagtaataatttgtttacttgtaaattgatgggagaaatgaggaaaagaaaatctttttaaaaatgatttcaaggtttgtgctgagctccttgattgccttagggacagaattaccccagcctcttgagctgaagtaatgtgtgggccgcatgcataaagtaagtaaggtgcaatgaagaagtgttgattgccaaattgacatgttgtcacattctcattgtgaattatgtaaagttgttaagagacataccctctaaaaaagaactttagcatggtattgaaggaattagaaatgaatttggagtgctttttatgtatgttgtcttcttcaatactgaaaatttgtccttggttcttaaaagcattctgtactaatacagctcttccatagggcagttgttgcttcttaattcagttctgtatgtgttcaacatttttgaatacattaaaagaagtaaccaactgaacgacaaagcatggtatttgaattttaaattaaagcaaagtaaataaaagtacaaagcatattttagttagtactaaattcttagtaaaatgctgatcagtaaaccaatcccttgagttatataacaagatttttaaataaatgttattgtcctcaccttcaaaaatatttatattgtcactcatttacgtaaaaagatatttctaatttactgttgcccattgcacttacataccaccaccaagaaagccttcaagatgtcaaataaagcaaagtgatatatatttgtttatgaaatgttacatgtagaaaaatactgattttaaatattttccatattaacaatttaacagagaatctctagtgaattttttaaatgaaagaagttgtaaggatataaaaagtacagtgttagatgtgcacaaggaaagttattttcagacatatttgaatgactgctgtactgcaatatttggattgtcattcttacaaaacatttttttgttctcttgtaaaaagagtagttattagttctgctttagctttccaatatgctgtatagcctttgtcattttataattttaattcctgattaaaacagtctgtatttgtgtatatcatacattgttttcaataccacttttaattgttactcattttattcactaagctcgataaatctaacagttactcttaaaaaaaaaaaaaaaagactaaggtggattttaaaaattggaaactgacataatgttaggttataatttctcatttggagccgggcgcagtggctcacgcctgtaatcccagcactttgggaggccaaggtgggtggatcacctgtggtcaagagttcaagaccagcctggccatcatggtgaaaccccatctctactaaaaatacaaaaattagccaggcgtggtggctggcgcctgtaatcccagctactcaggaggttgaggcagcagaattgcttgaacccaggaggcagagggttgcagtgagccgagatagcaccattgcactccagcctgggcgactccatctcaaaaaataaaaataaaaaaaatgtctcatttgggaaggaaattccttttaaaaaagagttgagacacttagaaaactaatgttttatatttagtcaagagttatttaagaaagtcaagcttgtttaacaacaaaatatgaagatttaagtgttaattgctggatccattttaaaataagattttaattaacatttgtaaatggtatattttcgtttgtaacaaaccattgtcttttttcaaggatgaacagagtttatgaaggagcatcattctaagaattaagtgatgtagtctttatgtttggacagttcaccagattctcaagaaggctttcaaacaactataaagtttgatgtttgtcctgctgagctaatggggaaagttatagcataaaaattgtgtaaccgcatagatatgtcatttttaaaaactggtttaacagaaatcaagcaaagtcacaaatatgttcacaagttggaattatttattgagtcaaaatgtcgaatcgaacattttgaatgaagtaagtgttataaatgaaaaattgcctgatgtttagcagtttgtattctctaaagctttttttcaaaagttcaggctttctacttactgggaagttggtggtcctcttagtccctgataaatcaaggcaatcacattcatgtgagctggatgaatttataagttataaagaccttatccttcataccttgaggatgattgcactggttttgaagtcagttgcttaatgatgaggtgagaaatgtatcctgttgctaaatctgtcttagacccttggtgaaacttgaagatttcagtttataaagataaaatcaagcatcttttgtgcagttttctttttttaatgcaagaatggtggggaggtttgtttgtaagcatgaaactttgagaatctttattaagaaaatgacataatttttaaaaaccttgtagccaagaacatatgtggccacattaccagtaataaatgtttttctctttatattggccaaaagggaataaaaatgtcatcataggaatttgtacatatgctactgatttgcctagaaaatagcaagtttgatattgctcactttgcaaatatagggccatgtggcacttttatctataggacagattaataaaaatgaagtggggaggggtttatttttgatatattactcttatgagttttcaagctttgataatgtttaactgaaaagtggcttagaaagggctagatccaatgtgttcattattaaataattgctatcagatacaattttaagttcattctttttcaaactcaagtaccatattggcaaccataatattgtcataggtgctctcttcatttagatattcttggggggggtggcatttgtataatatatgtgtacatatatatatatatatatatatatacatacagtatataatctaaagctctgagagctcttaagtcaggaatgctgagtattatagtatattgaggtcagatgaaattttacatttttgtgtgttctgttgcattccttctggtagtttctatgactgcattactccagcactcatgattgattttatcttctaattttcttccaagtattttattttttattagttttctttggcttgatacttttaaatatgttactagtcacttgaaagcctctcccccaaaagtatttggtttgtatgctttgtctgtggcagctataacagtggtaagaacattttgaagatagctttttaaaggaaccactgattttttcaaaaatcatcctgggggaggaattttggcatttcatttgagcagggattttgtcagaaaatgtgttttgatggtaggtcagcagcagtgctagtctctgaaagcacaataccagtcaggcagcctatcccatcagatgtcatctggctgaagtttatctctgtctctcaggataaatccctgtaggacaaatccctactatcatttctaccttttggggtgacatgtggaatcatacaaaggcttaggaagaaatacgtttgtttaaaccaggatgctttacttacttgaagtgacttcaatctagatttcttttaatatttaacaaatttttaattctatgatcagccacagtcagctattaccataaattggtctctgtttattttgaagatcacggctgcttcattttgcaggattaagtagggctaatgtatcttaaagttaagatcttgaattaaagtgagttttagaaatagtgttacataccttttcagttgttttcaagaggctttatttttgttgcctttgtagccctgaaagctgttggtatattttttccctcatggacccaatagaaaagttgtatatttatttggattatatttacattctgtcctttgtaaatgtttggtgtaacttgcacttttttaaatgacccagtttgggtattagcaacttaagaaattccctcatcaagtaattctcaactttttagtctttctcctctcttcaaatcatgtgactttttaaatggaagtttttcattgattaaaatattttagcacctaaaagctagccttaaaaacagctgtaaaagaaaaacatcaggaaattagatatgactagcccagttaattaaaagacgggctcaaaccttgttttattctttttcatcttggatgaagattgaagggaaaataactcaagtgcataatatttattttcaatttttaatgagactttatcctcatcacaacattaatactgtacatagtatgccaaaatatccattaatttgtctagaatagtacaagactttttaaagcaattgtcctcacagagaccacatgtaatatactgaaatatgttcatttttaatggctttgttaacatcaaagaaatgctgcctaaatttgatttcagatgaggaaggagaaagtaaagtgtgcatagtaaggctgtaggtgaagagttgtgagataaatagttcactcagttgtacaaagcacaactagaactttttgttgggaggcttacatacatcttgaatattcttaatgtaataatgttgactattaagttggctacacagtcactgtatgtactaggaactggtttccttgacattctagaatcaatggctaggagaggcattaatctttgaggggctgaacatatcatgaagctgagtcagtatggaaaattttcaaataaacagggtgctgaagttccatctgtctcatctgcttatgataagttcttattgattagtgaatgtagcttaagcctttgtatgtgtcctcagggggcagaccgactttaagagggaccagataacgtttgaatggagggattatatttcaggtgttttagcttgaaatttattttttaaaaaaagaaaaatttaaaaaatatataaataaaatagaacaaagccggtgatgcaagttgatattataaacaggcagttttagcacagaaagaaaatactgacctgtctgcattctggtacggtgggtgcaggtcccagctgggtatgacatgatacatttttaattattctcaccagcaagtaaaaggaaaatgaacaatcttttggaattgtctttgaaaaggatcaaagagtaggaaattcacatttgacctaacattacttgcctatagaagtatggcatttccaagcttttgtctgaggagcatctcagagaagtgagagtaaatctgagttagcttaaaaattggtagggaggaagaaaatctctgcaaataatgattttatgtttgttggccaagtgaaatgatctatcattgtgtttgggaggttttattttcttatgtttttaaaattggtaaatgctttatagatgtatttttatccaagtgccactccaatttgtgtatgtaataaaattatttatattaaaagtgggaaataattgtcaacattttttttgagtatagatttattaggggtggcaaagaagagtgctagttagcagttttccatgtaaagttgtccttgactgatttgtccacatgtcagttgtaactcccccactccctgcaaaaggaattatttctaacccagatgtatcacttgaaactttttagaagcaaaataatcagggaagttcctagaaaggtgtttggctttttggtttttgagggttggggtaaagaagacttcccccacaactgtcagcacaaaacagggtattgatttttaactctgatgtttctattggagttgaatactaaataaataactataatgagggaaatacatttctaataaaattccctacattctagaaacatccctgttttaatttttttatctaaatctttttgtgctttatgtgtaaagaaaaaaatgtactgagttacaatgcattttattaacactatgtacataatagctgctttgtgttcagaatagtagcagttgctttgtatattaaagtgatccttgtgaatttgtgaaatattgtcataaagtgctttttcttactgtaatctttgtggtatcaactgtcataatgctctttttacacaaacatttatgtgcagtcacataaacatgcttttaaaaactc

SEQ ID NO: 299544 - DNA, 2005 bp, Artificial Sequence
  derived and/or modified sequence
agaccactcctcccggcgccgggctcagcccgccttcgccttccctctccccgcggaaccccttctcgtcgcccgaagaaacccgaaggtcttcggcaagttccgtccccagcgcgggggcggggccgctcgagctgctccgggcctagctcggctgtttccgtgcgcggccgctgcgcactcggcactgggcggcgctggctggctccctggctgcggctcctcagtcggcggcggctgctgctgcctgtggcccgggcggctgggagaagcggagtgttggtaactaaatgaccatggaatctggagccgagaaccagcagagtggagatgcagctgtaacagaagctgaaaaccaacaaatgacagttcaagcccagccacagattgccacattagcccaggtatctatgccagcagctcatgcaacatcatctgctcccaccgtaactctagtacagctgcccaatgggcagacagttcaagtccatggagtcattcaggcggcccagccatcagttattcagtctccacaagtccaaacagttcagatttcaactattgcagaaagtgaagattcacaggagtcagtggatagtgtaactgattcccaaaagcgaagggaaattctttcaaggaggccttcctacaggaaaattttgaatgacttatcttctgatgcaccaggagtgccaaggattgaagaagagaagtctgaagaggagacttcagcacctgccatcaccactgtaacggtgccaactccaatttaccaaactagcagtggacagtatattgccattacccagggaggagcaatacagctggctaacaatggtaccgatggggtacagggcctgcaaacattaaccatgaccaatgcagcagccactcagccgggtactaccattctacagtatgcacagaccactgatggacagcagatcttagtgcccagcaaccaagttgttgttcaagctgcctctggagacgtacaaacataccagattcgcacagcacccactagcactattgcccctggagttgttatggcatcctccccagcacttcctacacagcctgctgaagaagcagcacgaaagagagaggtccgtctaatgaagaacagggaagcagctcgagagtgtcgtagaaagaagaaagaatatgtgaaatgtttagaaaacagagtggcagtgcttgaaaatcaaaacaagacattgattgaggagctaaaagcacttaaggacctttactgccacaaatcagattaatttgggatttaaattttcacctgttaaggtggaaaatggactggcttggccacaacctgaaagacaaaataaacattttattttctaaacatttctttttttctatgcgcaaaactgcctgaaagcaactacagaatttcattcatttgtgcttttgcattaaactgtgaatgttccaacacctgcctccacttctcccctcaagaaattttcaacgccaggaatcatgaagagacttctgcttttcaacccccaccctcctcaagaagtaataatttgtttacttgtaaattgatgggagaaatgaggaaaagaaaatctttttaaaaatgatttcaaggtttgtgctgagctccttgattgccttagggacagaattaccccagcctcttgagctgaagtaatgtgtgggccgcatgcataaagtaagtaaggtgcaatgaagaagtgttgattgccaaattgacatgttgtcacattctcattgtgaattatgtaaagttgttaagagacataccctctaaaaaagaactttagcatggtattgaaggaattagaaatgaatttggagtgctttttatgtatgttgtcttcttcaatactgaaaatttgtccttggttcttaaaagcattctgtactaatacagctcttccatagggcagttgttgcttcttaattcagttctgtatgtgttcaacatttttgaatacattaaaagaagtaaccaact

SEQ ID NO: 299545 - DNA, 1056 bp, Artificial Sequence
  derived and/or modified sequence
agaataaaactccagcgagatccgggccgtgaacgaaagcagtgacggaggagcttgtaccaccggtaactaaatgaccatggaatctggagccgagaaccagcagagtggagatgcagctgtaacagaagctgaaaaccaacaaatgacagttcaagcccagccacagattgccacattagcccaggtatctatgccagcagctcatgcaacatcatctgctcccaccgtaactctagtacagctgcccaatgggcagacagttcaagtccatggagtcattcaggcggcccagccatcagttattcagtctccacaagtccaaacagttcagatttcaactattgcagaaagtgaagattcacaggagtcagtggatagtgtaactgattcccaaaagcgaagggaaattctttcaaggaggccttcctacaggaaaattttgaatgacttatcttctgatgcaccaggagtgccaaggattgaagaagagaagtctgaagaggagacttcagcacctgccatcaccactgtaacggtgccaactccaatttaccaaactagcagtggacagtatattgccattacccagggaggagcaatacagctggctaacaatggtaccgatggggtacagggcctgcaaacattaaccatgaccaatgcagcagccactcagccgggtactaccattctacagtatgcacagaccactgatggacagcagatcttagtgcccagcaaccaagttgttgttcaaggtactcaaaaattgtaaagcaggatgtcagtgaatttgaattctgaacgtcagtttgaagatggtaacatgtttagtatataaatcttttccactcaaaccatacattttaattgatattaataattaatatgaataattttataaagaccttcaaatttttttaagtaacattaggttccttattaggagagcatattattacgctgtttttagaagcagtttgacaaatagtgattgtgtttgtttttacaaatggtgaatcagttagaaaaataaaacttcagtttatttag

SEQ ID NO: 299546 - DNA, 984 bp, Artificial Sequence
  derived and/or modified sequence
atgaccatggagagcggcgccgagaaccagcagagcggcgacgccgccgtgaccgaggccgagaaccagcagatgaccgtgcaggcccagccccagatcgccaccctggcccaggtgagcatgcccgccgcccacgccaccagcagcgcccccaccgtgaccctggtgcagctgcccaacggccagaccgtgcaggtgcacggcgtgatccaggccgcccagcccagcgtgatccagagcccccaggtgcagaccgtgcagatcagcaccatcgccgagagcgaggacagccaggagagcgtggacagcgtgaccgacagccagaagagaagagagatcctgagcagaagacccagctacagaaagatcctgaacgacctgagcagcgacgcccccggcgtgcccagaatcgaggaggagaagagcgaggaggagaccagcgcccccgccatcaccaccgtgaccgtgcccacccccatctaccagaccagcagcggccagtacatcgccatcacccagggcggcgccatccagctggccaacaacggcaccgacggcgtgcagggcctgcagaccctgaccatgaccaacgccgccgccacccagcccggcaccaccatcctgcagtacgcccagaccaccgacggccagcagatcctggtgcccagcaaccaggtggtggtgcaggccgccagcggcgacgtgcagacctaccagatcagaaccgcccccaccagcaccatcgcccccggcgtggtgatggccagcagccccgccctgcccacccagcccgccgaggaggccgccagaaagagagaggtgagactgatgaagaacagagaggccgccagagagtgcagaagaaagaagaaggagtacgtgaagtgcctggagaacagagtggccgtgctggagaaccagaacaagaccctgatcgaggagctgaaggccctgaaggacctgtactgccacaagagcgactag

SEQ ID NO: 299547 - DNA, 705 bp, Artificial Sequence
  derived and/or modified sequence
atgaccatggagagcggcgccgagaaccagcagagcggcgacgccgccgtgaccgaggccgagaaccagcagatgaccgtgcaggcccagccccagatcgccaccctggcccaggtgagcatgcccgccgcccacgccaccagcagcgcccccaccgtgaccctggtgcagctgcccaacggccagaccgtgcaggtgcacggcgtgatccaggccgcccagcccagcgtgatccagagcccccaggtgcagaccgtgcagatcagcaccatcgccgagagcgaggacagccaggagagcgtggacagcgtgaccgacagccagaagagaagagagatcctgagcagaagacccagctacagaaagatcctgaacgacctgagcagcgacgcccccggcgtgcccagaatcgaggaggagaagagcgaggaggagaccagcgcccccgccatcaccaccgtgaccgtgcccacccccatctaccagaccagcagcggccagtacatcgccatcacccagggcggcgccatccagctggccaacaacggcaccgacggcgtgcagggcctgcagaccctgaccatgaccaacgccgccgccacccagcccggcaccaccatcctgcagtacgcccagaccaccgacggccagcagatcctggtgcccagcaaccaggtggtggtgcagggcacccagaagctgtag

SEQ ID NO: 299548 - protein, 230 aa, Artificial Sequence
  derived and/or modified sequence
MTMESGAENQQSGDAAVTEAENQQMTVQAQPQIATLAQVSMPAAHATSSAPTVTLVQLPNGQTVQVHGVIQAAQPSVIQSPQVQTVQSSCKDLKRLFSGTQISTIAESEDSQESVDSVTDSQKRREILSRRPSYRKILNDLSSDAPGVPRIEEEKSEEETSALPTQPAEEAARKREVRLMKNREAARECRRKKKEYVKCLENRVAVLENQNKTLIEELKALKDLYCHKSD

SEQ ID NO: 299549 - protein, 153 aa, Artificial Sequence
  derived and/or modified sequence
MPAAHATSSAPTVTLVQLPNGQTVQVHGVIQAAQPSVIQSPQVQTVQSSCKDLKRLFSGTQISTIAESEDSQESVDSVTDSQKRREILSRRPSYRKILNDLSSDAPGVPRIEEEKSEEETSAPAITTVTVPTPIYQTSSGQYTYLRDTTYSCQ

SEQ ID NO: 299550 - DNA, 693 bp, Artificial Sequence
  derived and/or modified sequence
atgaccatggagtcaggggctgagaaccaacaaagtggggacgcggccgtcacagaagccgaaaaccaacaaatgacagtccaagctcaaccccagattgccacattggcccaggtgtctatgcctgcagcccatgccacaagctccgctcccactgtgaccctcgtccagttgcccaacggccaaacagttcaagtccatggagtcatccaagccgcccagccctccgttatccagagcccccaggtacaaactgtgcagtccagctgcaaagacttaaaacgtttatttagcgggactcaaatctcaaccatcgccgagtcggaggattcacaggagtcagtggactctgtgactgacagccaaaagaggagagaaattctctccaggcgcccatcttatcgcaagatattgaacgacctgtcctctgacgcacccggcgtgcctaggatcgaagaagaaaaatctgaagaagagacctccgcactgcccacccagccagctgaggaggccgctaggaagagggaagtgcgtctgatgaagaacagggaggctgccagagagtgtcggcggaagaaaaaggagtatgttaagtgtttggagaaccgcgtggcggtgctcgaaaatcagaacaagacgctcatagaagagctaaaagctctgaaagacttatattgccataaatcagattag

SEQ ID NO: 299551 - DNA, 240 bp, Artificial Sequence
  derived and/or modified sequence
atgacgatggagagcggagccgagaaccaacaaagcggggatgccgctgtaacagaagcggagaaccagcagatgactgtgcaagcccagccccagatcgctactctggcacaagtatctatgcccgctgctcacgccacttccagcgcccccacggtcacattggttcagcttcctaacggacagactgtgcaagtgcatggggtgattcaggccgcacagccttccgtgatccaatag

SEQ ID NO: 299552 - DNA, 549 bp, Artificial Sequence
  derived and/or modified sequence
atgaccatggagagcggtgccgaaaaccagcagagtggcgacgccgcagttacagaggccgaaaatcagcaaatgactgtccaggcacagcctcagatcgctacgctagctcaggtttccatgcctgcagcccatgccacgtcatctgcccccacggtgacactcgtccagctgcccaatggccagacagtgcaggttcacggcgtgatccaagcggctcagccgtccgtcatacaatcccctcaggtgcagaccgtacagtcctcttgcaaggacttaaaacgactattcagtggcactcagatttccaccattgctgaatccgaggattcccaagagtcagtggatagtgtgactgactcccagaaacgacgcgaaatcctctccagacggccctcttacaggaaaattttgaacgatctaagttcagacgctccgggagtaccgagaattgaggaggagaaatccgaagaggagacctcagctcctgctatcactactgtgacggtccccacccccatttatcaaactagcagcggccagtactag

SEQ ID NO: 299553 - DNA, 399 bp, Artificial Sequence
  derived and/or modified sequence
atgacaatggaatcaggtgccgaaaaccagcagtctggggatgccgctgttacagaagccgagaaccagcagatgaccgtacaggcgcaaccccaaattgccactttggcccaggtgagcatgcctgctgcacacgctacgagctccgctcccaccgtgaccttagtccagttgcccaacggccagactgtacaggtccatggggtcattcaggcggcgcaaccatctgtgatccagagtcctcaagtccagacagtgcagtcatcatgtaaggatctgaagaggttgtttagtggcacacagatcagcactatagcagaaagtgaagattcccaggagtcggtggactccgtgacggacagccaaaaacgccgcgagatcttgtcaaggaggccttag

SEQ ID NO: 299554 - DNA, 462 bp, Artificial Sequence
  derived and/or modified sequence
atgccagctgcccacgccaccagcagcgcccccactgtgacgctagtgcagttgccaaacggccagacagtgcaggtccacggtgtgattcaggccgcacagccaagcgtgattcagagcccccaagtgcagactgtacagagctcatgtaaagatttgaaacgcctgttctccgggacgcagatctccacgatcgccgagtcagaggatagccaggagagcgttgattcagttactgacagtcagaagaggcgggaaattttgagtcggaggccttcttatcgcaaaatcctcaatgatctcagtagcgatgctccaggagttccccgtatagaagaggagaagtccgaagaagagacttcggcccccgcaattacaacagtgacggttcccaccccaatctatcaaactagttccggacagtatacctatctccgagataccacctacagttgccagtag

SEQ ID NO: 299555 - DNA, 693 bp, Artificial Sequence
  derived and/or modified sequence
atgaccatggagagcggggctgagaaccagcagagcggagatgctgctgtgacagaagctgagaaccagcagatgacagtgcaggcccagccccagatcgccaccctggcccaggtgtccatgcctgctgcccacgccaccagcagcgcccccaccgtgaccctggtgcagctgcccaacggccagacagtgcaggtgcatggagtcatccaggccgcccagcccagcgtcatccagagcccccaggtgcagacagtgcagagcagctgcaaggacctgaagaggctcttcagcggcacccagatcagcaccatcgccgagagcgaggacagccaggagagcgtggacagcgtgacagacagccagaagaggcgggagatcctgagccggcggcccagctacaggaagatcctgaatgacctgagcagtgatgcccctggggtgcccagaattgaggaggagaagtctgaggaggagaccagcgccctgcccacccagcctgctgaggaggccgccaggaagcgggaggtgcggctgatgaagaaccgggaggccgcccgggagtgcaggaggaagaagaaggagtatgtgaagtgcctggagaacagagtggccgtgctggagaaccagaacaagaccctgattgaggagctgaaggccctgaaggacctgtactgccacaagagtgactag

SEQ ID NO: 299556 - DNA, 240 bp, Artificial Sequence
  derived and/or modified sequence
atgaccatggagagcggggctgagaaccagcagagcggagatgctgctgtgacagaagctgagaaccagcagatgacagtgcaggcccagccccagatcgccaccctggcccaggtgtccatgcctgctgcccacgccaccagcagcgcccccaccgtgaccctggtgcagctgcccaacggccagacagtgcaggtgcatggagtcatccaggccgcccagcccagcgtcatccagtag

SEQ ID NO: 299557 - DNA, 549 bp, Artificial Sequence
  derived and/or modified sequence
atgaccatggagagcggggctgagaaccagcagagcggagatgctgctgtgacagaagctgagaaccagcagatgacagtgcaggcccagccccagatcgccaccctggcccaggtgtccatgcctgctgcccacgccaccagcagcgcccccaccgtgaccctggtgcagctgcccaacggccagacagtgcaggtgcatggagtcatccaggccgcccagcccagcgtcatccagagcccccaggtgcagacagtgcagagcagctgcaaggacctgaagaggctcttcagcggcacccagatcagcaccatcgccgagagcgaggacagccaggagagcgtggacagcgtgacagacagccagaagaggcgggagatcctgagccggcggcccagctacaggaagatcctgaatgacctgagcagtgatgcccctggggtgcccagaattgaggaggagaagtctgaggaggagaccagcgccccagccatcaccaccgtgacagtgcccacccccatctaccagaccagcagcggccagtactag

SEQ ID NO: 299558 - DNA, 399 bp, Artificial Sequence
  derived and/or modified sequence
atgaccatggagagcggggctgagaaccagcagagcggagatgctgctgtgacagaagctgagaaccagcagatgacagtgcaggcccagccccagatcgccaccctggcccaggtgtccatgcctgctgcccacgccaccagcagcgcccccaccgtgaccctggtgcagctgcccaacggccagacagtgcaggtgcatggagtcatccaggccgcccagcccagcgtcatccagagcccccaggtgcagacagtgcagagcagctgcaaggacctgaagaggctcttcagcggcacccagatcagcaccatcgccgagagcgaggacagccaggagagcgtggacagcgtgacagacagccagaagaggcgggagatcctgagccggcggccctag

SEQ ID NO: 299559 - DNA, 462 bp, Artificial Sequence
  derived and/or modified sequence
atgcctgctgcccacgccaccagcagcgcccccaccgtgaccctggtgcagctgcccaacggccagacagtgcaggtgcatggagtcatccaggccgcccagcccagcgtcatccagagcccccaggtgcagacagtgcagagcagctgcaaggacctgaagaggctcttcagcggcacccagatcagcaccatcgccgagagcgaggacagccaggagagcgtggacagcgtgacagacagccagaagaggcgggagatcctgagccggcggcccagctacaggaagatcctgaatgacctgagcagtgatgcccctggggtgcccagaattgaggaggagaagtctgaggaggagaccagcgccccagccatcaccaccgtgacagtgcccacccccatctaccagaccagcagcggccagtacacctacctgcgggacaccacctacagctgccagtag

SEQ ID NO: 299560 - DNA, 693 bp, Artificial Sequence
  derived and/or modified sequence
atgaccatggagagcggcgccgagaaccagcagagcggcgacgccgcagtaaccgaagcggaaaaccagcagatgacagtgcaagctcagccccagatcgctaccctcgcgcaggtttcaatgcccgcagcgcacgccaccagctctgccccgactgtcacactggtgcagctgcccaatggtcagaccgtccaggtacacggagtgatccaggctgcgcagcccagtgtcatccagtcgccccaggtccagacggtccagtcaagttgcaaagatttgaagcgcttgttctccggtactcagatcagtacaattgcagaatctgaggacagccaggagagcgtggacagtgtaactgattcccaaaaacgccgcgagatcttgagtcggaggccgtcatacagaaagattctcaacgatctgagctcagacgcacccggcgtgccaaggatcgaagaagaaaagtctgaagaagagacgtctgcgttgccaacccagcctgccgaggaagcagctcgtaagagagaagtaaggctgatgaagaacagggaagccgcgagagagtgccggagaaagaaaaaagagtacgttaaatgcctggaaaacagggttgctgtcctagagaatcagaataaaactttgatcgaggaacttaaagccctcaaggacctgtactgccacaaatctgactag

SEQ ID NO: 299561 - DNA, 240 bp, Artificial Sequence
  derived and/or modified sequence
atgaccatggagagcggcgccgagaaccagcagagcggcgacgccgctgtaacggaagctgagaaccagcagatgactgtacaggcccaaccccagatcgccactctggcacaggtgtctatgccagcggcgcatgccacttcttccgcaccgactgtgacccttgttcaactacccaacggccaaacagtccaggtgcacggcgtgatccaggcagcccagccctcggtgattcagtag

SEQ ID NO: 299562 - DNA, 549 bp, Artificial Sequence
  derived and/or modified sequence
atgaccatggagagcggcgccgagaaccagcagagcggcgacgccgccgtgacagaagccgagaaccaacagatgactgtccaggctcaacctcagatcgcaactttagcacaggtcagcatgccggcagcgcacgccacgtcgtccgcgcctaccgtcactctcgtccagctgcctaatggacagactgttcaagtgcacggggtgatccaggcagctcagccatctgtaatccagtctccccaggtacagaccgtgcagagctcgtgtaaagatctgaaaaggctgttctccggcacccagattagcacaatcgcagagtcggaagatagccaggaaagcgtggattcagtgaccgatagccagaagcggcgcgaaattctgtctaggcgaccctcctatagaaaaattcttaacgacctgagctcagacgctcccggggtgcccagaatcgaggaggaaaagagcgaagaggagacttccgctccagcgattacaacagtgaccgtgcccactccgatttaccaaacaagctcaggtcagtactag

SEQ ID NO: 299563 - DNA, 399 bp, Artificial Sequence
  derived and/or modified sequence
atgaccatggagagcggcgccgagaaccagcagagcggcgacgccgcggtgaccgaagccgagaatcagcaaatgacggtgcaggctcagccccagatcgccactctcgcccaggtgagcatgccagcagctcacgccacgtcttctgcacctaccgtgactctcgtacagctgcccaatggccaaaccgtccaggtgcacggcgtcatccaggccgcacagcctagcgtgatccagtctccacaagtgcagacagtgcagagttcttgtaaagacctgaaacggctcttctctggaacacagatctcaacaatagccgagtccgaagactcccaggaatcagtggatagcgtgacagattctcaaaaacgccgcgagatactatctagacggccgtag

SEQ ID NO: 299564 - DNA, 462 bp, Artificial Sequence
  derived and/or modified sequence
atgcccgccgcccacgccaccagcagcgcccccaccgtgaccctggtgcagctgcctaatggacaaaccgttcaggtacatggcgtgatacaggctgcacagccgtcagtcatacagtctcctcaagtgcagaccgtgcagagttcctgcaaggacctgaagagattgttcagcggaacccagattagcactatcgcggagtccgaagattcccaggagtcagtcgattccgtgacagacagccaaaagaggagggagatcctgagcaggcggcccagctaccggaagatactcaacgacctgagtagcgacgcccccggcgtcccaaggatagaggaggaaaagagtgaagaggaaacttctgcccctgcaattactaccgtgacagttcctacccccatataccaaacgagctccggtcaatacacttacttgagggatacaacatacagctgccagtag

SEQ ID NO: 299565 - DNA, 693 bp, Artificial Sequence
  derived and/or modified sequence
atgaccatggaaagcggtgccgagaaccagcagagcggtgatgcggctgtgactgaggccgaaaaccagcagatgactgtacaggctcagccgcagattgctaccctggcacaggtctctatgccggctgcccacgccacgtccagcgcacctaccgttacactcgtccagctgccaaatggacagaccgtccaagtccatggggtgatccaagcagcccagccctctgtcatccagtctccgcaggtacagacagtgcagagttcctgtaaggatctgaaaaggctattttcaggcacacagatctcaaccatagccgagtcagaagactcccaggaatccgtggactctgtgaccgatagccagaaaaggcgggagattctttcgaggcgaccaagctacagaaaaatccttaacgacttgtcctctgacgcacccggagttcctcgcattgaggaagagaagtcagaggaagaaacttcagctctgcctactcagcccgcagaagaagccgctcgcaaaagagaagtccgattaatgaagaatcgtgaggctgcaagagagtgtcggaggaaaaaaaaggagtacgtcaagtgtcttgagaaccgggtggccgtcctggagaaccaaaacaagactctgattgaagagctgaaagctcttaaagacctgtactgtcataagagtgattag

SEQ ID NO: 299566 - DNA, 240 bp, Artificial Sequence
  derived and/or modified sequence
atgacaatggagagtggtgcagagaatcagcaaagcggtgacgctgctgtaactgaagctgagaatcaacagatgaccgtgcaggcccaaccccaaatcgccacacttgcacaggtgagcatgccagcggctcacgctaccagctcagcgccaactgttaccctggtccagctccccaacgggcagaccgtccaggtgcatggagtgattcaagccgctcagcctagcgtcattcagtag

SEQ ID NO: 299567 - DNA, 549 bp, Artificial Sequence
  derived and/or modified sequence
atgaccatggagagtggcgcagaaaaccagcagagcggtgacgccgcagtcacggaagcagagaatcagcagatgaccgttcaagctcaaccacaaatagcaacgctcgcacaggtaagtatgcctgcagctcatgctacctccagcgctcccaccgtgactctggttcagcttcctaacggtcagacggtgcaggtgcatggtgtcatccaggcggcacagccgtcagtgattcaaagtccccaagtgcagacagtacagtcctcatgtaaagacttgaagcggctctttagcggcacccaaatctcaaccatcgctgaaagcgaggactcccaggagagtgtggattccgtgacagactctcagaaacggagggaaattctgagcaggagacctagctatcgcaaaattctcaatgacttgtcaagtgacgcccctggagtcccgaggatcgaggaagagaagagcgaagaagagaccagcgcaccggctattaccaccgtcactgtccccactcctatttaccaaacaagctctggccaatactag

SEQ ID NO: 299568 - DNA, 399 bp, Artificial Sequence
  derived and/or modified sequence
atgacaatggagtccggggcagaaaatcagcagtcaggcgacgcagccgtgacagaggctgagaatcagcagatgacagttcaagcccaaccacagattgctacactggctcaagtctctatgccagctgcccacgccacctctagtgcccctacagtgacgctggtgcagctgcccaacggtcagacggtgcaggtgcatggggtcattcaggccgcacagcctagcgtgattcagtccccacaggttcagacagtccagtcttcttgtaaggatctcaagagattgttttccggcactcagatcagtacgatcgctgagagtgaggacagccaagaaagtgtggactcggtcacagattcccagaaaagacgggaaatactcagcaggcggccatag

SEQ ID NO: 299569 - DNA, 462 bp, Artificial Sequence
  derived and/or modified sequence
atgcccgcagcacatgctacctcctctgcccctactgtgacccttgtgcaattacccaatggccaaactgtccaggtccatggggtcattcaagccgcacagccctctgtcattcagagtcctcaagtgcagaccgtccagagcagttgtaaggaccttaaacgactcttctccggtacgcagatatcaactatagcagagagcgaagacagtcaggagagcgttgacagcgtcactgactcccagaagcggagggaaattttatcccgtagaccttcttaccggaagatcttgaacgacctcagctccgacgccccaggggttccacgaatcgaggaggagaaaagtgaagaggagacatctgctccggctatcactaccgtgacagtccctactccaatctaccaaacctccagcggccagtacacatatctacgggacaccacttattcctgccaatag

SEQ ID NO: 299570 - DNA, 1629 bp, Artificial Sequence
  derived and/or modified sequence
gaacgaaagcagtgacggaggagcttgtaccaccggtaactaaatgaccatggaatctggagccgagaaccagcagagtggagatgcagctgtaacagaagctgaaaaccaacaaatgacagttcaagcccagccacagattgccacattagcccaggtatctatgccagcagctcatgcaacatcatctgctcccaccgtaactctagtacagctgcccaatgggcagacagttcaagtccatggagtcattcaggcggcccagccatcagttattcagtctccacaagtccaaacagttcagtcttcctgtaaggacttaaaaagacttttctccggaacacagatttcaactattgcagaaagtgaagattcacaggagtcagtggatagtgtaactgattcccaaaagcgaagggaaattctttcaaggaggccttcctacaggaaaattttgaatgacttatcttctgatgcaccaggagtgccaaggattgaagaagagaagtctgaagaggagacttcagcacttcctacacagcctgctgaagaagcagcacgaaagagagaggtccgtctaatgaagaacagggaagcagctcgagagtgtcgtagaaagaagaaagaatatgtgaaatgtttagaaaacagagtggcagtgcttgaaaatcaaaacaagacattgattgaggagctaaaagcacttaaggacctttactgccacaaatcagattaatttgggatttaaattttcacctgttaaggtggaaaatggactggcttggccacaacctgaaagacaaaataaacattttattttctaaacatttctttttttctatgcgcaaaactgcctgaaagcaactacagaatttcattcatttgtgcttttgcattaaactgtgaatgttccaacacctgcctccacttctcccctcaagaaattttcaacgccaggaatcatgaagagacttctgcttttcaacccccaccctcctcaagaagtaataatttgtttacttgtaaattgatgggagaaatgaggaaaagaaaatctttttaaaaatgatttcaaggtttgtgctgagctccttgattgccttagggacagaattaccccagcctcttgagctgaagtaatgtgtgggccgcatgcataaagtaagtaaggtgcaatgaagaagtgttgattgccaaattgacatgttgtcacattctcattgtgaattatgtaaagttgttaagagacataccctctaaaaaagaactttagcatggtattgaaggaattagaaatgaatttggagtgctttttatgtatgttgtcttcttcaatactgaaaatttgtccttggttcttaaaagcattctgtactaatacagctcttccatagggcagttgttgcttcttaattcagttctgtatgtgttcaacatttttgaatacattaaaagaagtaaccaactgaacgacaaagcatggtatttgaattttaaattaaagcaaagtaaataaaagtacaaagcatattttagttagtactaaattcttagtaaaatgctgatcagtaaaccaatcccttgagttatataacaagatttttaaataaatgttattgtcctcacctt

SEQ ID NO: 299571 - DNA, 580 bp, Artificial Sequence
  derived and/or modified sequence
gaattcaggaggagttgcccacttgttagtgtgcagggaaatgtgtttttctcatttctagttgaggtcattctttttttttttttttttttaaaccatagcatgtgttccattagttatgaatgtattatttctttagagtcaaaattcacaactcatttctttgaatattatctctgatcctagatgggatcaaaattgccctagatttaggagttttaaaagtttactaggttgtggggaagatgggtttatttttcataaacttgaactagaatgttgacgattataaggactgggacacttcctaaaggtcaaaatattttaaggcgaaagtaactaaatgaccatggaatctggagccgagaaccagcagagtggagatgcagctgtaacagaagctgaaaaccaacaaatgacagttcaagcccagccacagattgccacattagcccaggtatctatgccagcagctcatgcaacatcatctgctcccaccgtaactctagtacagctgcccaatgggcagacagttcaagtccatggagtcattcaggcggcccagccatcagttattcag

SEQ ID NO: 299572 - DNA, 651 bp, Artificial Sequence
  derived and/or modified sequence
actgggcggcgctggctggctccctggctgcggctcctcagtcggcggcggctgctgctgcctgtggcccgggcggctgggagaagcggagtgttggtaactaaatgaccatggaatctggagccgagaaccagcagagtggagatgcagctgtaacagaagctgaaaaccaacaaatgacagttcaagcccagccacagattgccacattagcccaggtatctatgccagcagctcatgcaacatcatctgctcccaccgtaactctagtacagctgcccaatgggcagacagttcaagtccatggagtcattcaggcggcccagccatcagttattcagtctccacaagtccaaacagttcagtcttcctgtaaggacttaaaaagacttttctccggaacacagatttcaactattgcagaaagtgaagattcacaggagtcagtggatagtgtaactgattcccaaaagcgaagggaaattctttcaaggaggccttcctacaggaaaattttgaatgacttatcttctgatgcaccaggagtgccaaggattgaagaagagaagtctgaagaggagacttcagcacctgccatcaccactgtaacggtgccaactccaatttaccaaactagcagtggacagtata

SEQ ID NO: 299573 - DNA, 518 bp, Artificial Sequence
  derived and/or modified sequence
gaaagcagtgacggaggagcttgtaccaccggaactgttggggacacagtgactaaggcaaaatatgtgtcaaaagaaagcagtcaaaggaaaaagggatcacctttggtgaagtaactaaatgaccatggaatctggagccgagaaccagcagagtggagatgcagctgtaacagaagctgaaaaccaacaaatgacagttcaagcccagccacagattgccacattagcccaggtatctatgccagcagctcatgcaacatcatctgctcccaccgtaactctagtacagctgcccaatgggcagacagttcaagtccatggagtcattcaggcggcccagccatcagttattcagtctccacaagtccaaacagttcagtcttcctgtaaggacttaaaaagacttttctccggaacacagatttcaactattgcagaaagtgaagattcacaggagtcagtggatagtgtaactgattcccaaaagcgaagggaaattctttcaaggaggcctt

SEQ ID NO: 299574 - DNA, 693 bp, Artificial Sequence
  derived and/or modified sequence
atgaccatggagagcggcgccgagaaccagcagagcggcgacgccgccgtgaccgaggccgagaaccagcagatgaccgtgcaggcccagccccagatcgccaccctggcccaggtgagcatgcccgccgcccacgccaccagcagcgcccccaccgtgaccctggtgcagctgcccaacggccagaccgtgcaggtgcacggcgtgatccaggccgcccagcccagcgtgatccagagcccccaggtgcagaccgtgcagagcagctgcaaggacctgaagagactgttcagcggcacccagatcagcaccatcgccgagagcgaggacagccaggagagcgtggacagcgtgaccgacagccagaagagaagagagatcctgagcagaagacccagctacagaaagatcctgaacgacctgagcagcgacgcccccggcgtgcccagaatcgaggaggagaagagcgaggaggagaccagcgccctgcccacccagcccgccgaggaggccgccagaaagagagaggtgagactgatgaagaacagagaggccgccagagagtgcagaagaaagaagaaggagtacgtgaagtgcctggagaacagagtggccgtgctggagaaccagaacaagaccctgatcgaggagctgaaggccctgaaggacctgtactgccacaagagcgactag

SEQ ID NO: 299575 - DNA, 240 bp, Artificial Sequence
  derived and/or modified sequence
atgaccatggagagcggcgccgagaaccagcagagcggcgacgccgccgtgaccgaggccgagaaccagcagatgaccgtgcaggcccagccccagatcgccaccctggcccaggtgagcatgcccgccgcccacgccaccagcagcgcccccaccgtgaccctggtgcagctgcccaacggccagaccgtgcaggtgcacggcgtgatccaggccgcccagcccagcgtgatccagtag

SEQ ID NO: 299576 - DNA, 549 bp, Artificial Sequence
  derived and/or modified sequence
atgaccatggagagcggcgccgagaaccagcagagcggcgacgccgccgtgaccgaggccgagaaccagcagatgaccgtgcaggcccagccccagatcgccaccctggcccaggtgagcatgcccgccgcccacgccaccagcagcgcccccaccgtgaccctggtgcagctgcccaacggccagaccgtgcaggtgcacggcgtgatccaggccgcccagcccagcgtgatccagagcccccaggtgcagaccgtgcagagcagctgcaaggacctgaagagactgttcagcggcacccagatcagcaccatcgccgagagcgaggacagccaggagagcgtggacagcgtgaccgacagccagaagagaagagagatcctgagcagaagacccagctacagaaagatcctgaacgacctgagcagcgacgcccccggcgtgcccagaatcgaggaggagaagagcgaggaggagaccagcgcccccgccatcaccaccgtgaccgtgcccacccccatctaccagaccagcagcggccagtactag

SEQ ID NO: 299577 - DNA, 399 bp, Artificial Sequence
  derived and/or modified sequence
atgaccatggagagcggcgccgagaaccagcagagcggcgacgccgccgtgaccgaggccgagaaccagcagatgaccgtgcaggcccagccccagatcgccaccctggcccaggtgagcatgcccgccgcccacgccaccagcagcgcccccaccgtgaccctggtgcagctgcccaacggccagaccgtgcaggtgcacggcgtgatccaggccgcccagcccagcgtgatccagagcccccaggtgcagaccgtgcagagcagctgcaaggacctgaagagactgttcagcggcacccagatcagcaccatcgccgagagcgaggacagccaggagagcgtggacagcgtgaccgacagccagaagagaagagagatcctgagcagaagaccctag

SEQ ID NO: 299578 - DNA, 462 bp, Artificial Sequence
  derived and/or modified sequence
atgcccgccgcccacgccaccagcagcgcccccaccgtgaccctggtgcagctgcccaacggccagaccgtgcaggtgcacggcgtgatccaggccgcccagcccagcgtgatccagagcccccaggtgcagaccgtgcagagcagctgcaaggacctgaagagactgttcagcggcacccagatcagcaccatcgccgagagcgaggacagccaggagagcgtggacagcgtgaccgacagccagaagagaagagagatcctgagcagaagacccagctacagaaagatcctgaacgacctgagcagcgacgcccccggcgtgcccagaatcgaggaggagaagagcgaggaggagaccagcgcccccgccatcaccaccgtgaccgtgcccacccccatctaccagaccagcagcggccagtacacctacctgagagacaccacctacagctgccagtag

SEQ ID NO: 299579 - protein, 51 aa, Artificial Sequence
  derived and/or modified sequence
MKNREAARECRRKKKEYVKCLENRVAVLENQNKTLIEELKALKDLYCHKSD

SEQ ID NO: 299580 - DNA, 156 bp, Artificial Sequence
  derived and/or modified sequence
atgaaaaatcgtgaggccgctagggaatgccgcagaaagaaaaaggaatatgtgaagtgcctggagaacagggtcgcggttctcgaaaaccagaataaaactctaattgaggaattgaaagccctgaaagacttatactgccacaagagcgattag

SEQ ID NO: 299581 - DNA, 156 bp, Artificial Sequence
  derived and/or modified sequence
atgaagaaccgggaggccgccagagaatgtagaaggaagaagaaggagtatgtgaagtgcctggagaacagagtggccgtgctggagaaccagaacaagaccctcatcgaggagctgaaggccctgaaggacctgtactgccacaagagtgactag

SEQ ID NO: 299582 - DNA, 156 bp, Artificial Sequence
  derived and/or modified sequence
atgaagaaccgggaggccgcccgggagtgccggcggaagaagaaggaatatgttaagtgcctcgagaatagagtagccgtgcttgaaaatcaaaataagaccctgattgaggagctaaaggcactcaaggatctctactgtcacaagtccgattag

SEQ ID NO: 299583 - DNA, 156 bp, Artificial Sequence
  derived and/or modified sequence
atgaagaatcgggaagccgcaagggagtgtcggagaaagaaaaaagagtacgttaagtgtttggagaaccgggtcgcggtgctggagaatcagaacaaaacactgattgaggaactgaaggcactgaaggacctgtactgtcacaaatccgattag

SEQ ID NO: 299584 - DNA, 156 bp, Artificial Sequence
  derived and/or modified sequence
atgaagaacagagaggccgccagagagtgcagaagaaagaagaaggagtacgtgaagtgcctggagaacagagtggccgtgctggagaaccagaacaagaccctgatcgaggagctgaaggccctgaaggacctgtactgccacaagagcgactag

SEQ ID NO: 299585 - protein, 544 aa, Artificial Sequence
  derived and/or modified sequence
MASSEVARHLLFQSHMATKTTCMSSQGSDDEQIKRENIRSLTMSGHVGFESLPDQLVNRSIQQGFCFNILCVGETGIGKSTLIDTLFNTNFEDYESSHFCPNVKLKAQTYELQESNVQLKLTIVNTVGFGDQINKEESYQPIVDYIDAQFEAYLQEELKIKRSLFTYHDSRIHVCLYFISPTGHSLKTLDLLTMKNLDSKVNIIPVIAKADTVSKTELQKFKIKLMSELVSNGVQIYQFPTDDDTIAKVNAAMNGQLPFAVVGSMDEVKVGNKMVKARQYPWGVVQVENENHCDFVKLREMLICTNMEDLREQTHTRHYELYRRCKLEEMGFTDVGPENKPVSVQETYEAKRHEFHGERQRKEEEMKQMFVQRVKEKEAILKEAERELQAKFEHLKRLHQEERMKLEEKRRLLEEEIIAFSKKKATSEIFHSQSFLATGSNLRKDKDRKKEPGCRFELLCIDVRACETNGGRKDAEKAPIFCKTEVPEHRRSSSQANFIKKKLEVCFDFAVICFITSIFGEQPQLLIFMEKYFQVQGQYISQSE

SEQ ID NO: 299586 - DNA, 1635 bp, Artificial Sequence
  derived and/or modified sequence
atggcctcttccgaggtggccaggcatctcctgttccagagtcacatggctaccaagacgacctgcatgtccagtcagggctctgatgacgaacaaattaaacgagagaacatccgctctcttacgatgtctggtcacgtaggatttgaaagtctgccggaccagttggtgaaccgatcaatccaacagggcttttgctttaacatcctgtgtgttggtgagacaggaattggcaagtctaccctcatcgacaccctttttaacaccaactttgaagattatgagtcttcgcacttctgcccgaacgtgaagttaaaagcccaaacgtatgaattgcaggagtccaacgtgcagctaaagttgaccattgtgaacaccgtgggcttcggggatcagattaataaggaggagagctaccaaccgattgtggattacatcgatgcacagtttgaggcctacctgcaagaagagctgaagataaagaggtccctcttcacgtatcacgactctcggatccatgtctgcctctacttcatctcaccgaccgggcattccctcaagaccctggatctgttgactatgaagaacctggactcaaaggtcaatatcattccagtgatagccaaggccgatactgtatccaaaacagaactccaaaagttcaagattaaactgatgagcgagctggtgtcaaacggggtgcagatataccagtttccaacagatgacgacaccatagccaaagtaaatgcagcgatgaacggccagttacccttcgccgtcgtcgggtcaatggacgaggtcaaagtaggcaacaagatggtaaaggcccgccagtacccctggggcgtcgtacaggttgaaaacgaaaatcattgcgattttgttaaattaagagagatgcttatatgtacaaacatggaggaccttcgcgagcagacacacaccagacactacgaactgtaccgcagatgcaaactggaggaaatgggattcacggacgtggggccagagaataagccggtgtctgttcaggagacatacgaagcaaagaggcacgagtttcatggtgagcgacagcgcaaggaggaggagatgaagcagatgttcgttcagagggtcaaggagaaggaggccatcttaaaggaagctgaacgggaattacaggctaagtttgaacaccttaagaggctccatcaggaggagagaatgaagcttgaggagaagcggaggttactcgaagaagagattatagccttcagcaaaaagaaggccacttcagagatattccacagccagtctttcctagctactgggagtaacctgcgaaaggataaggaccgcaagaaagaacctgggtgccggtttgagctgctttgcattgacgtgagagcctgtgagacaaatggaggaagaaaagatgccgagaaagctcccatcttctgcaaaacggaggtaccagagcacaggagatctagtagtcaagctaactttatcaaaaagaaactggaagtgtgtttcgatttcgcagtcatttgttttataacctccattttcggcgagcagccgcagttgcttatttttatggagaaatacttccaagtacagggtcagtacatctcacagagtgaatag

SEQ ID NO: 299587 - DNA, 1635 bp, Artificial Sequence
  derived and/or modified sequence
atggccagcagcgaggtggcccggcacctgctcttccagagccacatggccaccaagaccacctgcatgagcagccagggcagtgatgatgagcagatcaagcgggagaacatccgcagcctgaccatgagcggccacgtgggctttgagagcctgcctgaccagctggtgaacagaagcatccagcagggcttctgcttcaacatcctgtgtgtgggggagactggaattggcaagagcaccctgattgacaccctcttcaacaccaactttgaggactatgagagcagccacttctgccccaacgtgaagctgaaggcccagacctatgagctgcaggagagcaatgtgcagctgaagctgaccatcgtgaacacagtgggctttggagaccagatcaacaaggaggagagctaccagcccatcgtggactacattgatgcccagtttgaggcctacctgcaggaggagctgaagatcaagaggagcctcttcacctaccatgacagccgcatccacgtgtgcctgtacttcatcagccccaccggccacagcctgaagaccctggacctgctgaccatgaagaacctggacagcaaggtgaacatcatccctgtgattgccaaggctgacacagtgtccaagacagagctgcagaagttcaagatcaagctgatgtctgagctggtgtccaatggagtgcagatctaccagttccccacagatgatgacaccatcgccaaggtgaatgctgccatgaatggccagctgccctttgctgtggtgggctccatggatgaggtgaaggtgggcaacaagatggtgaaggcccggcagtacccctggggcgtggtgcaggtggagaatgaaaaccactgtgactttgtgaagctgcgggagatgctgatctgcaccaacatggaggacctgcgggagcagacccacaccaggcactatgagctgtaccgccgctgcaagctggaggagatgggcttcacagatgtgggccctgagaacaagcctgtgtctgtgcaggagacctatgaggccaagagacatgagttccacggggagcggcagaggaaggaggaggagatgaagcagatgtttgtgcagagggtgaaggagaaggaggccatcctgaaggaggccgagcgggagctgcaggccaagtttgagcacctgaagaggctgcaccaggaggagaggatgaagctggaggagaagaggcggctgctggaggaggagatcatcgccttcagcaagaagaaggccaccagcgagatcttccacagccagagcttcctggccaccggcagcaacctgaggaaggacaaggacaggaagaaggagcccggctgccgctttgagctgctgtgcattgatgtgcgggcctgtgagaccaatggaggcaggaaggatgctgagaaggcccccatcttctgcaagacagaggtgcctgagcaccggcgcagcagcagccaggccaacttcatcaagaagaagctggaggtgtgctttgattttgctgtgatctgcttcatcaccagcatctttggagagcagccccagctgctgatcttcatggagaagtacttccaggtgcagggccagtacatcagccagagcgagtag

SEQ ID NO: 299588 - DNA, 1635 bp, Artificial Sequence
  derived and/or modified sequence
atggccagcagcgaggtggcccggcacctgctgttccagagccacatggccacaaaaaccacctgcatgagctctcagggtagtgatgacgagcagataaaacgcgagaatatcagatctctcactatgtctggccacgtgggctttgaatccttacccgatcagcttgtcaatcgtagtatacagcagggcttctgttttaatatcttgtgcgtgggagagactggaataggcaaaagcacactgatcgacacactttttaacaccaatttcgaggattatgaaagcagtcacttttgtcccaatgtgaaactcaaggcacaaacctacgaacttcaagaatcgaatgtgcaactgaagctgactatcgtcaataccgttggatttggagatcagataaacaaggaggagagttatcagcctattgtggattacattgatgcacaatttgaagcatacttgcaggaggagctgaaaatcaagcggtccttgttcacataccacgacagcaggatacatgtatgtttgtatttcatttccccaactggccacagcctgaagacgctggaccttctaaccatgaagaaccttgactcaaaagtcaacatcattcccgtgattgccaaagcagacacggtcagtaagaccgaactgcagaagttcaagatcaaacttatgtcagagcttgtctccaacggcgtgcagatctatcagttccccaccgatgatgacaccatagcgaaggtgaacgctgccatgaatgggcagctgcccttcgccgttgtcggcagtatggatgaagtgaaggtggggaataagatggttaaggcacgccagtacccgtggggcgtggttcaggtggaaaatgaaaaccattgtgattttgtgaaactgcgggagatgctcatctgtaccaatatggaagaccttcgcgagcagacccatacaagacattacgagctctataggaggtgtaagctggaagagatgggctttacagacgtcggtccagagaataagccagtgagtgttcaggaaacctacgaggcaaagaggcatgaattccacggtgaacgccaaaggaaggaggaagaaatgaagcagatgtttgttcaaagggtaaaagaaaaagaagccatcctcaaggaggccgagcgcgaattacaagcaaagttcgaacacctcaaaagactgcatcaggaggaaaggatgaaactggaagagaagcgtcggctcctggaggaggagatcattgccttctcaaagaagaaggccacatcggagattttccacagccagagtttcctggcaactggatcaaacctaaggaaggacaaagatcggaagaaggagcctggctgtaggttcgaactgctttgcatcgatgtaagagcgtgcgagacaaatgggggtcgtaaagacgctgagaaggcaccaatcttctgtaaaacagaggtgccagagcaccggcgctcctcgtctcaggctaatttcattaaaaagaagctggaggtgtgttttgatttcgcagtgatttgcttcattacctctatctttggtgaacagccccagctgctgatcttcatggaaaaatacttccaggtgcagggccagtatatttcacagtccgagtag

SEQ ID NO: 299589 - DNA, 1635 bp, Artificial Sequence
  derived and/or modified sequence
atggcctcaagtgaagtggccagacacctgctcttccagtcccatatggcgactaagacaacctgcatgagttcacagggctcagacgatgagcagataaagagagaaaatataagaagcctcacgatgtcagggcatgttgggttcgaatcactgcctgatcaactggttaacagaagcatacagcagggattctgcttcaatattctctgcgtaggcgagactggcatcggcaagtcgaccctcatcgatactctgttcaatactaatttcgaggattatgagtccagccacttttgtcctaacgtcaagctcaaggcacagacctacgagctccaggaatcaaacgtccaactcaagctgacaatagtgaataccgtgggttttggggatcagattaacaaagaagaaagctaccaacccatagtcgactacattgacgctcagttcgaggcatatctacaggaggagttgaagattaagaggtccctgttcacctatcatgattctcgtattcacgtatgtctgtactttatatccccaaccggacatagcttgaagactcttgacttgctgaccatgaagaatctggatagcaaggtgaacatcatccctgttatagctaaggccgatacagtgtcgaagaccgaactccagaaatttaagattaagttaatgagcgaattggtctcaaacggagtccagatttaccagttccctaccgacgatgacaccatcgccaaggttaacgctgctatgaacggtcagttgccatttgccgtggtgggttctatggatgaggtgaaagtgggaaacaagatggtgaaagcgagacagtatccttggggagtggtccaagtggagaacgagaatcactgtgacttcgtaaagctgagagaaatgttaatctgtacgaacatggaggacctaagggagcagacccacactcggcactatgaactgtatcgacgttgtaagctggaggagatggggtttaccgacgtggggccagaaaataagcccgtgtccgtgcaagagacgtatgaagcaaagagacacgagttccacggagagcgacagcggaaggaggaggaaatgaaacagatgtttgtgcaacgggtcaaagagaaggaggcgatcttaaaggaagctgagagagagcttcaggccaagttcgaacatctgaagcgcctgcatcaggaggaacgtatgaagttagaagagaagcgccgtcttctcgaggaggagattatcgcttttagtaaaaaaaaagccacctcggaaatcttccatagtcagtccttccttgctaccggaagtaacctaagaaaagacaaagatagaaagaaggagcctggatgccgcttcgaactgctgtgcattgacgttagagcctgcgaaacaaacggcggtagaaaagatgccgagaaagctccaattttttgcaagacagaggttcccgagcatcgcaggagctccagccaggccaacttcatcaagaaaaagcttgaggtgtgcttcgacttcgccgttatctgcttcatcacctccatatttggcgagcagcctcaattactgatttttatggagaagtacttccaggttcaggggcagtatatctcccagtctgagtag

SEQ ID NO: 299590 - DNA, 3091 bp, Artificial Sequence
  derived and/or modified sequence
gtcttcctggagtcccagctctccttcagcccgccccaacgctgacgctcagtcctcaggcgtcgagggtagctcctgtgaggggctcgcttggcgcaggcaaaacgctcagcgcgcaccacagggcgtccgccccaaccccgcccccggaggcctccagctcggccccgcccctgtcccttccccgtcgcggaggcagcctagcctcgcgccccgcccgttgcttctgccctccggccttcccgccgccgtcgccgggaccagccgctcggggccgggctgatacagccgcttcaccgtgcccctgcccgcgaccatggcctcctccgaggtggcgcggcacctgctctttcagtctcacatggcaacgaaaacaacttgtatgtcttcacaaggatcagatgatgaacagataaaaagagaaaacattcgttcgttgactatgtctggccatgttggttttgagagtttgcctgatcagctggtgaacagatccattcagcaaggtttctgctttaatattctctgtgtgggggaaactggaattggaaaatcaacactgattgacacattgtttaatactaattttgaagactatgaatcctcacatttttgcccaaatgttaaacttaaagctcagacatatgaactccaggaaagtaatgttcaattgaaattgaccattgtgaatacagtgggatttggtgaccaaataaataaagaagagagctaccaaccaatagttgactacatagatgctcagtttgaggcctatctccaagaagaactgaagattaagcgttctctctttacctaccatgattctcgcatccatgtgtgtctctacttcatttcaccgacaggccactctctgaagacacttgatctcttaaccatgaagaaccttgacagcaaggtaaacattataccagtgattgccaaagcagatacggtttctaaaactgaattacagaagtttaagatcaagctcatgagtgaattggtcagcaatggcgtccagatataccagttcccaacggatgatgacactattgctaaggtcaacgctgcaatgaatggacagttgccgtttgctgttgtgggaagtatggatgaggtaaaagtcggaaacaagatggtcaaagctcgccagtacccttggggtgttgtacaagtggaaaatgaaaaccactgtgactttgtaaagctgcgggaaatgctcatttgtacaaatatggaggacctgcgagagcagacccataccaggcactatgagctttacaggcgctgcaaactggaggaaatgggctttacagatgtgggcccagaaaacaagccagtcagtgttcaagagacctatgaagccaaaagacatgagttccatggtgaacgtcagaggaaggaagaagaaatgaaacagatgtttgtgcagcgagtaaaggagaaagaagccatattgaaagaagctgagagagagctacaggccaaatttgagcaccttaagagacttcaccaagaagagagaatgaagcttgaagaaaagagaagacttttggaagaagaaataattgctttctctaaaaagaaagctacctccgagatatttcacagccagtcctttctggcaacaggcagcaacctgaggaaggacaaggaccgtaagaaggaaccaggctgtcgattcgaactcctgtgcattgatgtcagagcttgtgaaaccaatggtggacgtaaagacgcagagaaagctccaattttttgtaaaacagaagttccagagcacagaaggtcatcatcacaagcaaactttattaaaaaaaaactagaagtgtgctttgattttgctgttatttgttttatcacttctatatttggtgaacagccacagttactgatatttatggaaaagtactttcaagtacaaggtcaatacataagccagagtgaatgatactacaagttgagcatctctaattcaaaaatctgaaatccagaagcttcaaaatctgaatctttttgagcactgacttgaccccacaagtggaaaattccccacccgacacctttgctttctgatggttcagtttaaacagattttgtttcttgcacaaaatttttgtataaattactttcaggctatatgtataaggtggatgtgaaacatgaattatgtaattagagtcgggtcccgttgtgtatatgcagatattccaaacctgaaatccaaaacacttctggtccctagcattttggataagggatactcagcttgtacctatatattcatatatattcactgttgttagaaatgtttaagttgctgttctgtgatgaatctaaatcttttctcttgctaccaagctattgtcactgcagtgcattataccaaagagcgaagtcagtgccactgaaaatacagaacccattaatatcgtggctatctgattacatttatattccaagatgaaccttttttatatatgctaaaaattttggggaatatgttttgggatgtattatggagctaaaactctaacctcttaatagttttatagaacttaaaaattttttatacaattacccaattggtgatatgatcttaagcttttgtgtcagattatttaatatgatgacttcatgctttattatgccttattatggctgacgtattactgtggtgaaacaaaatatctttaaaagttaaaacatccagatatataagctattttttcctaaggataaagtacctttgagcatgagtgtatcacagctttcattaggaaaacttttcattacatacttgtttaaactctgtcttccagggtaaaaataataaggttgaatcattttattaaaaatactttttaagaaaataactatgaacatctgaatattaaagatataaaaatgcacataattcatatttcaggtggtatttgcattcagtgccttactggtattctcagaacattttaatgatttctaacatttcttaacagtcatagatatatacattttcattttttgtacttgaatattctaaataaaactgacatttactcttgacaaataaaacatatatttactaaaa

SEQ ID NO: 299591 - DNA, 1635 bp, Artificial Sequence
  derived and/or modified sequence
atggccagcagcgaggtggccagacacctgctgttccagagccacatggccaccaagaccacctgcatgagcagccagggcagcgacgacgagcagatcaagagagagaacatcagaagcctgaccatgagcggccacgtgggcttcgagagcctgcccgaccagctggtgaacagaagcatccagcagggcttctgcttcaacatcctgtgcgtgggcgagaccggcatcggcaagagcaccctgatcgacaccctgttcaacaccaacttcgaggactacgagagcagccacttctgccccaacgtgaagctgaaggcccagacctacgagctgcaggagagcaacgtgcagctgaagctgaccatcgtgaacaccgtgggcttcggcgaccagatcaacaaggaggagagctaccagcccatcgtggactacatcgacgcccagttcgaggcctacctgcaggaggagctgaagatcaagagaagcctgttcacctaccacgacagcagaatccacgtgtgcctgtacttcatcagccccaccggccacagcctgaagaccctggacctgctgaccatgaagaacctggacagcaaggtgaacatcatccccgtgatcgccaaggccgacaccgtgagcaagaccgagctgcagaagttcaagatcaagctgatgagcgagctggtgagcaacggcgtgcagatctaccagttccccaccgacgacgacaccatcgccaaggtgaacgccgccatgaacggccagctgcccttcgccgtggtgggcagcatggacgaggtgaaggtgggcaacaagatggtgaaggccagacagtacccctggggcgtggtgcaggtggagaacgagaaccactgcgacttcgtgaagctgagagagatgctgatctgcaccaacatggaggacctgagagagcagacccacaccagacactacgagctgtacagaagatgcaagctggaggagatgggcttcaccgacgtgggccccgagaacaagcccgtgagcgtgcaggagacctacgaggccaagagacacgagttccacggcgagagacagagaaaggaggaggagatgaagcagatgttcgtgcagagagtgaaggagaaggaggccatcctgaaggaggccgagagagagctgcaggccaagttcgagcacctgaagagactgcaccaggaggagagaatgaagctggaggagaagagaagactgctggaggaggagatcatcgccttcagcaagaagaaggccaccagcgagatcttccacagccagagcttcctggccaccggcagcaacctgagaaaggacaaggacagaaagaaggagcccggctgcagattcgagctgctgtgcatcgacgtgagagcctgcgagaccaacggcggcagaaaggacgccgagaaggcccccatcttctgcaagaccgaggtgcccgagcacagaagaagcagcagccaggccaacttcatcaagaagaagctggaggtgtgcttcgacttcgccgtgatctgcttcatcaccagcatcttcggcgagcagccccagctgctgatcttcatggagaagtacttccaggtgcagggccagtacatcagccagagcgagtag

SEQ ID NO: 299592 - DNA, 966 bp, Artificial Sequence
  derived and/or modified sequence
atgatgaaccgatactaccaacccattgtggattatattgatgcacaattcgaggcatatctccaggaagagttgaagattaagcggtccctgttcacataccatgatagccgtatccacgtgtgcctctatttcattagccctacgggccacagccttaaaaccttggatctccttacaatgaagaacctggacagcaaagtcaatattattcccgtaatcgcgaaggccgatactgtgagtaagactgagcttcaaaagtttaaaattaagctaatgtccgaactggtgtctaacggtgtgcagatatatcagtttccaacagacgacgatacaatagctaaagttaacgcagccatgaatggtcaactgccctttgccgtcgtgggatccatggatgaggtcaaggtgggaaataaaatggtcaaggcccgccagtatccctggggcgttgtgcaggtggagaacgagaatcactgtgattttgtcaagctacgtgaaatgttgatttgtaccaacatggaggacctgagggaacagactcatacaagacactatgaactgtacagacgctgcaaacttgaagaaatgggttttaccgatgtgggacccgagaacaaacccgtttccgtgcaggagacttacgaggccaagcggcacgaatttcacggggaacggcaacgcaaggaggaggagatgaaacagatgtttgtccagagggtgaaggagaaggaagccatccttaaggaagcagagcgtgaattacaggcaaaatttgagcacctgaagagacttcatcaggaggagcgtatgaaactggaggagaagaggaggctcctcgaagaagagatcatcgccttttccaaaaaaaaagcaaccagcgagatttttcacagtcagtccttcttagcgacaggctccaacttacgaaaggacaaagatcgaaaaaattccaattttctgtag

SEQ ID NO: 299593 - DNA, 966 bp, Artificial Sequence
  derived and/or modified sequence
atgatgaaccgctactaccagcccatcgtggactacattgatgcccagtttgaggcctacctgcaggaggagctgaagatcaagaggagcctcttcacctaccatgacagccgcatccacgtgtgcctgtacttcatcagccccaccggccacagcctgaagaccctggacctgctgaccatgaagaacctggacagcaaggtgaacatcatccctgtgattgccaaggctgacacagtgtccaagacagagctgcagaagttcaagatcaagctgatgtctgagctggtgtccaatggagtgcagatctaccagttccccacagatgatgacaccatcgccaaggtgaatgctgccatgaatggccagctgccctttgctgtggtgggctccatggatgaggtgaaggtgggcaacaagatggtgaaggcccggcagtacccctggggcgtggtgcaggtggagaatgaaaaccactgtgactttgtgaagctgcgggagatgctgatctgcaccaacatggaggacctgcgggagcagacccacaccaggcactatgagctgtaccgccgctgcaagctggaggagatgggcttcacagatgtgggccctgagaacaagcctgtgtctgtgcaggagacctatgaggccaagagacatgagttccatggagagcggcagaggaaggaggaggagatgaagcagatgtttgtgcagagggtgaaggagaaggaggccatcctgaaggaggccgagcgggagctgcaggccaagtttgagcacctgaagaggctgcaccaggaggagaggatgaagctggaggagaagaggcggctgctggaggaggagatcatcgccttcagcaagaagaaggccaccagcgagatcttccacagccagagcttcctggccaccggcagcaacctgaggaaggacaaggacaggaagaacagcaacttcctgtag

SEQ ID NO: 299594 - DNA, 966 bp, Artificial Sequence
  derived and/or modified sequence
atgatgaaccggtactaccagcccatcgtggactacatcgacgcccagttcgaagcttacctgcaagaagagcttaaaattaaaagatctctgttcacttatcacgattcaagaatccatgtatgcctttattttatatctcccacaggtcactccctgaagacactggacctcctgactatgaagaatctggactctaaagtcaacatcatccctgtgattgccaaggccgataccgtgtctaagacagagctgcagaagttcaagattaagctgatgagtgaactggtcagcaacggggtccagatctatcaatttcccacagacgacgacacgatcgcgaaggtcaatgccgcgatgaatggacaactgcccttcgccgtggtcggcagcatggacgaggtgaaggtggggaacaaaatggttaaagcacggcagtatccctggggcgtggtccaagtcgagaacgagaatcattgtgattttgtgaagctgcgggaaatgctgatttgcactaatatggaggacttgcgtgaacaaacccacactcgacactatgagctgtatcgcaggtgtaaacttgaagaaatgggttttacagacgtgggaccagagaataagcctgtgagcgtgcaggagacatacgaggctaagagacatgaattccacggcgagcggcagcggaaagaggaggaaatgaaacaaatgtttgtgcagagagtgaaagaaaaagaggccatactgaaggaagcggagcgagaacttcaggcaaagttcgagcatctgaaacggcttcaccaagaggaacggatgaagctggaagagaagaggaggctgctggaggaggaaatcatcgcatttagtaaaaaaaaggcgacatcagagatctttcacagccagagcttcttagccacaggcagtaatctgagaaaggacaaggacagaaagaactccaattttctctag

SEQ ID NO: 299595 - DNA, 966 bp, Artificial Sequence
  derived and/or modified sequence
atgatgaatcggtattaccaaccaatagttgactatattgacgcccagttcgaggcatacctgcaggaagagttaaagataaaaagaagtctgtttacctaccacgacagtagaatacacgtgtgcttatacttcatttcgcctactggccattccctgaagaccttggacctgttgaccatgaaaaacctcgattccaaagttaacattataccagtgatcgccaaggcagacaccgtatcaaagaccgagctgcaaaagtttaagatcaagctcatgtccgagctcgtaagcaacggtgtgcagatctaccaattccccacggatgatgacaccattgctaaagtgaacgcagccatgaatggtcagctgccattcgcagtcgttggttctatggatgaggtgaaggtgggaaacaagatggtgaaagcgaggcaatatccatggggcgtggtacaggtcgagaacgaaaaccattgtgactttgtgaagttgcgggaaatgctcatttgcaccaacatggaggacttaagagagcagacccacacccgccactacgagctctaccgcagatgcaagttggaagaaatgggatttacagatgtgggcccagagaacaagcccgtgtctgtccaggaaacatacgaggccaagcgccatgaatttcatggggaacgacagcgcaaagaagaagagatgaagcagatgttcgtgcagcgagtgaaagagaaggaggccatcctaaaggaggccgagagagaactgcaggcaaagtttgagcacctcaaacgactgcatcaagaagagagaatgaagctggaagaaaagcgaaggcttttagaggaggagatcatcgccttctccaaaaagaaagctaccagtgaaatatttcattcacaatcgttcctcgctacagggagcaatctacggaaggacaaggatcggaagaattccaacttcctgtag

SEQ ID NO: 299596 - DNA, 1379 bp, Artificial Sequence
  derived and/or modified sequence
gccctccggccttcccgccgccgtcgccgggaccagccgctcggggccgggctgatacagccgcttcaccgtgcccctgcccgcgaccatggcctcctccgaggtggcgcggcacctgctctttcagtctcacatggcaacgaaaacaacttgtatgtcttcacaaggatcagatgatgaacagatactaccaaccaatagttgactacatagatgctcagtttgaggcctatctccaagaagaactgaagattaagcgttctctctttacctaccatgattctcgcatccatgtgtgtctctacttcatttcaccgacaggccactctctgaagacacttgatctcttaaccatgaagaaccttgacagcaaggtaaacattataccagtgattgccaaagcagatacggtttctaaaactgaattacagaagtttaagatcaagctcatgagtgaattggtcagcaatggcgtccagatataccagttcccaacggatgatgacactattgctaaggtcaacgctgcaatgaatggacagttgccgtttgctgttgtgggaagtatggatgaggtaaaagtcggaaacaagatggtcaaagctcgccagtacccttggggtgttgtacaagtggaaaatgaaaaccactgtgactttgtaaagctgcgggaaatgctcatttgtacaaatatggaggacctgcgagagcagacccataccaggcactatgagctttacaggcgctgcaaactggaggaaatgggctttacagatgtgggcccagaaaacaagccagtcagtgttcaagagacctatgaagccaaaagacatgagttccatggtgaacgtcagaggaaggaagaagaaatgaaacagatgtttgtgcagcgagtaaaggagaaagaagccatattgaaagaagctgagagagagctacaggccaaatttgagcaccttaagagacttcaccaagaagagagaatgaagcttgaagaaaagagaagacttttggaagaagaaataattgctttctctaaaaagaaagctacctccgagatatttcacagccagtcctttctggcaacaggcagcaacctgaggaaggacaaggaccgtaagaactccaattttttgtaaaacagaagttccagagcacagaaggtcatcatcacaagcaaactttattaaaaaaaaactagaagtgtgctttgattttgctgttatttgttttatcacttctatatttggtgaacagccacagttactgatatttatggaaaagtactttcaagtacaaggtcaatacataagccagagtgaatgatactacaagttgagcatctctaattcaaaaatctgaaatccagaagcttcaaa

SEQ ID NO: 299597 - DNA, 966 bp, Artificial Sequence
  derived and/or modified sequence
atgatgaacagatactaccagcccatcgtggactacatcgacgcccagttcgaggcctacctgcaggaggagctgaagatcaagagaagcctgttcacctaccacgacagcagaatccacgtgtgcctgtacttcatcagccccaccggccacagcctgaagaccctggacctgctgaccatgaagaacctggacagcaaggtgaacatcatccccgtgatcgccaaggccgacaccgtgagcaagaccgagctgcagaagttcaagatcaagctgatgagcgagctggtgagcaacggcgtgcagatctaccagttccccaccgacgacgacaccatcgccaaggtgaacgccgccatgaacggccagctgcccttcgccgtggtgggcagcatggacgaggtgaaggtgggcaacaagatggtgaaggccagacagtacccctggggcgtggtgcaggtggagaacgagaaccactgcgacttcgtgaagctgagagagatgctgatctgcaccaacatggaggacctgagagagcagacccacaccagacactacgagctgtacagaagatgcaagctggaggagatgggcttcaccgacgtgggccccgagaacaagcccgtgagcgtgcaggagacctacgaggccaagagacacgagttccacggcgagagacagagaaaggaggaggagatgaagcagatgttcgtgcagagagtgaaggagaaggaggccatcctgaaggaggccgagagagagctgcaggccaagttcgagcacctgaagagactgcaccaggaggagagaatgaagctggaggagaagagaagactgctggaggaggagatcatcgccttcagcaagaagaaggccaccagcgagatcttccacagccagagcttcctggccaccggcagcaacctgagaaaggacaaggacagaaagaacagcaacttcctgtag

SEQ ID NO: 299598 - DNA, 1782 bp, Artificial Sequence
  derived and/or modified sequence
gccctccggccttcccgccgccgtcgccgggaccagccgctcggggccgggctgatacagccgcttcaccgtgcccctgcccgcgaccatggcctcctccgaggtggcgcggcacctgtgacgtctctccagtgaccttagtttgagtcacttggactcagaatcatgaagtcagcttcttgcagcctcaccttttctgctgtccttgcatttacatctctttcagtctcacatggcaacgaaaacaacttgtatgtcttcacaaggatcagatgatgaacagataaaaagagaaaacattcgttcgttgactatgtctggccatgttggttttgagagtttgcctgatcagctggtgaacagatccattcagcaaggtttctgctttaatattctctgtgtgggggaaactggaattggaaaatcaacactgattgacacattgtttaatactaattttgaagactatgaatcctcacatttttgcccaaatgttaaacttaaagctcagacatatgaactccaggaaagtaatgttcaattgaaattgaccattgtgaatacagtgggatttggtgaccaaataaataaagaagagagctaccaaccaatagttgactacatagatgctcagtttgaggcctatctccaagaagaactgaagattaagcgttctctctttacctaccatgattctcgcatccatgtgtgtctctacttcatttcaccgacaggccactctctgaagacacttgatctcttaaccatgaagaaccttgacagcaaggtaaacattataccagtgattgccaaagcagatacggtttctaaaactgaattacagaagtttaagatcaagctcatgagtgaattggtcagcaatggcgtccagatataccagttcccaacggatgatgacactattgctaaggtcaacgctgcaatgaatggacagttgccgtttgctgttgtgggaagtatggatgaggtaaaagtcggaaacaagatggtcaaagctcgccagtacccttggggtgttgtacaagtggaaaatgaaaaccactgtgactttgtaaagctgcgggaaatgctcatttgtacaaatatggaggacctgcgagagcagacccataccaggcactatgagctttacaggcgctgcaaactggaggaaatgggctttacagatgtgggcccagaaaacaagccagtcagtgttcaagagacctatgaagccaaaagacatgagttccatggtgaacgtcagaggaaggaagaagaaatgaaacagatgtttgtgcagcgagtaaaggagaaagaagccatattgaaagaagctgagagagagctacaggccaaatttgagcaccttaagagacttcaccaagaagagagaatgaagcttgaagaaaagagaagacttttggaagaagaaataattgctttctctaaaaagaaagctacctccgagatatttcacagccagtcctttctggcaacaggcagcaacctgaggaaggacaaggaccgtaagaaggaaccaggctgtcgattcgaactcctgtgcattgatgtcagagcttgtgaaaccaatggtggacgtaaagacgcagagaaaggtagagagggccacagtgcaagggggcagccatgagtagcatgtggatgataatcgcaaggcgtgtaggtttgggctccaattttttgtaaaacagaagttccagagcacagaaggtcatcatcacaagcaaactttattaaaaaaaaactagaagtgtgctt

SEQ ID NO: 299599 - protein, 317 aa, Artificial Sequence [sequence omitted]

SEQ ID NO: 299600 - DNA, 954 bp, Artificial Sequence
  derived and/or modified sequence
atgagcggacacgtgggctttgagtcactgcctgaccagttggttaaccgctcgattcagcaggggttttgcttcaatatcctgtgcgtgggagagaccggaatcggcaaatctacgcttattgacaccttatttaacaccaatttcgaagactacgaaagcagccacttctgcccgaacgttaaactgaaggctcagacatatgagctgcaggagtccaatgtgcaattgaaactgacgatcgtgaacacggtgggttttggggatcaaattaataaagaggaaagttaccaacctatcgtcgattacatcgatgcacagtttgaagcctatctccaggaggagctgaaaatcaagagatccctctttacttatcacgactcgcgcatccacgtatgcttatactttattagccctacagggcattcgctgaaaacactggatcttctgaccatgaagaatctcgacagcaaggtgaacatcatccctgtgatagctaaagcggatacagtgtctaagaccgaacttcaaaagtttaaaattaagctcatgagcgagttagtgtccaacggcgtgcagatctaccagttccctacggatgacgacactattgctaaggtgaatgccgccatgaacggccagctaccgtttgctgttgtcgggtctatggacgaggtgaaagttgggaataaaatggtcaaggcccggcaatacccttggggggttgtgcaggtggagaacgaaaaccattgcgactttgtcaagctgcgcgagatgttaatttgtaccaacatggaggaccttcgagagcaaacacatacgcgacattatgaactgtacaggaggtgcaagctcgaggaaatgggatttaccgatgtgggtcccgagaacaagcctgtttcttataggcctaacctgtccacgctgagagactttacgaaaaagcgggagtag

SEQ ID NO: 299601 - DNA, 954 bp, Artificial Sequence
  derived and/or modified sequence
atgagcggccacgtgggctttgagagcctgcctgaccagctggtgaacagaagcatccagcagggcttctgcttcaacatcctgtgtgtgggggagactggaattggcaagagcaccctgattgacaccctcttcaacaccaactttgaggactatgagagcagccacttctgccccaacgtgaagctgaaggcccagacctatgagctgcaggagagcaatgtgcagctgaagctgaccatcgtgaacacagtgggctttggagaccagatcaacaaggaggagagctaccagcccatcgtggactacattgatgcccagtttgaggcctacctgcaggaggagctgaagatcaagaggagcctcttcacctaccatgacagccgcatccacgtgtgcctgtacttcatcagccccaccggccacagcctgaagaccctggacctgctgaccatgaagaacctggacagcaaggtgaacatcatccctgtgattgccaaggctgacacagtgtccaagacagagctgcagaagttcaagatcaagctgatgtctgagctggtgtccaatggagtgcagatctaccagttccccacagatgatgacaccatcgccaaggtgaatgctgccatgaatggccagctgccctttgctgtggtgggctccatggatgaggtgaaggtgggcaacaagatggtgaaggcccggcagtacccctggggcgtggtgcaggtggagaatgaaaaccactgtgactttgtgaagctgcgggagatgctgatctgcaccaacatggaggacctgcgggagcagacccacaccaggcactatgagctgtaccgccgctgcaagctggaggagatgggcttcacagatgtgggccctgagaacaagcctgtgtcctaccggcccaacctgagcaccctgcgggacttcaccaagaagcgggagtag

SEQ ID NO: 299602 - DNA, 954 bp, Artificial Sequence
  derived and/or modified sequence
atgagcggccacgtgggcttcgagagcctgcccgaccagctggtgaacagatcaatccaacaaggtttttgcttcaacattctatgtgtcggcgaaacaggtatcggcaaaagcactttaattgacacactctttaacactaacttcgaagactacgaaagctctcacttctgcccgaatgtcaagctgaaggctcaaacgtacgaactgcaagagagtaatgtccagctcaagcttactattgtgaatacagtaggttttggcgaccagattaacaaagaggagtcttaccagccgatcgtcgactatatcgatgcccagttcgaggcttacctgcaggaggagctgaagatcaagcgcagcctgttcacgtaccacgattcaagaattcacgtgtgcctgtattttatctcacccacaggccactccctgaagacgctggatcttcttacaatgaagaatttggacagtaaggtaaatataatcccagtgatcgctaaggctgacactgtgtccaaaacagagctgcaaaaattcaaaatcaagctaatgagcgagctagtatcgaatggagtgcagatctatcaattccccacagatgacgacaccattgctaaggttaacgcagccatgaatgggcagctaccattcgcagtggtgggtagcatggatgaggtcaaagtcggtaacaagatggtgaaagctcggcagtacccctggggagtggttcaagttgaaaacgagaatcactgcgatttcgtgaaactgcgagagatgttaatctgcacaaacatggaagacctcagagagcagacccatacacgccactatgagctgtatcgcaggtgtaaactggaggagatgggatttacagatgtggggcccgagaacaaacccgttagttaccgacccaacctgagcacactgcgggacttcactaaaaagagggagtag

SEQ ID NO: 299603 - DNA, 954 bp, Artificial Sequence
  derived and/or modified sequence
atgagtgggcacgtgggattcgagtcacttcccgatcagcttgtgaatcgctcaatccagcaaggtttttgtttcaatatactctgcgttggcgaaactggaattggcaaatccactctgatagacaccctcttcaatacaaatttcgaggactatgagtcctcccacttttgtcctaacgttaaattgaaggctcagacgtacgagctgcaggagagtaacgtgcaactgaagctgacaatagtgaatacagtgggattcggtgatcagattaacaaggaggaatcctaccagcccatcgtcgattacattgacgctcagttcgaggcctatctgcaagaggaactgaaaattaagaggagcctatttacctaccatgatagccggattcatgtttgtctttacttcatcagccctaccggtcactccttgaagaccctggacctgttgactatgaagaacctcgatagcaaagtgaatatcatccctgtgattgcaaaggctgataccgtatccaaaacggagctgcagaagtttaagattaagctgatgtccgaattagtgagcaacggagttcaaatctatcaatttcctactgacgacgatactattgctaaggtaaacgccgctatgaacggccaactacctttcgcagtggtggggtcgatggacgaagttaaggtggggaataaaatggtgaaagcaaggcagtatccatggggtgtcgtacaggtggagaacgaaaatcattgcgatttcgtcaaactgcgagagatgctaatatgcacaaacatggaggaccttcgcgaacagactcacacgcggcattatgagctgtaccgccgttgcaagctggaggagatgggatttaccgacgtgggtcctgaaaacaaaccagtgagctataggcccaacctgagtacactccgcgatttcaccaaaaagcgggagtag

SEQ ID NO: 299604 - DNA, 3117 bp, Artificial Sequence
  derived and/or modified sequence
cacttccggcctcgcgagggccgcaatcactgctccgcagttcccgcctgcattcctcgcgccgtcttcctggagtcccagctctccttcagcccgccccaacgctgacgctcagtcctcaggcgtcgagggtagctcctgtgaggggctcgcttggcgcaggcaaaacgctcagcgcgcaccacagggcgtccgccccaaccccgcccccggaggcctccagctcggccccgcccctgtcccttccccgtcgcggaggcagcctagcctcgcgccccgcccgttgcttctgccctccggccttcccgccgccgtcgccgggaccagccgctcggggccgggctgatacagccgcttcaccgtgcccctgcccgcgaccatggcctcctccgaggtggcgcggcacctgctctttcagtctcacatggcaacgaaaacaacttgtatgtcttcacaaggatcagatgatgaacagataaaaagagaaaacattcgttcgttgactatgtctggccatgttggttttgagagtttgcctgatcagctggtgaacagatccattcagcaaggtttctgctttaatattctctgtgtgggggaaactggaattggaaaatcaacactgattgacacattgtttaatactaattttgaagactatgaatcctcacatttttgcccaaatgttaaacttaaagctcagacatatgaactccaggaaagtaatgttcaattgaaattgaccattgtgaatacagtgggatttggtgaccaaataaataaagaagagagctaccaaccaatagttgactacatagatgctcagtttgaggcctatctccaagaagaactgaagattaagcgttctctctttacctaccatgattctcgcatccatgtgtgtctctacttcatttcaccgacaggccactctctgaagacacttgatctcttaaccatgaagaaccttgacagcaaggtaaacattataccagtgattgccaaagcagatacggtttctaaaactgaattacagaagtttaagatcaagctcatgagtgaattggtcagcaatggcgtccagatataccagttcccaacggatgatgacactattgctaaggtcaacgctgcaatgaatggacagttgccgtttgctgttgtgggaagtatggatgaggtaaaagtcggaaacaagatggtcaaagctcgccagtacccttggggtgttgtacaagtggaaaatgaaaaccactgtgactttgtaaagctgcgggaaatgctcatttgtacaaatatggaggacctgcgagagcagacccataccaggcactatgagctttacaggcgctgcaaactggaggaaatgggctttacagatgtgggcccagaaaacaagccagtcagctacaggccaaatttgagcaccttaagagacttcaccaagaagagagaatgaagcttgaagaaaagagaagacttttggaagaagaaataattgctttctctaaaaagaaagctacctccgagatatttcacagccagtcctttctggcaacaggcagcaacctgaggaaggacaaggaccgtaagaactccaattttttgtaaaacagaagttccagagcacagaaggtcatcatcacaagcaaactttattaaaaaaaaactagaagtgtgctttgattttgctgttatttgttttatcacttctatatttggtgaacagccacagttactgatatttatggaaaagtactttcaagtacaaggtcaatacataagccagagtgaatgatactacaagttgagcatctctaattcaaaaatctgaaatccagaagcttcaaaatctgaatctttttgagcactgacttgaccccacaagtggaaaattccccacccgacacctttgctttctgatggttcagtttaaacagattttgtttcttgcacaaaatttttgtataaattactttcaggctatatgtataaggtggatgtgaaacatgaattatgtaattagagtcgggtcccgttgtgtatatgcagatattccaaacctgaaatccaaaacacttctggtccctagcattttggataagggatactcagcttgtacctatatattcatatatattcactgttgttagaaatgtttaagttgctgttctgtgatgaatctaaatcttttctcttgctaccaagctattgtcactgcagtgcattataccaaagagcgaagtcagtgccactgaaaatacagaacccattaatatcgtggctatctgattacatttatattccaagatgaaccttttttatatatgctaaaaattttggggaatatgttttgggatgtattatggagctaaaactctaacctcttaatagttttatagaacttaaaaattttttatacaattacccaattggtgatatgatcttaagcttttgtgtcagattatttaatatgatgacttcatgctttattatgccttattatggctgacgtattactgtggtgaaacaaaatatctttaaaagttaaaacatccagatatataagctattttttcctaaggataaagtacctttgagcatgagtgtatcacagctttcattaggaaaacttttcattacatacttgtttaaactctgtcttccagggtaaaaataataaggttgaatcattttattaaaaatactttttaagaaaataactatgaacatctgaatattaaagatataaaaatgcacataattcatatttcaggtggtatttgcattcagtgccttactggtattctcagaacattttaatgatttctaacatttcttaacagtcatagatatatacattttcattttttgtacttgaatattctaaataaaactgacatttactcttgacaaataaaacatatatttactaaaatgtgtttaattttcctttctgaaaactctcattttaaaaacgttcatttaattatgtatttgaattattttggagatgaggtattttatgagtattttcagacaatgaaacttattagtctgtgtcagattctgagcaatcatagagtcatctaagttgtaaataaaaccttgcatagc

SEQ ID NO: 299605 - DNA, 954 bp, Artificial Sequence
  derived and/or modified sequence
atgagcggccacgtgggcttcgagagcctgcccgaccagctggtgaacagaagcatccagcagggcttctgcttcaacatcctgtgcgtgggcgagaccggcatcggcaagagcaccctgatcgacaccctgttcaacaccaacttcgaggactacgagagcagccacttctgccccaacgtgaagctgaaggcccagacctacgagctgcaggagagcaacgtgcagctgaagctgaccatcgtgaacaccgtgggcttcggcgaccagatcaacaaggaggagagctaccagcccatcgtggactacatcgacgcccagttcgaggcctacctgcaggaggagctgaagatcaagagaagcctgttcacctaccacgacagcagaatccacgtgtgcctgtacttcatcagccccaccggccacagcctgaagaccctggacctgctgaccatgaagaacctggacagcaaggtgaacatcatccccgtgatcgccaaggccgacaccgtgagcaagaccgagctgcagaagttcaagatcaagctgatgagcgagctggtgagcaacggcgtgcagatctaccagttccccaccgacgacgacaccatcgccaaggtgaacgccgccatgaacggccagctgcccttcgccgtggtgggcagcatggacgaggtgaaggtgggcaacaagatggtgaaggccagacagtacccctggggcgtggtgcaggtggagaacgagaaccactgcgacttcgtgaagctgagagagatgctgatctgcaccaacatggaggacctgagagagcagacccacaccagacactacgagctgtacagaagatgcaagctggaggagatgggcttcaccgacgtgggccccgagaacaagcccgtgagctacagacccaacctgagcaccctgagagacttcaccaagaagagagagtag

SEQ ID NO: 299606 - protein, 283 aa, Artificial Sequence
  derived and/or modified sequence
MASSEVARHLLFQSHMATKTTCMSSQGSDDEQIVNIIPVIAKADTVSKTELQKFKIKLMSELVSNGVQIYQFPTDDDTIAKVNAAMNGQLPFAVVGSMDEVKVGNKMVKARQYPWGVVQVENENHCDFVKLREMLICTNMEDLREQTHTRHYELYRRCKLEEMGFTDVGPENKPVSVQETYEAKRHEFHGERQRKEEEMKQMFVQRVKEKEAILKEAERELQAKFEHLKRLHQEERMKLEEKRRLLEEEIIAFSKKKATSEIFHSQSFLATGSNLRKDKDRKK

SEQ ID NO: 299607 - DNA, 852 bp, Artificial Sequence
  derived and/or modified sequence
atggccagcagcgaggttgcgaggcacttactctttcagagtcacatggctacaaagactacatgcatgagttcccagggctccgatgatgaacagatcgtcaatattatccccgttattgccaaagccgataccgtgtccaaaactgaactccagaaattcaaaatcaaactgatgtcagagctcgtctctaatggtgtgcaaatctatcagtttcccacagacgatgacaccattgcaaaggtgaatgcggctatgaatggacagctccctttcgccgtcgtggggagtatggacgaggtgaaggtcggaaataagatggtgaaagcaaggcagtatccttggggggtggtccaagtagagaatgagaatcattgtgacttcgtcaagctgagagagatgttgatatgtaccaatatggaagaccttcgcgaacagacccatacaagacattatgaactgtatagacgttgtaagctagaagaaatgggatttacagacgtcgggcccgagaacaaaccagttagcgtccaggaaacctatgaggccaaacgccacgaattccatggcgagagacagaggaaagaggaagagatgaagcagatgttcgtgcaacgggtgaaagaaaaagaagcaatcctgaaggaagctgagcgcgagttgcaggccaaatttgaacatttgaagaggctgcaccaggaggaaagaatgaagctcgaagaaaagcgccgcctcttagaagaagagataatcgctttcagcaagaaaaaggcaacgtctgaaatttttcactcccagtctttcctcgcaaccgggtctaatctgaggaaggacaaagatagaaaaaaatag

SEQ ID NO: 299608 - DNA, 852 bp, Artificial Sequence
  derived and/or modified sequence
atggccagcagcgaggtggcccggcacctgctcttccagagccacatggccaccaagaccacctgcatgagcagccagggcagtgatgatgagcagatcgtgaacatcatccctgtgattgccaaggctgacacagtgtccaagacagagctgcagaagttcaagatcaagctgatgtctgagctggtgtccaatggagtgcagatctaccagttccccacagatgatgacaccatcgccaaggtgaatgctgccatgaatggccagctgccctttgctgtggtgggctccatggatgaggtgaaggtgggcaacaagatggtgaaggcccggcagtacccctggggcgtggtgcaggtggagaatgaaaaccactgtgactttgtgaagctgcgggagatgctgatctgcaccaacatggaggacctgcgggagcagacccacaccaggcactatgagctgtaccgccgctgcaagctggaggagatgggcttcacagatgtgggccctgagaacaagcctgtgtctgtgcaggagacctatgaggccaagagacatgagttccatggagagcggcagaggaaggaggaggagatgaagcagatgtttgtgcagagggtgaaggagaaggaggccatcctgaaggaggccgagcgggagctgcaggccaagtttgagcacctgaagaggctgcaccaggaggagaggatgaagctggaggagaagaggcggctgctggaggaggagatcatcgccttcagcaagaagaaggccaccagcgagatcttccacagccagagcttcctggccaccggcagcaacctgaggaaggacaaggacaggaagaagtag

SEQ ID NO: 299609 - DNA, 852 bp, Artificial Sequence
  derived and/or modified sequence
atggccagcagcgaggtggcccggcacctgctgttccagagccacatggcaacaaagaccacctgcatgagttcccaggggagcgacgatgagcagatagtcaatatcatccccgtcatcgcaaaagcggacacagtgagtaagaccgaactgcaaaaatttaagatcaagctgatgtccgaactggtcagcaacggcgtgcagatctaccagttccccacggacgacgatacaatcgccaaggttaacgcagccatgaatggacagcttccatttgccgtagtcggcagcatggatgaggttaaagtcggcaataaaatggtcaaagcccggcagtacccctggggagtggtgcaggttgagaacgagaatcattgtgatttcgtgaagctgagagaaatgttgatttgcactaatatggaagatctgcgcgaacagacacataccagacattatgaattgtaccgccgctgtaaattggaggaaatgggctttactgacgttggcccggaaaacaaacccgtttcggttcaagaaacttacgaggcaaagaggcacgaatttcatggtgagcgccagcgtaaggaggaagaaatgaaacagatgtttgtgcaaagggtgaaggagaaggaggctattctaaaagaagctgaaagggagctacaggccaagttcgaacacctcaagcgacttcatcaagaagaaaggatgaaattagaggagaagaggcgcctcttagaggaggagattattgcctttagcaagaagaaggctacgtctgaaattttccacagccagagctttctggccaccggaagcaacctgcgcaaagacaaggacagaaagaagtag

SEQ ID NO: 299610 - DNA, 852 bp, Artificial Sequence
  derived and/or modified sequence
atggcttcgtccgaagttgctcggcacttgctgtttcaatcacacatggccactaagacgacgtgtatgtcttcacagggctctgacgacgagcaaatcgtgaatattattccggtgatcgcgaaagcagacactgtgtccaagactgagctgcagaagttcaagataaaactgatgagcgaacttgtctccaatggcgtgcaaatttaccagtttcccaccgatgacgatactatcgccaaagtcaacgctgcaatgaatgggcagcttcctttcgcagtcgttgggtcaatggacgaggtcaaggtgggcaataagatggttaaggccagacagtacccctggggagtagttcaagttgaaaatgaaaaccattgtgattttgtgaagctgagggaaatgttaatctgcaccaatatggaggacctgcgtgagcagacccataccaggcattatgaactctatcgccgatgcaagctggaggaaatggggttcaccgacgttggtcctgaaaacaagccagtgagcgtgcaggaaacttacgaggccaagagacatgagttccatggagagagacagagaaaagaagaggagatgaagcaaatgttcgtacagagagtgaaagaaaaggaagccattctgaaggaagccgaaagagaattgcaggctaaattcgaacacttgaagagattgcatcaagaggagagaatgaagctcgaagagaagaggaggctacttgaggaagagattatcgcctttagcaagaagaaagccactagcgagatcttccactcacagtcttttctggcaactggcagtaatttgaggaaagacaaggataggaaaaagtag

SEQ ID NO: 299611 - DNA, 1393 bp, Artificial Sequence
  derived and/or modified sequence
agtcctcaggcgtcgagggtagctcctgtgaggggctcgcttggcgcaggcaaaacgctcagcgcgcaccacagggcgtccgccccaaccccgcccccggaggcctccagctcggccccgcccctgtcccttccccgtcgcggaggcagcctagcctcgcgccccgcccgttgcttctgccctccggccttcccgccgccgtcgccgggaccagccgctcggggccgggctgatacagccgcttcaccgtgcccctgcccgcgaccatggcctcctccgaggtggcgcggcacctgctctttcagtctcacatggcaacgaaaacaacttgtatgtcttcacaaggatcagatgatgaacagatagtaaacattataccagtgattgccaaagcagatacggtttctaaaactgaattacagaagtttaagatcaagctcatgagtgaattggtcagcaatggcgtccagatataccagttcccaacggatgatgacactattgctaaggtcaacgctgcaatgaatggacagttgccgtttgctgttgtgggaagtatggatgaggtaaaagtcggaaacaagatggtcaaagctcgccagtacccttggggtgttgtacaagtggaaaatgaaaaccactgtgactttgtaaagctgcgggaaatgctcatttgtacaaatatggaggacctgcgagagcagacccataccaggcactatgagctttacaggcgctgcaaactggaggaaatgggctttacagatgtgggcccagaaaacaagccagtcagtgttcaagagacctatgaagccaaaagacatgagttccatggtgaacgtcagaggaaggaagaagaaatgaaacagatgtttgtgcagcgagtaaaggagaaagaagccatattgaaagaagctgagagagagctacaggccaaatttgagcaccttaagagacttcaccaagaagagagaatgaagcttgaagaaaagagaagacttttggaagaagaaataattgctttctctaaaaagaaagctacctccgagatatttcacagccagtcctttctggcaacaggcagcaacctgaggaaggacaaggaccgtaagaagtaagaggcccagccaccctccctggcagccctgcccacacttgtcacattgccctgtcggatcttcctagcgcttcttacttctgcttccttatgctttgtcttccttctccaactaaatgtcagctcctggagaggagagaccttgtccctcttgttcactgctgtttccccagcatccagaacagcacctggcacatgttatgtgttcagtatttgccaaaatgaatgaatgaacaaaataaaaatacatcacagtgtgaaaaggatcagttagct

SEQ ID NO: 299612 - DNA, 852 bp, Artificial Sequence
  derived and/or modified sequence
atggccagcagcgaggtggccagacacctgctgttccagagccacatggccaccaagaccacctgcatgagcagccagggcagcgacgacgagcagatcgtgaacatcatccccgtgatcgccaaggccgacaccgtgagcaagaccgagctgcagaagttcaagatcaagctgatgagcgagctggtgagcaacggcgtgcagatctaccagttccccaccgacgacgacaccatcgccaaggtgaacgccgccatgaacggccagctgcccttcgccgtggtgggcagcatggacgaggtgaaggtgggcaacaagatggtgaaggccagacagtacccctggggcgtggtgcaggtggagaacgagaaccactgcgacttcgtgaagctgagagagatgctgatctgcaccaacatggaggacctgagagagcagacccacaccagacactacgagctgtacagaagatgcaagctggaggagatgggcttcaccgacgtgggccccgagaacaagcccgtgagcgtgcaggagacctacgaggccaagagacacgagttccacggcgagagacagagaaaggaggaggagatgaagcagatgttcgtgcagagagtgaaggagaaggaggccatcctgaaggaggccgagagagagctgcaggccaagttcgagcacctgaagagactgcaccaggaggagagaatgaagctggaggagaagagaagactgctggaggaggagatcatcgccttcagcaagaagaaggccaccagcgagatcttccacagccagagcttcctggccaccggcagcaacctgagaaaggacaaggacagaaagaagtag

SEQ ID NO: 299613 - protein, 31 aa, Artificial Sequence
  derived and/or modified sequence
MNMANFLRGFEEKGIKNDRPEDQLSKEKKKI

SEQ ID NO: 299614 - DNA, 3288 bp, Artificial Sequence
  derived and/or modified sequence
gcacgtccaaaccccggggtcctcggccaggccaggggggcgggcgtgcggcggggccgggccgggccgggcgcgcccagcgggctccgggcacacgcccctcacctgggcgaggcccggtgcgcaggcgctcagcgcgggggcagcggccgggcgcttaagcccggcgcgggcaagagttggacagttcaggggccgcgccgggccgagctgtcgcccgcgccacctccaccgccgccgctgctaccgccaccgccaccgcctgggctgcagcagatcgcgggagaacgtctgcgcgaagccccggtgcagccctggcgggaccgcagcaaccaccggagcgtgagcaacagcttcccggctggaggagccactgccccacgcgcccgcggcccgcgcgccgagatgttctacatttcaactccatcaaatattaaattgatgtttatgggctaacctggaaaccgaaaaacagtttgtttcactacaagaataagaaaatatgtccaaattcctgtcagctgacttataaagggacttttagaacacaacccaatgcatgaggtactccttaagccctgacaaccatcttgaagatggaatcatgaatatggcaaattttctacggggctttgaagaaaaggggataaagaacgacaggcctgaggaccagttgagcaaagagaaaaagaaaattcttttctccttctgtgaggtgtgcaacatccagctgaactctgcagcccaggctcaggtgcattccaacggcaaatcccaccgcaaacgagtgaagcagctgagtgatgggcagcccccaccacccgcccaggccagccccagcagcaacagcagcacaggcagtacatgccacactactacccttcctgctcttgtgcgcacacctaccctgatgatgcagccttcactggatatcaaaccatttatgtcttttccagtggacagtagttctgctgttgggctctttccaaattttaacacaatggatcctgtgcaaaaagcggttattaaccatacatttggagtatccattcccccaaagaagaaacaagttatttcttgtaatgtctgtcagcttcgctttaactcagatagccaggccgaggcccactacaaaggaagtaaacatgccaagaaggtcaaagcactagacgcaacgaaaaataaacccaaaatggttccttccaaggacagcgcaaaggctaatcccagctgctccatcactccaatcacaggcaacaactctgacaaatcagaagataaagggaagttaaaagccagcagttccagtcagccatcaagctctgaaagtggctcatttctcctcaaatctggcacaacacccctgccacctggagcagccacttctccctccaagagcacaaatggagctcccggtactgttgttgaatcagaagaagaaaaagccaaaaaattactttattgttcactatgcaaagtggctgtgaactccctgtcacagctagaggcacacaacacaggatctaaacacaagaccatggttgaagctcgtaatggggctggtccaattaaatcctatcctagacctggatcaagattaaagatgcagaatggcagtaaggggtcaggactacagaacaagacatttcattgtgaaatctgtgatgttcatgttaattcagaaattcaactcaaacagcacatttctagccgaaggcataaagatcgagttgcagggaaaccactgaagccaaaatacagcccttacaacaaactccagcggagcccgagtattctagcagcaaaacttgcattccagaaagatatgatgaagcctttggccccagccttcctgtcctcacctctcgcagcggcggcagccgtgtcctcagcgctgtcactcccaccccggccctctgcctcgctcttccaggctccagccattcctccagctcttctgaggcctgggcatgggcccatccgcgccactcctgcctccatcctctttgctccgtactaacgtctgcaaaccccaagacgtttgaggccagtaggaagttgagaaagaaagccacaaggattcagcaatttaagcagtttgtgttgcagtaccccccattcacccacaaaatgcagcccaccacccagtcccccaattccagagagaaacacatcactagattgacgagggcttttagagactgctcctataattgaggaatcagcagcataggctttatctccctacttcctcccccaccctaccgcgttcaatttgtgtatctcagatatttgatttcttgagcatgtattggtcagaaagaaaaagaaagaaaaccattctctatttttccatgggtatgatctggcttaaaacaatatggaatattttcctgacagacttgaaaactaggatcttcctcagatgtctgtaaataactctggtatccaactgggtgtattctagtgtggaacaaaaaacagtgaacacaagtgcttacttgtggatactatcttaccaacggatcacaaagttctctttttggtgtactgttgttgacagggattgtgtactgtttcgacccaagtactgctgtatcctgtgtagtactagatctgtatctcttgtctgaattaaacatttttagttgctgtgtaaatgttaggaagcaaagtagctttgaattttctctgtaagagaataaaagataaaataatgtattttctttatttcacattttatttggagatatttaaatgaaatagaaagccatataacatagctataattactacctgtttgctatttttgtttaacttattttgtagcttcctcactggtttgtgttgctaagcaaacgtatacaaacagaaaaagagcttcctaaattgcacatttttgcacctcttgtgcattctgcaagaagacaatgaatccatgtatttctatataagtatcttcttcatttttaacctgttttcatttgtaatgatgctacataattttgtggctccctaatgcaataatgtacagaagataaaaaaatttataattgaacaatttgtctttctgttcgctgaatatattgcaggtcatgctcccatgcccccctttctaagccgatatcaacaagactggaatgtttgtgatatcaggggcaagagttatcatagaacaacaaaatagagtggactcttttagagcatctatatctgcaacctgtaaatggtaaaatgtctgtgtatttttttaaatgtaccttttcaataaaagtacaaaaaataaaa

SEQ ID NO: 299615 - protein, 138 aa, Artificial Sequence
  derived and/or modified sequence
MLGSTCHTTTLPALVRTPTLMMQPSLDIKPFMSFPVDSSSAVGLFPNFNTKRRGLFETNKFCQMDPVQKAVINHTFGVSIPPKKKQVISCNVCQLRFNSDSQAEAHYKGSKHAKKVKALDATKNKPKMVPSKDSAKAN

SEQ ID NO: 299616 - DNA, 96 bp, Artificial Sequence
  derived and/or modified sequence
atgaacatggccaacttcctgagaggcttcgaggagaagggcatcaagaacgacagacccgaggaccagctgagcaaggagaagaagaagatctag

SEQ ID NO: 299617 - DNA, 417 bp, Artificial Sequence
  derived and/or modified sequence
atgctgggcagcacctgccacaccaccaccctgcccgccctggtgagaacccccaccctgatgatgcagcccagcctggacatcaagcccttcatgagcttccccgtggacagcagcagcgccgtgggcctgttccccaacttcaacaccaagagaagaggcctgttcgagaccaacaagttctgccagatggaccccgtgcagaaggccgtgatcaaccacaccttcggcgtgagcatcccccccaagaagaagcaggtgatcagctgcaacgtgtgccagctgagattcaacagcgacagccaggccgaggcccactacaagggcagcaagcacgccaagaaggtgaaggccctggacgccaccaagaacaagcccaagatggtgcccagcaaggacagcgccaaggccaactag

SEQ ID NO: 299618 - DNA, 228 bp, Artificial Sequence
  derived and/or modified sequence
atgaacatggccaacttcctgagaggcttcgaggagaagggcatcaagaacgacagacccgaggaccagctgagcaaggagaagaagaagatcctgttcagcttctgcgaggtgtgcaacatccagctgaacagcgccgcccaggcccaggtgcacagcaacggcaagagccacagaaagagagtgaagcagctgagcgacggccagccccccccccccgcccagtag

SEQ ID NO: 299619 - DNA, 96 bp, Artificial Sequence
  derived and/or modified sequence
atgaatatggccaactttctgagagggtttgaagagaaggggatcaaaaatgaccggccagaagatcagctatctaaggagaagaagaagatttag

SEQ ID NO: 299620 - DNA, 417 bp, Artificial Sequence
  derived and/or modified sequence
atgttagggagtacctgtcataccacgaccctccctgcccttgtccggacaccaaccctcatgatgcagccctcactggatatcaagccttttatgagctttcctgtcgattcatcttctgcagtggggctgttccctaattttaataccaaaaggagaggcctgttcgagactaacaagttctgccagatggacccagtgcagaaggccgtgattaatcacaccttcggtgtgagcattcctcccaagaagaaacaggtcattagttgtaatgtctgccagttgaggtttaatagcgatagccaggccgaggcgcactataagggttcaaaacacgccaagaaggtcaaggccttggatgccactaagaataaacctaagatggtgcctagtaaggactcagccaaggcaaactag

SEQ ID NO: 299621 - DNA, 228 bp, Artificial Sequence
  derived and/or modified sequence
atgaacatggcaaactttctacgcggcttcgaggaaaaagggataaaaaacgacaggcctgaagatcagctttcaaaggagaagaaaaagatactgtttagcttctgtgaggtctgtaacattcagttaaacagcgctgcccaggcccaagtgcactcgaatgggaaaagccaccgcaagcgcgtcaagcaactctcagacggacagcccccacccccagctcagtag

SEQ ID NO: 299622 - DNA, 96 bp, Artificial Sequence
  derived and/or modified sequence
atgaacatggccaacttcctgcggggctttgaggagaagggcatcaagaatgacaggcctgaggaccagctgagcaaggagaagaagaagatctag

SEQ ID NO: 299623 - DNA, 417 bp, Artificial Sequence
  derived and/or modified sequence
atgctgggcagcacctgccacaccaccaccctgcctgccctggtgaggacccccaccctgatgatgcagcccagcctggacatcaagcccttcatgtccttccctgtggacagcagcagcgctgtgggcctcttccccaacttcaacaccaagaggcggggcctgtttgagaccaacaagttctgccagatggaccctgtgcagaaggccgtcatcaaccacaccttcggcgtgtccatcccccccaagaagaagcaggtgatcagctgcaatgtgtgccagctgcgcttcaacagcgacagccaggccgaggcccactacaagggcagcaagcacgccaagaaggtgaaggccctggatgccaccaagaacaagcccaagatggtgcccagcaaggacagcgccaaggccaactag

SEQ ID NO: 299624 - DNA, 228 bp, Artificial Sequence
  derived and/or modified sequence
atgaacatggccaacttcctgcggggctttgaggagaagggcatcaagaatgacaggcctgaggaccagctgagcaaggagaagaagaagatcctcttctccttctgtgaggtgtgcaacatccagctgaacagcgctgcccaggcccaggtgcacagcaatggcaagagccacaggaagagggtgaagcagctgagtgatggccagcccccacctccagcccagtag

SEQ ID NO: 299625 - DNA, 96 bp, Artificial Sequence
  derived and/or modified sequence
atgaacatggccaacttcctgcggggcttcgaggagaagggcatcaaaaacgatagacctgaggaccaattatccaaagagaaaaagaaaatctag

SEQ ID NO: 299626 - DNA, 417 bp, Artificial Sequence
  derived and/or modified sequence
atgctgggcagcacctgccacaccaccaccctgcccgccctggtgcgtacacctactctaatgatgcagccatccctagacatcaaaccatttatgtcattccccgtcgacagtagctctgcagtcggactttttccaaactttaataccaaaaggcgagggctgttcgagacaaacaagttctgccagatggaccctgtgcagaaagctgtgattaaccacacattcggcgtgagcatcccacccaaaaaaaagcaggtgatttcctgtaacgtgtgccaactgcgctttaattcggactctcaggcggaggcccactacaaaggcagcaagcacgccaaaaaggtaaaagctctggatgctacaaaaaataaacctaagatggtgccctctaaggattcggctaaggctaattag

SEQ ID NO: 299627 - DNA, 228 bp, Artificial Sequence
  derived and/or modified sequence
atgaacatggccaacttcctgcggggcttcgaggagaagggcatcaaaaacgatagacccgaagaccagttgtctaaagaaaaaaaaaagattctttttagcttttgtgaggtttgcaacattcagctcaattcagctgcacaagctcaagtccacagtaatggcaagtcccatcggaaacgtgtaaaacagctgtctgacggtcagccaccccctccagcccagtag

SEQ ID NO: 299628 - DNA, 96 bp, Artificial Sequence
  derived and/or modified sequence
atgaatatggctaattttctccggggtttcgaagaaaagggtattaagaatgatagacccgaggaccaactgtcgaaagagaaaaagaagatatag

SEQ ID NO: 299629 - DNA, 417 bp, Artificial Sequence
  derived and/or modified sequence
atgcttggtagtacctgtcatacgacaacacttcctgccctcgtgaggacccctacattaatgatgcaaccatctctcgatatcaaaccattcatgagtttcccagtagacagcagcagcgcggttggtcttttccctaactttaatactaagaggagggggctgttcgaaacgaataaattttgccaaatggatccagttcaaaaggccgtgataaatcatacttttggggtgtcgatcccgcctaagaagaagcaggttattagttgcaacgtgtgccagcttcgatttaattctgacagtcaggccgaggcccactataagggtagcaagcatgctaaaaaggtaaaggcgttggacgcaaccaaaaacaaacccaaaatggtgccaagcaaagactctgctaaggccaactag

SEQ ID NO: 299630 - DNA, 228 bp, Artificial Sequence
  derived and/or modified sequence
atgaacatggccaactttctaagggggttcgaagaaaaggggatcaagaacgacagacccgaggaccagctgtccaaagaaaaaaagaaaatcctgttttccttttgtgaggtgtgcaacattcagctgaactcagcagctcaagcacaggtgcattctaacggcaaaagccataggaagcgggtcaagcagctgtccgatggccagccaccaccaccggctcagtag

SEQ ID NO: 299631 - DNA, 404 bp, Artificial Sequence
  derived and/or modified sequence
agggggatagctccctcatcttggatctaggggagcttataacatcttttaaaaggcgaaaattcaagttatctgtggactgtcagaacattttgcataagtcatccccagatgttctacatttcaactccatcaaatattaaattgatgtttatgggctaacctggaaaccgaaaaacagtttgtttcactacaagaataagaaaatatgtccaaattcctgtcagctgacttataaagggacttttagaacacaacccaatgcatgaggtactccttaagccctgacaaccatcttgaagatggaatcatgaatatggcaaattttctacggggctttgaagaaaaggggataaagaacgacaggcctgaggaccagttgagcaaagagaaaaagaaaattc

SEQ ID NO: 299632 - DNA, 501 bp, Artificial Sequence
  derived and/or modified sequence
tagactataagcttttggaaaacagggactatgtcttcttcaacaatgtgtacacaacaagtagcaggttgtttggcacatggcagatgctcggcagtacatgccacactactacccttcctgctcttgtgcgcacacctaccctgatgatgcagccttcactggatatcaaaccatttatgtcttttccagtggacagtagttctgctgttgggctctttccaaattttaacacaaaaagaagaggcttatttgagaccaataaattttgccagatggatcctgtgcaaaaagcggttattaaccatacatttggagtatccattcccccaaagaagaaacaagttatttcttgtaatgtctgtcagcttcgctttaactcagatagccaggccgaggcccactacaaaggaagtaaacatgccaagaaggtcaaagcactagacgcaacgaaaaataaacccaaaatggttccttccaaggacagcgcaaaggctaatc

SEQ ID NO: 299633 - DNA, 565 bp, Artificial Sequence
  derived and/or modified sequence
agggtgacataatggtagaacacagaacacttgtagaaatacttgaggaatgagtctgtgaggtttaatttgtgctaaaaattcatcaacacatctagagcaacgcaaatcttcccaagacagatggagactgttttaagatgttctacatttcaactccatcaaatattaaattgatgtttatgggctaacctggaaaccgaaaaacagtttgtttcactacaagaataagaaaatatgtccaaattcctgtcagctgacttataaagggacttttagaacacaacccaatgcatgaggtactccttaagccctgacaaccatcttgaagatggaatcatgaatatggcaaattttctacggggctttgaagaaaaggggataaagaacgacaggcctgaggaccagttgagcaaagagaaaaagaaaattcttttctccttctgtgaggtgtgcaacatccagctgaactctgcagcccaggctcaggtgcattccaacggcaaatcccaccgcaaacgagtgaagcagctgagtgatgggcagcccccaccacccgcccagg

SEQ ID NO: 299634 - DNA, 1103 bp, Artificial Sequence
  derived and/or modified sequence
gggccggggccgcccgcccccgcgtcgcgggctctttaaggccggcggttttcgcagccagcccggggcggggaaagcggagcgcgcgctccacgcgggaccgcctcccgggccgtctgagcagagggcggggtgcaggcggaatggccctcgtgccctatgaggagaccacggaatttgggttgcagaaattccacaagcctcttgcaactttttcctttgcaaaccacacgatccagatccggcaggactggagacacctgggagtcgcagcggtggtttgggatgcggccatcgttctttccacatacctggagatgggagctgtggagctcaggggccgctctgccgtggagctgggtgctggcacggggctggtgggcatagtggctgccctgctgggtgctcatgtgactatcacggatcgaaaagtagcattagaatttcttaaatcaaacgttcaagccaacttacctcctcatatccaaactaaaactgttgttaaggagctgacttggggacaaaatttggggagtttttctcctggagaatttgacctgatacttggtgctgatatcatatatttagaagaaacattcacagatcttcttcagacactggaacatctctgtagcaatcactctgtgattcttttagcatgccgaattcgctatgaacgggataacaacttcttagcaatgctggagaggcaatttactgtgagaaaggttcactacgatcctgaaaaagatgtacatatttacgaagcacagaagagaaaccagaaggaggacttataattggctataatttataagaatgttgtcattgagtgtgtcacttaaggtcttagactgcaaatctaaccatatttaatgaaatgtcttactgtacaaaaagtctaagccaaaggttctcaggggagaaagcacatgtgcagttttaaaacaaagcagtgctttgtcccattgctgtgatttttagtcagactttactcagtctgaaatgcaattaacattaaaggattaagtgtgagatttcgatttatgctatttgtgtatcccatactcctcccttttaataaacagtttccactgatgata

SEQ ID NO: 299635 - DNA, 1051 bp, Artificial Sequence
  derived and/or modified sequence
gattcggaagagccatgcaaaagaaattggacaaaggcttcctccacctgtttctttttttcttttgaacttgtaaacgaccttaaaagcatttggagttagttaagaacagataatgtatcttttggccagagcgtcacccaggattcttttgcacggcaggtctgagcagagggcggggtgcaggcggaatggccctcgtgccctatgaggagaccacggaatttgggttgcagaaattccacaagcctcttgcaactttttcctttgcaaaccacacgatccagatccggcaggactggagacacctgggagtcgcagcggtggtttgggatgcggccatcgttctttccacatacctggagatgggagctgtggagctcaggggccgctctgccgtggagctgggtgctggcacggggctggtgggcatagtggctgccctgctgggtgctcatgtgactatcacggatcgaaaagtagcattagaatttcttaaatcaaacgttcaagccaacttacctcctcatatccaaactaaaactgttgttaaggagctgacttggggacaaaatttggggagtttttctcctggagaatttgacctgatacttggtgctgatatcatatatttagaagaaacattcacagatcttcttcagacactggaacatctctgtagcaatcactctgtgattcttttagcatgccgaattcgctatgaacgggataacaacttcttagcaatgctggagaggcaatttactgtgagaaaggttcactacgatcctgaaaaagatgtacatatttacgaagcacagaagagaaaccagaaggaggacttataattggctataatttataagaatgttgtcattgagtgtgtcacttaaggtcttagactgcaaatctaaccatatttaatgaaatgtcttactgtacaaaaagtctaagccaaaggttctcaggggagaaagcacatgtgcagttttaaaacaaagcagtgctttgtcccattgctgtgatttttagtcagactttactcagtctg

SEQ ID NO: 299636 - DNA, 1003 bp, Artificial Sequence
  derived and/or modified sequence
ctgtgctttagttgaaaagggttttgtgacttttccactcgattgccgccaagcgggctattacgccgcttctgaccccaccgtggagacgcggggactagagtgaccatgccttcttcggagcgagctgtctccatcatccgctaacgcgccacctttaaaaaacaggcacaacgcgcaagcgacaaagtcagaggcagagagcggcggagcacatgatagaaaaggtcgagaggcacattcagcgccaggtctgagcagagggcggggtgcaggcggaatggccctcgtgccctatgaggagaccacggaatttgggttgcagaaattccacaagcctcttgcaactttttcctttgcaaaccacacgatccagatccggcaggactggagacacctgggagtcgcagcggtggtttgggatgcggccatcgttctttccacatacctggagatgggagctgtggagctcaggggccgctctgccgtggagctgggtgctggcacggggctggtgggcatagtggctgccctgctgggtgctcatgtgactatcacggatcgaaaagtagcattagaatttcttaaatcaaacgttcaagccaacttacctcctcatatccaaactaaaactgttgttaaggagctgacttggggacaaaatttggggagtttttctcctggagaatttgacctgatacttggtgctgatatcatatatttagaagaaacattcacagatcttcttcagacactggaacatctctgtagcaatcactctgtgattcttttagcatgccgaattcgctatgaacgggataacaacttcttagcaatgctggagaggcaatttactgtgagaaaggttcactacgatcctgaaaaagatgtacatatttacgaagcacagaagagaaaccagaaggaggacttataattggctataatttataagaatgttgtcattgagtgtgtcacttaaggtcttagactgcaaatctaa

SEQ ID NO: 299637 - DNA, 869 bp, Artificial Sequence
  derived and/or modified sequence
cgggccggggccgcccgcccccgcgtcgcgggctctttaaggccggcggttttcgcagccagcccggggcggggaaagcggagcgcgcgctccacgcgggaccgcctcccgggccgtctgagcagagggcggggtgcaggcggaatggccctcgtgccctatgaggagaccacggaatttgggttgcagaaattccacaagcctcttgcaactttttcctttgcaaaccacacgatccagatccggcaggactggagacacctgggagtcgcagcggtggtttgggatgcggccatcgttctttccacatacctggagatgggagctgtggagctcaggggccgctctgccgtggagctgggtgctggcacggggctggtgggcatagtggctgccctgctgggaggtggaatttaattctcctccccttgaatatgggctggacaaagagaaaaatggtagctcaacagtggagacacctggacagcactttaaccaagtgatcaaagttaatatcgccaattatgtatgtgctcccggatgtgatgttatgagaaaggcacactatacctctgtggaattcctccccaaaacctattatctcaatctatccatagaaaacactggacaaatgcaaactgagggatattctaaaagaaaacagatcactactcttcaaaagttacaaggccatcaaagacaaggaaacaaactttcacagactgaaggagactataattaaatgcgatatggtacccaaactggattatgtaagtaaaaaaactggggaaataaaatgtataattcagttaatggtattataccaatgtacttttatttttgataaatgtaccctggttatgtaatat

SEQ ID NO: 299638 - DNA, 273 bp, Artificial Sequence
  derived and/or modified sequence
atggccctggtgccctacgaggagaccaccgagttcggcctgcagaagttccacaagcccctggccaccttcagcttcgccaaccacaccatccagatcagacaggactggagacacctgggcgtggccgccgtggtgtgggacgccgccatcgtgctgagcacctacctggagatgggcgccgtggagctgagaggcagaagcgccgtggagctgggcgccggcaccggcctggtgggcatcgtggccgccctgctgggcggcggcatctag

SEQ ID NO: 299639 - DNA, 273 bp, Artificial Sequence
  derived and/or modified sequence
atggctctggtcccatatgaggaaaccacggagttcggacttcagaagttccataaacccctggctactttctctttcgcgaatcacacgatccagatcaggcaggattggcgacacctaggagtggctgcagtggtatgggacgccgcaatagtgctgagtacctacctggagatgggggctgtcgagctgagaggtaggtcggccgtggaacttggggccggtacgggactggtgggcattgttgccgcgctcctgggcggaggcatatag

SEQ ID NO: 299640 - DNA, 273 bp, Artificial Sequence
  derived and/or modified sequence
atggcactagtcccttatgaagaaaccaccgaattcggacttcagaaattccataaaccgctggcgacattttcattcgccaatcacaccattcagattaggcaggactggcgccacttgggagtcgccgccgtggtctgggatgcggccatcgtcctctctacctatctggagatgggggccgtggaactccgcggacgatccgctgtagaactaggtgcaggtacaggcctggttgggatcgttgctgcccttttgggaggggggatctag

SEQ ID NO: 299641 - DNA, 273 bp, Artificial Sequence
  derived and/or modified sequence
atggccctggtgccctatgaggagaccacagaatttggcctgcagaagttccacaagcccctggccaccttctcctttgccaaccacaccatccagatccggcaggactggaggcacctgggcgtggccgctgtggtgtgggatgctgccatcgtgctgagcacctacctggagatgggcgctgtggagctgcggggccgctctgctgtggagctgggcgccggcaccggcctggtgggcatcgtggccgccctgctgggcggcggcatctag

SEQ ID NO: 299642 - DNA, 1366 bp, Artificial Sequence
  derived and/or modified sequence
gttttcgcagccagcccggggcggggaaagcggagcgcgcgctccacgcgggaccgcctcccgggccgtaagtaccggcgtggcggcgcctcagcccggcctgggcgagccctgggtgctccgccgggcagctcacggcgccccgtatggcctggggatcctaagaggccctgtgacccccctcgcctggtctccctctcacccctggagggttgccgcagctccggggcccccgggcaggaagggcgcactggtcgtcccgggagaggggtctgagcagagggcggggtgcaggcggaatggccctcgtgccctatgaggagaccacggaatttgggttgcagaaattccacaagcctcttgcaactttttcctttgcaaaccacacgatccagatccggcaggactggagacacctgggagtcgcagcggtggtttgggatgcggccatcgttctttccacatacctggagatgggagctgtggagctcaggggccgctctgccgtggagctgggtgctggcacggggctggtgggcatagtggctgccctgctgggaggtggaatttaattctcctccccttgaatatgggctggacaaagagaaaaatggtagctcaacagtggagacacctggacagcactttaaccaagtgatcaaagttaatatcgccaattatgtatgtgctcccggatgtgatgttatgagaaaggcacactatacctctgtggaattcctccccaaaacctattatctcaatctatccatagaaaacactggacaaatgcaaactgagggatattctaaaagaaaacagatcactactcttcaaaagttacaaggccatcaaagacaaggaaacaaactttcacagactgaaggagactataattaaatgcgatatggtacccaaactggattatgtaagtaaaaaaactggggaaataaaatgtataattcagttaatggtattataccaatgtacttttatttttgataaatgtaccctggttatgtaatatactaagattagagaaagctggatgaagggtatccggaactctgtatttttaaaactcctttgtaagtttaaaattacttaaaaatatattaaaaatgtatatttacctttgtactggtttgagtaaaaaaactgactttagaatgttaacattttagatggtgaaattagaagtaattcaatttttaggtaatgtttcttaatttacttataatgaacatgttttacttgtgtaataataaatttaaaaaacctgatagtaatgtaaatactctttggtaacctgcttttgtccgagaacatcttcccatcttaataaaaatacacctttatttactcttaa

SEQ ID NO: 299643 - DNA, 273 bp, Artificial Sequence
  derived and/or modified sequence
atggccctggtgccctacgaggagaccaccgagttcggcctgcagaagtttcataaacccttagcgacattctccttcgctaaccacaccattcaaatacgtcaggattggcgccatctcggggttgccgccgttgtgtgggacgcggccatcgtgctgagcacatacctggagatgggcgcagtggaactccgcggaagatcggcagtggaactcggcgccggaactggcttggtgggtattgtggcagcccttctgggcggcggaatttag

SEQ ID NO: 299644 - DNA, 273 bp, Artificial Sequence
  derived and/or modified sequence
atggccctggtgccctacgaggagaccaccgagttcggcctgcagaaatttcataagcccttagccacattctcatttgcaaaccacacaattcagattaggcaggactggcgtcatctgggagtggccgccgtcgtgtgggacgcagccatagttctctccacttatctggagatgggggctgttgagctacggggccgcagtgcggtcgaattgggagccgggaccggactggtaggaattgtggcggccctgctgggaggaggcatttag

SEQ ID NO: 299645 - DNA, 273 bp, Artificial Sequence
  derived and/or modified sequence
atggcactcgtgccatatgaggaaacaactgaattcggcctgcaaaagttccataagccactggccacattctcctttgctaaccacacaatacagattcgtcaagattggaggcacctcggggtggctgccgtcgtctgggacgctgctatcgtcttgagtacgtacctggagatgggtgcggtggagctgaggggcagaagcgcagttgaactgggcgcaggcactggactggtcggtatcgttgctgctctgctgggcggtggtatctag

SEQ ID NO: 299646 - DNA, 273 bp, Artificial Sequence
  derived and/or modified sequence
atggccctggtgccctacgaggagacaactgaattcggacttcaaaagtttcataagcccctggctacattctccttcgctaaccacactatccagattagacaggactggagacaccttggagtcgccgcagtcgtttgggatgcagctattgttctcagtacctatctggaaatgggggctgtggaacttcgcggtaggagcgccgtggagctgggggcaggaactgggttagtggggatagtggccgctctattgggcggaggaatctag

SEQ ID NO: 299647 - protein, 330 aa, Artificial Sequence
  derived and/or modified sequence
MTPNSTGEVPSPIPKGALGLSLALASLIITANLLLALGIAWDRRLRSPPAGCFFLSLLLAGLLTGLALPTLPGLWNQSRRGYWSCLLVYLAPNFSFLSLLANLLLVHGERYMAVLRPLQPPGSIRLALLLTWAGPLLFASLPALGWNHWTPGANCSSQAIFPAPYLYLEVYGLLLPAVGAAAFLSVRVLATAHRQLQDICRLERAVCRDEPSALARALTWRQARAQAGAMLLFGLCWGPYVATLLLSVLAYEQRPPLGPGTLLSLLSLGSASAAAVPVAMGLGDQRYTAPWRAAAQRCLQGLWGRASRDSPGPSIAYHPSSQSSVDLDLN

SEQ ID NO: 299648 - DNA, 1869 bp, Artificial Sequence
  derived and/or modified sequence
cccgaccagatcccgtggttctgaggaccggccctggaaccctgcgtccttccgacccaccagctccctcgaggatggacttgaggctggatgctttcctcttcccactttttgtcccaacagaagtccctgatctccaggatccctgactggctgtgcagagctggcacagccacactccacgggcttccagcccttcaggcccagctctcccggagagcaccagagtccctttgctccatttacttgcgctcttcagccagcaagtgtttcctaatgtctcacccccagtcccagctttcctgctgcaatttccgcctgttccctcccatttcaggccttaagggagtgtggctgggcttctctcctccccctcactccaaagccgcacttgatacaaggtggaaatcaaagcaccacttctggcttcccagccttgaacttgcccttccctctcaatgtatctggtttcctcagcttccctgtgcagcaagagtgtcactcccctcttgcttttcccaagctccccatgcgcccctctcagcagatctgtcttagaggggccaggtgcagagaaaggcagaaatcctaataatgttcccagcgatcgctgcctgtcgcggagtgctgaagggccaagtgttgatctgagtcctcatcacacgggacttcatttagtctcacgataggcatgccggctgccgctccaggactcccctgtccccaggaccaagatgacgcccaacagcactggcgaggtgcccagccccattcccaagggggctttggggctctccctggccctggcaagcctcatcatcaccgcgaacctgctcctagccctgggcatcgcctgggaccgccgcctgcgcagcccacctgctggctgcttcttcctgagcctactgctggctgggctgctcacgggtctggcattgcccacattgccagggctgtggaaccagagtcgccggggttactggtcctgcctcctcgtctacttggctcccaacttctccttcctctccctgcttgccaacctcttgctggtgcacggggagcgctacatggcagtcctgaggccactccagccccctgggagcattcggctggccctgctcctcacctgggctggtcccctgctctttgccagtctgcccgctctggggtggaaccactggacccctggtgccaactgcagctcccaggctatcttcccagccccctacctgtacctcgaagtctatgggctcctgctgcccgccgtgggtgctgctgccttcctctctgtccgcgtgctggccactgcccaccgccagctgcaggacatctgccggctggagcgggcagtgtgccgcgatgagccctccgccctggcccgggcccttacctggaggcaggcaagggcacaggctggagccatgctgctcttcgggctgtgctgggggccctacgtggccacactgctcctctcagtcctggcctatgagcagcgcccgccactggggcctgggacactgttgtccctcctctccctaggaagtgccagtgcagcggcagtgcccgtagccatggggctgggcgatcagcgctacacagccccctggagggcagccgcccaaaggtgcctgcaggggctgtggggaagagcctcccgggacagtcccggccccagcattgcctaccacccaagcagccaaagcagtgtcgacctggacttgaactaaaggaagggcctctgctgactcctaccagagcatccgtccagctcagccatccagcctgtctctaccgggccccacttctctggatcagagaccctgcctctgtttgaccccgcactgactgaataaagctcctctggccgtt

SEQ ID NO: 299649 - DNA, 1382 bp, Artificial Sequence
  derived and/or modified sequence
gagaacccagacgggcagagcctgggtaggagagcctggccccgctgtccccactgggtggagacaccatgcacttggtccacttgtgctcttcagccaggacaccagacatggtccaaaccgctgcagggctggctgcagcaactccctgacactcaggaaggcccaggctgggcaggcaatacctgctcccaacagccatgcatgccggctgccgctccaggactcccctgtccccaggaccaagatgacgcccaacagcactggcgaggtgcccagccccattcccaagggggctttggggctctccctggccctggcaagcctcatcatcaccgcgaacctgctcctagccctgggcatcgcctgggaccgccgcctgcgcagcccacctgctggctgcttcttcctgagcctactgctggctgggctgctcacgggtctggcattgcccacattgccagggctgtggaaccagagtcgccggggttactggtcctgcctcctcgtctacttggctcccaacttctccttcctctccctgcttgccaacctcttgctggtgcacggggagcgctacatggcagtcctgaggccactccagccccctgggagcattcggctggccctgctcctcacctgggctggtcccctgctctttgccagtctgcccgctctggggtggaaccactggacccctggtgccaactgcagctcccaggctatcttcccagccccctacctgtacctcgaagtctatgggctcctgctgcccgccgtgggtgctgctgccttcctctctgtccgcgtgctggccactgcccaccgccagctgcaggacatctgccggctggagcgggcagtgtgccgcgatgagccctccgccctggcccgggcccttacctggaggcaggcaagggcacaggctggagccatgctgctcttcgggctgtgctgggggccctacgtggccacactgctcctctcagtcctggcctatgagcagcgcccgccactggggcctgggacactgttgtccctcctctccctaggaagtgccagtgcagcggcagtgcccgtagccatggggctgggcgatcagcgctacacagccccctggagggcagccgcccaaaggtgcctgcaggggctgtggggaagagcctcccgggacagtcccggccccagcattgcctaccacccaagcagccaaagcagtgtcgacctggacttgaactaaaggaagggcctctgctgactcctaccagagcatccgtccagctcagccatccagcctgtctctaccgggccccacttctctggatcagagaccctgcctctgtttgaccccgcactgactgaataaagctcctctggccgtt

SEQ ID NO: 299650 - DNA, 1465 bp, Artificial Sequence
  derived and/or modified sequence
gcctgggtaggagagcctggccccgctgtccccactgggtggagacaccatgcacttggtccacttgtgctcttcagccaggacaccagacatggtccaaaccgctgcagggctggctgcagcaactccctgacactcaggaaggcccaggctgggcaggcaatacctgctcccaacagccatcgaacatgatacagcccacagcctgcgggtctgcgcccctggattaacatgctgccctgccaggaggacacgacctgcagccccatcctaactctggccaccccatcctgcaggcatgccggctgccgctccaggactcccctgtccccaggaccaagatgacgcccaacagcactggcgaggtgcccagccccattcccaagggggctttggggctctccctggccctggcaagcctcatcatcaccgcgaacctgctcctagccctgggcatcgcctgggaccgccgcctgcgcagcccacctgctggctgcttcttcctgagcctactgctggctgggctgctcacgggtctggcattgcccacattgccagggctgtggaaccagagtcgccggggttactggtcctgcctcctcgtctacttggctcccaacttctccttcctctccctgcttgccaacctcttgctggtgcacggggagcgctacatggcagtcctgaggccactccagccccctgggagcattcggctggccctgctcctcacctgggctggtcccctgctctttgccagtctgcccgctctggggtggaaccactggacccctggtgccaactgcagctcccaggctatcttcccagccccctacctgtacctcgaagtctatgggctcctgctgcccgccgtgggtgctgctgccttcctctctgtccgcgtgctggccactgcccaccgccagctgcaggacatctgccggctggagcgggcagtgtgccgcgatgagccctccgccctggcccgggcccttacctggaggcaggcaagggcacaggctggagccatgctgctcttcgggctgtgctgggggccctacgtggccacactgctcctctcagtcctggcctatgagcagcgcccgccactggggcctgggacactgttgtccctcctctccctaggaagtgccagtgcagcggcagtgcccgtagccatggggctgggcgatcagcgctacacagccccctggagggcagccgcccaaaggtgcctgcaggggctgtggggaagagcctcccgggacagtcccggccccagcattgcctaccacccaagcagccaaagcagtgtcgacctggacttgaactaaaggaagggcctctgctgactcctaccagagcatccgtccagctcagccatccagcctgtctctaccgggccccacttctctggatcagagaccctgcctctgtttgaccccgcactgactgaataaagctc

SEQ ID NO: 299651 - DNA, 2003 bp, Artificial Sequence
  derived and/or modified sequence
gagaacccagacgggcagagcctgggtaggagagcctggccccgctgtccccactgggtggagacaccatgcacttggtccacttgtgctcttcagccaggacaccagacatggtccaaaccgctgcagggctggctgcagcaactccctgacactcaggaaggcccaggctgggcaggcaatacctgctcccaacagccatctcccaggaaggaccctgttgctagtgtggagcaaagacgagtcaagtttatgggctggaagtcctacccggaggctgctcactgagctgtgatggctacaaggacagatggggggaagggtgcagggtgcccgagacctggcccgctggagcctgtcacctaatggctggctggaagaccactacacaccagccagccctggtccattctctcatttagaggcctccccggtggaggcagggatacacaaaatgctttggggctggatgggcccgcctttcagtctaaacaagagacctcaacacagctgcccagaaaaggcagataccagaaatggataaagctggctgggtggggactgtccgaagggcagccagcagtgagctccggctggttgctaccacacaggacatatgtgttgccagacctgaattttcaatagaaaccaaagatagttttttatataaatgtttaattggcaattaattgaaaaattctgtgtatcagcgaacatgatacagcccacagcctgcgggtctgcgcccctggattaacatgctgccctgccaggaggacacgacctgcagccccatcctaactctggccaccccatcctgcaggcatgccggctgccgctccaggactcccctgtccccaggaccaagatgacgcccaacagcactggcgaggtgcccagccccattcccaagggggctttggggctctccctggccctggcaagcctcatcatcaccgcgaacctgctcctagccctgggcatcgcctgggaccgccgcctgcgcagcccacctgctggctgcttcttcctgagcctactgctggctgggctgctcacgggtctggcattgcccacattgccagggctgtggaaccagagtcgccggggttactggtcctgcctcctcgtctacttggctcccaacttctccttcctctccctgcttgccaacctcttgctggtgcacggggagcgctacatggcagtcctgaggccactccagccccctgggagcattcggctggccctgctcctcacctgggctggtcccctgctctttgccagtctgcccgctctggggtggaaccactggacccctggtgccaactgcagctcccaggctatcttcccagccccctacctgtacctcgaagtctatgggctcctgctgcccgccgtgggtgctgctgccttcctctctgtccgcgtgctggccactgcccaccgccagctgcaggacatctgccggctggagcgggcagtgtgccgcgatgagccctccgccctggcccgggcccttacctggaggcaggcaagggcacaggctggagccatgctgctcttcgggctgtgctgggggccctacgtggccacactgctcctctcagtcctggcctatgagcagcgcccgccactggggcctgggacactgttgtccctcctctccctaggaagtgccagtgcagcggcagtgcccgtagccatggggctgggcgatcagcgctacacagccccctggagggcagccgcccaaaggtgcctgcaggggctgtggggaagagcctcccgggacagtcccggccccagcattgcctaccacccaagcagccaaagcagtgtcgacctggacttgaactaaaggaagggcctctgctgactcctaccagagcatccgtccagctcagccatccagcctgtctctaccgggccccacttctctggatcagagaccctgcctctgtttgaccccgcactgactgaataaagctcctctggccgtt

SEQ ID NO: 299652 - DNA, 993 bp, Artificial Sequence
  derived and/or modified sequence
atgactcccaactcaacaggcgaagtcccgtcccccataccaaaaggggccctgggactgtcgcttgctttggcctccctgattatcacggctaatctccttcttgctctgggaattgcctgggatcgaagactacggtccccccccgcaggatgcttcttcctgagtttgctgctggctggcctcctgaccggcttggcccttcctacgttacccggtctttggaaccagtcacggagaggttactggtcttgtctactcgtgtacttagccccgaacttctccttcctctcactgttggcaaatcttctgctggtgcatggtgaaagatatatggccgttctacgtccactccagccccccgggagtatcagattggccttgctgctgacttgggcaggtcctctattgttcgcctctctccccgcacttggatggaaccattggacacccggcgcgaattgcagttctcaggcgatctttcctgctccttacctgtacctggaggtgtatggcctgctcttaccagccgtcggcgccgccgccttcctgtctgtgcgggttctggccacagcgcataggcagttgcaggatatatgtagactggagcgagccgtgtgtagagacgaaccgagcgcattggccagggcccttacctggcgacaggcccgcgctcaggcaggcgccatgctgctcttcggcctttgctggggaccgtatgtggcaacactgctgctttccgttttggcttacgaacagaggccaccactagggcccgggaccctcctgtccctgctttcgctgggaagcgcctccgccgccgcagtacccgttgccatgggactgggggatcagcgatatactgcaccctggcgggctgccgcacaaaggtgccttcaggggctctgggggagagccagtcgcgacagcccagggcccagcatcgcctatcatcctagctcgcagtcttccgtggacttggaccttaactag

SEQ ID NO: 299653 - DNA, 993 bp, Artificial Sequence
  derived and/or modified sequence
atgaccccgaattccacgggggaggtgccatctccaatcccaaagggcgccctggggctcagcttggccttggcgagcttgatcataactgctaacctcctgcttgcattgggcattgcttgggaccggaggctgagaagccctcctgccgggtgcttctttctatccctgctcctggctggcctactcacaggtcttgccctgcccaccttacctggcctgtggaaccaatccaggaggggttactggagctgccttctcgtgtatttagctcctaacttctcttttctgtcattgctcgcaaaccttctcctagtgcacggggaaaggtacatggcagtcctacggcctctccagcctccaggctccatacgacttgccctcctgctcacctgggctggccctctcttgtttgcttcccttcccgctttaggatggaatcactggacacctggtgccaattgctcgagccaggcaatatttcccgctccgtacctgtacctggaagtgtacggtctgttactccctgctgtgggcgctgcagcctttcttagtgtgagggtgctagcgaccgctcatcgacagcttcaggacatctgccgccttgaaagagcagtttgtcgggatgagccctctgctctcgcccgcgcccttacgtggcgacaggctagagctcaagccggggcgatgctgctgtttggattatgctgggggccctatgtggccactcttctgctcagcgtcttggcttacgagcagcggcctccactcggcccaggaactttacttagccttctctcactaggcagtgcgtccgctgctgcagtgccagtggcaatgggccttggggaccagcggtataccgcaccatggagggccgctgctcagcgctgcctccaagggctttggggtcgggcaagtagagactcccctggaccctcaatcgcttatcaccctagctctcaatcttctgtggatctggatttgaactag

SEQ ID NO: 299654 - DNA, 993 bp, Artificial Sequence
  derived and/or modified sequence
atgactcccaactccaccggcgaggtgcccagtcctatccctaaaggcgccctgggcttatctctcgccctagcttccctcattatcacagctaacttactgctggcactagggatagcctgggacaggcggctaagatcccctccagcaggttgtttcttcctgtcactgctgcttgcaggactgctgactgggttagctttgcctacgctgccaggactttggaatcagtcgagacgcggctattggtcatgcctgttggtatacttggccccaaatttctctttcctgtccctgttggcaaatctattgctggttcatggtgagcggtacatggctgtgctccgccccttacagccaccaggctctatcagactggccctcttactcacatgggctggacccctgctgtttgcctcacttcccgctctgggctggaaccattggaccccgggagcgaactgttcaagccaggctatcttcccagctccatacctctaccttgaggtctatggtctcctcttgccggccgtcggagctgcagcattcctgtctgtgagggttctcgcaacagctcaccgccagctgcaagacatttgtcgcctcgagagagccgtgtgccgggacgagcccagtgccctggctcgagctctgacctggaggcaagcaagagcgcaggcaggcgcaatgctgttgttcggcctgtgctggggcccctatgtcgcgacccttctccttagcgtactggcatacgagcagaggcctcccctgggtccgggcaccctcctgtccctgttaagcttgggctcagcatcagccgccgccgttccagtcgccatgggccttggagatcagagatatactgcaccctggcgcgcagctgcacaaagatgtctccaaggtctgtggggcagggcttcgcgagactcccctggcccgtctatcgcctaccaccctagttcacagtcttctgtggatttggatctaaactag

SEQ ID NO: 299655 - DNA, 993 bp, Artificial Sequence
  derived and/or modified sequence
atgacgcctaacagcaccggagaggttccaagtcctatcccaaaaggggctctagggctctcactggccctggcgtccttgatcatcacagccaacctgttgctggccctcggtatagcttgggatcggcgccttagaagcccccctgcaggatgcttttttctgtccctgctcttggccggtcttctcaccggattagctttaccaacattacccggactttggaatcaatctcggcgcggttactggtcatgtctactagtctaccttgcccccaatttttccttcctgagcctcctagccaatctactgctagtgcatggtgagcgatacatggcggtcctgcgccccctacaaccgccaggatcaattcgactggccttattgctgacgtgggcagggccgctgctctttgctagtctgcccgctctcggatggaaccactggaccccgggggccaattgctcaagtcaggccatattcccagccccctacctttacctggaggtgtacgggctgctcctgcccgctgtaggcgccgcggcgtttctgtccgttagagttctcgctaccgcccaccgccagctgcaggatatctgtcgactcgagagggccgtctgtagagacgagcctagcgcccttgcaagagctcttacttggcgccaggcacgcgcacaggctggagccatgctcctgttcggactctgttggggcccttatgttgctactctccttctgtcggtgctggcttatgagcaacgaccacctctgggccctgggactttgctctccttgctttctctgggatccgccagcgcagcagcggtgcccgtggctatgggcttgggcgaccagcgatacactgcgccttggcgagcggctgcccaaagatgcctccagggactctggggtagggcgagcagagatagtcctgggccttctatcgcatatcatccaagttcacagtcttcggtggaccttgacctgaactag

SEQ ID NO: 299656 - DNA, 993 bp, Artificial Sequence
  derived and/or modified sequence
atgacccccaacagcactggagaggtgcccagccccatccccaagggggccctgggcctgagcctggccctggccagcctcatcatcacagccaacctgctgctggccctgggcatcgcctgggaccggcggctgcggagccccccagctggctgcttcttcctgagcctgctgctggccggcctgctgaccggcctggccctgcccaccctgcccggcctgtggaaccagagcagaagaggctactggagctgcctgctggtgtacctggcccccaacttctccttcctgagcctgctggccaacctgctgctggtgcatggagagcgctacatggctgtgctgcggcccctgcagcccccaggcagcatccggctggccctgctgctgacctgggccggccccctgctgtttgccagcctgcctgccctgggctggaaccactggacccctggggccaactgcagcagccaggccatcttccctgccccctacctgtacctggaggtgtatggcctgctgctgcctgctgtgggcgctgctgccttcctgtctgtgcgggtgctggccacagcccaccggcagctgcaggacatctgccgcctggagagagctgtgtgcagagatgagcccagcgccctggcccgggccctgacctggaggcaggcccgggcccaggccggggccatgctgctgtttggcctgtgctggggcccctacgtggccaccctgctgctgtctgtgctggcctatgagcagaggcctcccctgggccctggcaccctgctgagcctgctgagcctgggcagcgccagcgctgctgctgtgcctgtggccatgggcctgggggaccagcgctacacagccccctggagggctgctgcccagcgctgcctgcagggcctgtggggccgggccagccgggacagccctggccccagcatcgcctaccaccccagcagccagagctctgtggacctggacctgaactag

SEQ ID NO: 299657 - DNA, 993 bp, Artificial Sequence
  derived and/or modified sequence
atgacccccaacagcaccggcgaggtgcccagccccatccccaagggagccctcggcctcagcctcgcgctagcctccctcatcatcactgccaacttactgctcgccctaggcatagcatgggatcggcgcttacggtcccctcctgccggctgtttcttcttaagtctactgctggctggtttgctgacgggactagctctcccaaccctgccggggctctggaaccagtctcgccgcggatactggagctgtttgctcgtgtacttagccccaaacttcagcttcctcagtctgcttgctaacctgctgttggtccatggtgaacggtatatggctgtgctgagacccctgcaaccccccgggtctatcaggctggcccttctgctcacatgggcagggcccctgcttttcgcgagcctacctgcattaggttggaaccactggacccccggcgccaactgtagtagtcaagctatttttccagcaccatacttgtacttagaggtctacgggttattattacctgccgtcggagccgctgcattcctatccgtgcgagtgctcgccactgctcaccggcagctacaggatatttgccgcctcgagagagccgtttgtagggatgagccctctgcattagcgagagcacttacctggcgccaggcacgggcgcaggctggcgctatgctgttgtttgggttgtgttggggtccttatgtcgccacactgctcctatccgtactggcgtatgagcagcgcccaccattaggacctggcactttactgtctctgctgagtctcggctcagcatccgcagctgccgtacccgtggccatgggtctgggagaccagcggtatacggccccctggagagctgctgcccaacgctgccttcaggggctgtggggaagggcgagccgcgactcacccggcccatccattgcctatcatccatcgagtcagagtagcgtggatctagacctgaactag

SEQ ID NO: 299658 - DNA, 993 bp, Artificial Sequence
  derived and/or modified sequence
atgacccccaacagcaccggcgaggtgcccagccccatccccaagggggcccttggactcagtttggctctggcgtctctgattatcacagctaacctattgctggcgttgggcattgcttgggaccgtcgcctccgttccccgcctgctgggtgcttctttctctccctgctgcttgctggcctcctaaccggcctggccctcccgaccctgccaggcctttggaaccaatcacggcgtggctactggagttgcctacttgtatatctggcacccaatttttctttcttatccctccttgccaatctcctccttgtgcatggcgaaagatatatggcagtgctgcgacccctgcagccccctgggagcatccgcctagccctgcttctgacatgggctgggcccttactcttcgcctctctacctgccttgggctggaaccactggacacctggcgcgaattgctcatcccaggccatcttcccagcaccttatctttacctcgaggtgtatggcttgctgctgcctgctgtgggcgccgccgcctttctgtcagtgcgggtactggctactgcccatagacaactacaggatatttgcaggcttgagcgggccgtgtgccgcgatgagcctagcgcactagcccgcgctctcacctggagacaggctcgggctcaggccggcgctatgctgctcttcggactttgctggggcccgtatgttgccactctgcttctcagtgtactggcatatgagcagcgcccacctctaggacccggtacattgctcagtctgctgtcccttggcagcgctagcgccgcggctgtgccagtagcaatgggtcttggggaccagcgctataccgctccatggcgggcggctgcacagcgctgccttcagggactctggggaagagcctctcgcgacagcccaggtccctccatagcttaccacccctcttctcaaagttctgtcgatcttgacctgaactag

SEQ ID NO: 299659 - DNA, 993 bp, Artificial Sequence
  derived and/or modified sequence
atgacccccaacagcaccggcgaggtgcccagccccatccccaagggggcactcgggctgagcctggcgcttgcctccctgattattactgccaacttgctcttagcgctgggtattgcgtgggacagacgccttcgcagcccccccgccgggtgtttcttccttagtttacttctagcaggcctgcttaccggactggccctccctaccttgcctggcctgtggaatcagtcaaggcgtggctattggagctgccttctggtctaccttgctcccaacttctccttcttgtcccttctggcaaacctgctactcgtccatggagaacgatacatggccgtcctgcgacccctgcaacctccaggaagcatccggctagccctacttcttacctgggctggccccctgctcttcgccagcctccccgccttgggttggaatcattggacgcctggcgcgaattgttcttcccaggcaattttcccagctccctatctgtatctcgaggtgtatggcctgctcctaccggccgtgggagccgcagcctttctttccgtgcgagtactggctactgctcacaggcaactgcaggatatctgtcggctcgaacgtgccgtctgtcgggatgaaccatcagccctggcccgggcactaacttggagacaggccagggcacaggcaggcgccatgctgctgttcggcctctgctggggtccatatgtcgccaccctacttctgagtgtgttggcatatgagcagcgaccacccttaggacccggtactcttctgtcactcctctcacttggatccgctagcgcagccgcggtgcccgtggcgatgggccttggcgatcaaagatacaccgcaccttggcgagccgcagcccaaaggtgtttgcagggtctgtggggcagagcctctcgtgattccccaggaccatccatagcatatcacccctcgtcacagtcttctgtggacctcgatttaaattag

SEQ ID NO: 299660 - DNA, 993 bp, Artificial Sequence
  derived and/or modified sequence
atgacccccaacagcaccggcgaggtgcccagccccatccccaagggagccctcggtctgtctctggcgttggcttcgttaataataaccgctaacctgctgctcgctctcggtatcgcttgggataggagactccggagcccaccggctggctgcttttttctctccctactgctcgcaggcttgctgaccggtttggcactcccaaccttacccgggctttggaaccaatcacgtcgcggctattggtcctgcctgctggtgtatttggcccccaacttctcctttctcagtctcctggccaatctccttctcgttcacggggagcgttatatggcagttctacgaccattgcagccacccggatccattcggctggctctgctgctcacctgggccggacccctgctatttgcaagtctgcccgccctggggtggaaccactggacacctggagcaaactgctcttctcaagcaatctttcctgcgccctacctatacctcgaggtttacgggctcttgctgccagccgtcggcgccgcagccttcctgagtgtgagagtactcgcaacggctcatcgccagctccaagacatatgtagattagaacgggccgtatgcagagatgagccctcagccctggctcgcgccctgacctggagacaggctagggcccaggccggagccatgcttctgtttggattatgttggggaccatacgtggcaactcttcttctctccgttctcgcttacgagcaacggccacctttagggcctgggacgctactaagtctgttatctcttggttccgccagtgccgccgcagttcctgttgcaatgggtttaggggatcaacgctatacagcaccatggcgcgcagccgcccagaggtgcctccaggggctatggggaagagcctctagggattctcccgggcccagtatcgcataccacccgagcagtcagagcagcgttgatctagatctaaattag

SEQ ID NO: 299661 - DNA, 993 bp, Artificial Sequence
  derived and/or modified sequence
atgacacccaactcaaccggtgaggttccatctcctattcctaagggggctctcgggctaagtctggctctagcaagcttaatcatcacagcaaatctgctcctagccctggggatcgcttgggatcgccgtctgcggtccccacccgcaggatgtttttttctgtctctgcttttagctgggcttctcaccgggctggccctccccacacttccaggtctttggaaccagtccagaagaggttattggtcttgcctcttagtgtacctggccccaaatttttcttttttatccttgctcgctaatttactgctggtgcatggggagcgttatatggccgtgctgcgtccgttgcaaccccctggcagcattcgtcttgcgctactgctgacgtgggcaggccctttgctcttcgcctcactgcctgccctcgggtggaatcactggactcccggagctaattgtagttcccaggcaattttccctgctccttacctctacctagaggtttacggcctgttactccctgctgtgggagcggctgcgtttctgagcgttcgcgttttagcgaccgcccacagacaacttcaggacatctgcaggctggagagggctgtgtgtcgggatgagccgagtgctctggcgagagctttaacgtggagacaggcaagagcgcaagccggagcgatgctgctgttcgggctgtgttggggtccttatgtcgctaccttactcctgtctgtgctggcctacgagcagaggcctcctctcggtcccggaactttgctctcgttgttgtctttggggtctgccagtgccgctgccgttccagtcgccatgggtctaggtgaccagcgctataccgccccttggcgtgccgcagcacaacgttgtctgcaggggttatggggcagggcatctagagactcaccagggccatctattgcataccatcccagtagtcaatcgtccgtggacctggacctgaactag

SEQ ID NO: 299662 - DNA, 993 bp, Artificial Sequence
  derived and/or modified sequence
atgacacctaattccacaggggaggtgccatcaccaattccaaagggggctctgggactaagcctggctctggcttccctcatcataacagctaacttgctcttagccttagggattgcttgggaccgtcgccttagatctcccccagcgggttgctttttcctgagtctgctcttggccggactgttaacaggcctggcccttccaacccttccgggactatggaaccagtccagacgtggatattggagttgcctgctggtgtaccttgcacccaatttctcatttctatctctgctggctaacctgctcctggttcacggcgagcggtacatggccgtgctaaggcccttgcagccacctggcagtatacgcctggccctgctcttaacatgggcaggccctctgctctttgcatcattgcctgccctcggctggaatcactggactcccggagccaattgttcaagtcaggctatttttccagctccctacctgtacctggaggtgtatggactcctcctgccggcagttggggcagccgctttcctctcagtacgcgtactggcaaccgctcaccgccagctccaggacatatgtcgactcgagcgagccgtgtgtcgggacgagcccagcgccctggccagagctctgacatggcgccaggccagagcgcaggcgggagccatgctgttgttcggcctgtgttggggtccgtacgtcgctacactgctgctgtcagtcttagcctatgagcagagacctcctctcggacccggaactctcttgtctcttctgagcttggggagcgctagtgctgccgctgttccagttgccatgggactgggggaccagagatacaccgccccatggagagcagccgcacagaggtgcctgcaagggctgtggggccgagcctctagggacagccctggaccttcaatagcttatcatccatcttctcagtcctccgtcgatctggacctgaattag

SEQ ID NO: 299663 - DNA, 993 bp, Artificial Sequence
  derived and/or modified sequence
atgaccccaaactccactggagaagtgccaagcccgattcccaagggcgcactcgggctttctctcgctttagcctccctgatcatcacggccaacttgctgctggctctgggcatcgcctgggacaggcgcctgcgatctccgccagccggatgcttctttttgtcattgctcctcgctggcttgcttacaggcctcgcccttcccaccctccccggtctgtggaaccaaagtagacggggttattggagttgtctgctagtatatcttgcgccaaactttagcttcctgagtctgctggcaaatctgctattggtgcacggagagcggtacatggccgtccttagaccactgcagcctcccggttccattcgtcttgcattattgctgacatgggcagggcctttgttgttcgcatccctgcccgcattaggctggaatcactggactcccggagcaaactgcagctcacaagcaatcttccccgctccatacctctacttggaagtatacggcctgttgctcccagctgtcggggcagcagcatttttaagcgtccgggttttggccaccgctcaccggcagctgcaggacatttgccgactggagcgagcggtgtgtcgggacgagccctccgcgctcgcaagagccctgacttggaggcaggctagggcccaagctggagcaatgctgcttttcggactgtgctggggaccgtatgttgccaccctgctcctcagcgttctggcttatgaacagcgccctccactggggcctggtaccctcctgtcactgctgtcgctcggatccgccagtgctgccgcagtaccagtcgccatgggattaggggatcagagatatacagccccttggcgcgctgccgctcaacggtgccttcagggcctttgggggagagcctcgagggattcgcccggaccatcaatcgcttaccaccccagcagtcagagttccgttgatctggacctgaactag

SEQ ID NO: 299664 - DNA, 993 bp, Artificial Sequence
  derived and/or modified sequence
atgaccccgaattccaccggtgaagtcccatctcctatacctaaaggggctttgggcttgtccctggccctggcttccctcatcatcaccgctaatctgctcctcgcgctaggaattgcctgggacaggcgcttaagatcgccccctgctggctgcttctttctctcactgctgctggctgggttgctcaccggcctggctttgcctaccctgcctggactgtggaaccagtcacggagaggctattggtcttgtttactcgtttatctggccccaaatttctcttttctgagcctgttagccaacttactccttgttcacggcgagcgttacatggcagttctgcgcccacttcagcctcccggaagcattaggctcgccttgctgctgacctgggcaggacccctactattcgcctcactccctgctctggggtggaaccattggacgccaggggcaaactgcagctctcaggccatctttccggctccctacctgtacttagaggtctacggcttgctgcttcctgccgtgggcgcagccgcattcctctcggtaagagttctggcgaccgcccaccggcaactgcaggatatctgtaggctggagagagccgtctgccgggatgagccgtcagcccttgcgagagctctcacatggagacaggccagggcacaagcaggagctatgctgttgttcgggctgtgctggggtccttatgtggctaccctgttactgtcggtgctcgcctatgagcagaggcctcctctggggccaggaacattgctgagccttctgtctctgggctcggcaagcgcggctgcagtgcctgtagccatgggcctcggagatcagcgttacacggcgccttggagggcagctgctcagcgttgccttcagggtctgtggggaagggcctcacgagattccccgggacctagcatcgcgtatcatcctagtagccagagttcagttgatctcgacctgaattag

SEQ ID NO: 299665 - DNA, 993 bp, Artificial Sequence
  derived and/or modified sequence
atgacccccaacagcaccggcgaggtgcccagccccatccccaagggcgccctgggcctgagcctggccctggccagcctgatcatcaccgccaacctgctgctggccctgggcatcgcctgggacagaagactgagaagcccccccgccggctgcttcttcctgagcctgctgctggccggcctgctgaccggcctggccctgcccaccctgcccggcctgtggaaccagagcagaagaggctactggagctgcctgctggtgtacctggcccccaacttcagcttcctgagcctgctggccaacctgctgctggtgcacggcgagagatacatggccgtgctgagacccctgcagccccccggcagcatcagactggccctgctgctgacctgggccggccccctgctgttcgccagcctgcccgccctgggctggaaccactggacccccggcgccaactgcagcagccaggccatcttccccgccccctacctgtacctggaggtgtacggcctgctgctgcccgccgtgggcgccgccgccttcctgagcgtgagagtgctggccaccgcccacagacagctgcaggacatctgcagactggagagagccgtgtgcagagacgagcccagcgccctggccagagccctgacctggagacaggccagagcccaggccggcgccatgctgctgttcggcctgtgctggggcccctacgtggccaccctgctgctgagcgtgctggcctacgagcagagaccccccctgggccccggcaccctgctgagcctgctgagcctgggcagcgccagcgccgccgccgtgcccgtggccatgggcctgggcgaccagagatacaccgccccctggagagccgccgcccagagatgcctgcagggcctgtggggcagagccagcagagacagccccggccccagcatcgcctaccaccccagcagccagagcagcgtggacctggacctgaactag

SEQ ID NO: 299666 - DNA, 1203 bp, Artificial Sequence
  derived and/or modified sequence
atgctggagtacgagaagcacggcgagctgaagaccaagagcatcgacctgctggacctgggccccagcaccgacgtgagcgccctggtggaggagatccagaaggccgagcccctgctgaccgccagcagaaccgagcaggtgaagctgctgatccagagactgcaggagaagctgggccagaacagcaaccacaccttctacctgttcaaggtgctgaaggcccacatcctgcccctgaccaacgtggccctgaacaagagcggcagctgcttcatcaccggcagctacgacagaacctgcaagctgtgggacaccgccagcggcgaggagctgaacaccctggagggccacagaaacgtggtgtacgccatcgccttcaacaacccctacggcgacaagatcgccaccggcagcttcgacaagacctgcaagctgtggagcgtggagaccggcaagtgctaccacaccttcagaggccacaccgccgagatcgtgtgcctgagcttcaacccccagagcaccctggtggccaccggcagcatggacaccaccgccaagctgtgggacatccagaacggcgaggaggtgtacaccctgagaggccacagcgccgagatcatcagcctgagcttcaacaccagcggcgacagaatcatcaccggcagcttcgaccacaccgtggtggtgtgggacgccgacaccggcagaaaggtgaacatcctgatcggccactgcgccgagatcagcagcgccagcttcaactgggactgcagcctgatcctgaccggcagcatggacaagacctgcaagctgtgggacgccaccaacggcaagtgcgtggccaccctgaccggccacgacgacgagatcctggacagctgcttcgactacaccggcaagctgatcgccaccgccagcgccgacggcaccgccagaatcttcagcgccgccaccagaaagtgcatcgccaagctggagggccacgagggcgagatcagcaagatcagcttcaacccccagggcaaccacctgctgaccggcagcagcgacaagaccgccagaatctgggacgcccagaccggccagtgcctgcaggtgctggagggccacaccgacgagatcttcagctgcgccttcaactacaagggcaacatcgtgatcaccggcagcaaggacaacacctgcagaatctggagatag

SEQ ID NO: 299667 - DNA, 1203 bp, Artificial Sequence
  derived and/or modified sequence
atgctggagtacgaaaagcatggagaactcaaaacaaaatctattgacctgctggacctaggcccctctactgatgtcagcgcgttggtcgaggaaatccagaaggcggagcctcttttgacagcttcccggacggagcaggtgaaactcctgatacaaagactccaggagaaactgggccaaaatagcaatcatacattttatctgttcaaagttctcaaggcacacattttgcccctgacaaacgttgccctgaacaagagcggatcttgcttcatcactggatcctacgatcggacctgcaaactttgggatactgcaagcggagaggaactcaacacactggaagggcaccggaatgtcgtgtacgccattgcatttaacaatccatatggcgacaagatcgccaccgggagtttcgacaaaacttgcaagctttggagcgtggagactggaaagtgctatcacacatttcgggggcatacagccgagattgtctgtctttccttcaacccccagtccacattggtcgccacaggctccatggacaccacagccaaactctgggacatccagaacggtgaggaggtctatactctccgcggccacagcgccgagatcatcagcctctctttcaacacatccggagatcgcatcatcaccggcagcttcgaccataccgtggtggtttgggacgctgataccggtcggaaagttaacatcctaatcggtcattgtgcagaaattagctccgcttcttttaattgggattgtagcctgatcctgaccggctctatggacaagacctgtaaactttgggatgccactaacggcaagtgtgtggccaccctgaccggacatgacgacgagatcttagattcgtgcttcgactacaccgggaaactgatcgctaccgcctcggccgacggtaccgccagaatcttttccgctgccacacgcaagtgcattgccaagctggaaggacatgagggagaaatatccaagatttccttcaatccccagggcaaccatctgctgactggatcatctgataagacggcgcggatttgggatgctcagacgggacagtgtttgcaggtgctggaagggcacaccgatgaaatattctcctgtgctttcaactataaaggaaacatcgtaatcacaggaagcaaagataacacctgccgcatctggcggtag

SEQ ID NO: 299668 - DNA, 1203 bp, Artificial Sequence
  derived and/or modified sequence
atgctggagtatgagaagcatggagagctgaagaccaagagcattgacctgctggacctgggccccagcacagatgtgtctgccctggtggaggagatccagaaggccgagcccctgctgacagccagcaggacagagcaggtgaagctgctgatccagaggctgcaggagaagctgggccagaacagcaaccacaccttctacctgttcaaggtgctgaaggcccacatcctgcccctgaccaacgtggccctgaacaagagcggcagctgcttcatcaccggcagctatgacaggacctgcaagctgtgggacacagccagcggggaggagctgaacaccctggagggccacagaaatgtggtgtatgccatcgccttcaacaacccctatggagacaagatcgccaccggcagctttgacaagacctgcaagctgtggagcgtggagaccgggaagtgctaccacaccttccggggccacacagctgagatcgtgtgcctgtccttcaacccccagagcaccctggtggccaccggctccatggacaccacagccaagctgtgggacatccagaatggagaggaggtgtacaccctgcggggccacagcgctgagatcatcagcctgtccttcaacaccagcggggaccgcatcatcaccggcagctttgaccacacagtggtggtgtgggatgctgacaccggcaggaaggtgaacatcctgattggccactgtgccgagatcagcagcgccagcttcaactgggactgcagcctcatcctgaccggctccatggacaagacctgcaagctgtgggatgccaccaatggaaaatgtgtggccaccctgactggacatgatgatgagatcctggacagctgctttgactacacaggcaagctgattgccacagccagcgcagatggaacagcccgcatcttctctgctgccaccaggaaatgtattgccaagctggagggccatgaaggagagatcagcaagatctccttcaacccccagggcaaccacctgctgaccggcagcagtgacaagacagcccgcatctgggatgcccagacaggccagtgcctgcaggtgctggagggccacacagatgagatcttcagctgtgccttcaactacaagggcaacatcgtcatcaccggcagcaaggacaacacctgccgcatctggaggtag

SEQ ID NO: 299669 - DNA, 1203 bp, Artificial Sequence
  derived and/or modified sequence
atgctggagtacgagaagcacggcgagctgaagaccaagagcatcgatctgttggatctgggaccctccacagacgtgtctgcgcttgtcgaagaaattcaaaaggctgaaccactcctgactgcttcgaggaccgagcaagtgaaactgctgatacaaaggctccaagaaaagctcgggcaaaattctaatcacaccttctacttattcaaagtgctaaaggctcacattcttcctcttactaacgttgccctgaataaaagtggttcctgcttcatcaccggctcttatgaccggacttgtaaactgtgggacaccgcctctggagaagaacttaacactttggaaggtcatagaaatgtggtgtatgcgattgcctttaataacccttatggagataaaattgccacaggttcattcgacaaaacatgcaagctgtggtctgtcgagacaggcaagtgctatcacacttttcgcggacatacagctgagattgtctgccttagcttcaacccccaatctactctggtcgccacaggctctatggatactaccgccaagctttgggatatccagaacggagaagaggtgtacacattgcgcgggcacagtgccgaaatcatctctctgagcttcaatacttctggagatcgaatcataaccggaagctttgatcacaccgtagtagtgtgggacgcagacacaggaagaaaggtgaacatccttataggacactgcgccgagatctcatcggctagctttaattgggactgcagtcttatcctaacagggtcgatggacaagacctgtaagctgtgggatgctactaacgggaaatgtgttgccaccctgaccgggcatgatgatgaaatccttgactcctgctttgactatactggcaagctcatcgccactgccagcgccgatggcaccgccagaatattctcagctgccaccagaaaatgcattgccaagctagagggacatgagggagagatttccaagataagtttcaatcctcaggggaatcatctgctgacgggatcctcagataaaactgcacggatatgggacgcacagaccggccagtgtttacaggtactagaagggcatacagacgaaatcttctcatgcgcttttaattataagggaaatatcgtaatcactgggtcaaaagataacacgtgtcgcatatggcgctag

SEQ ID NO: 299670 - DNA, 1203 bp, Artificial Sequence
  derived and/or modified sequence
atgcttgaatatgagaagcacggagagcttaaaaccaaatctatcgatctcctggatctgggaccctccactgacgttagtgccctcgttgaagagatccaaaaagcagaacccctgctgaccgcgagcaggaccgaacaagtaaagctgctgatccaacggctccaggagaaacttggacagaacagtaaccacaccttctacctgtttaaagtcctcaaggcacatatccttccgctgacgaacgtggctctcaataaatcgggctcctgtttcattacagggagctatgatcgcacgtgcaaactgtgggacacggcaagtggagaggaactgaacactctcgagggtcacaggaacgttgtgtatgctatcgcttttaacaacccctatggagacaagattgcaacaggaagttttgataaaacttgcaagttgtggtccgtcgaaaccggaaaatgctatcacacctttcgcggtcatactgccgaaattgtgtgcctgtcctttaatccgcaatctaccttggtcgcaaccggtagtatggacactactgcaaagctttgggatattcagaatggcgaagaggtttatactctgaggggtcattccgctgagattatcagcctgagttttaacaccagcggtgatcggatcatcacgggatcctttgatcacacagttgtggtgtgggatgctgacacgggacgcaaagtgaacatcctgattgggcactgcgcagagatcagctccgcttccttcaattgggactgtagtttgattttgacggggtcaatggataaaacctgtaagctgtgggacgctacaaatggaaaatgtgtagccacactgacaggacacgatgacgaaattctggacagttgtttcgattacaccggaaaattgatagctactgcttccgcagatggaacagcaagaattttttctgccgcaacacgaaaatgcattgctaaactggaagggcacgagggcgagatctcgaagatcagctttaaccctcagggcaatcacctgctgaccggcagttcagataagacagctcgtatttgggacgcccagaccggacagtgcttacaggtacttgaggggcacactgatgaaatcttttcgtgcgccttcaactacaagggtaatatcgtaattacaggaagcaaggacaacacatgccgcatctggcgctag

SEQ ID NO: 299671 - protein, 624 aa, Artificial Sequence
  derived and/or modified sequence
MEKSGPSSTISEQQLQRQEGWINTKTDLAEQSLISSEKWLQLHGLKSNKLTLKQILSQIGFPHCEDYVASLGRPVASRYADGLFPQLYRAEDGRVYNLTAKSELIYQFVEHLTQAVESYKQRMDWLTSKSRQIFGVILEQCVTIVLDFGGILEGELDLCREALTMVLQEQVAHITEFNIIRVSQEPVKWQENATPVTEQSIATAISWVEKLTVELTVSEAGRLDALLEAGRDKTIESIYYFVVGDVPEESKELLLQRALEIPCPVYTVSFNARGEGTIAFLKDLSAKTHSRFHAFAERTECVEFPAFSTKDGDNVMTWNSRKLKGKLPPGAGVREDVFLVWQEMEEACSTLAQIQRLVAEPPKPDVATVDCESETTSVEIASNPEDTWDSKTWLQKYGLKAQKLSLYDVLADCSFRHADGVVDIKAKPENESVQTSAETNKKTVHAKYCSRFVHAPWKDGSLVHVNITKEKCKWYSERIHTALARIRRRIKWLQDGSQSLFGRLHNDCIYILIDTSHSMKSKLDLVKDKIIQFIQEQLKYKSKFNFVKFDGQAVAWREQLAEVNEDNLEQAQSWIRDIKIGSSTNTLSALKTAFADKETQAIYLLTDGRPDQGTSSHLLLTAAV

SEQ ID NO: 299672 - DNA, 1875 bp, Artificial Sequence
  derived and/or modified sequence
atggagaagagcggccccagcagcaccatcagcgagcagcagctgcagagacaggagggctggatcaacaccaagaccgacctggccgagcagagcctgatcagcagcgagaagtggctgcagctgcacggcctgaagagcaacaagctgaccctgaagcagatcctgagccagatcggcttcccccactgcgaggactacgtggccagcctgggcagacccgtggccagcagatacgccgacggcctgttcccccagctgtacagagccgaggacggcagagtgtacaacctgaccgccaagagcgagctgatctaccagttcgtggagcacctgacccaggccgtggagagctacaagcagagaatggactggctgaccagcaagagcagacagatcttcggcgtgatcctggagcagtgcgtgaccatcgtgctggacttcggcggcatcctggagggcgagctggacctgtgcagagaggccctgaccatggtgctgcaggagcaggtggcccacatcaccgagttcaacatcatcagagtgagccaggagcccgtgaagtggcaggagaacgccacccccgtgaccgagcagagcatcgccaccgccatcagctgggtggagaagctgaccgtggagctgaccgtgagcgaggccggcagactggacgccctgctggaggccggcagagacaagaccatcgagagcatctactacttcgtggtgggcgacgtgcccgaggagagcaaggagctgctgctgcagagagccctggagatcccctgccccgtgtacaccgtgagcttcaacgccagaggcgagggcaccatcgccttcctgaaggacctgagcgccaagacccacagcagattccacgccttcgccgagagaaccgagtgcgtggagttccccgccttcagcaccaaggacggcgacaacgtgatgacctggaacagcagaaagctgaagggcaagctgccccccggcgccggcgtgagagaggacgtgttcctggtgtggcaggagatggaggaggcctgcagcaccctggcccagatccagagactggtggccgagccccccaagcccgacgtggccaccgtggactgcgagagcgagaccaccagcgtggagatcgccagcaaccccgaggacacctgggacagcaagacctggctgcagaagtacggcctgaaggcccagaagctgagcctgtacgacgtgctggccgactgcagcttcagacacgccgacggcgtggtggacatcaaggccaagcccgagaacgagagcgtgcagaccagcgccgagaccaacaagaagaccgtgcacgccaagtactgcagcagattcgtgcacgccccctggaaggacggcagcctggtgcacgtgaacatcaccaaggagaagtgcaagtggtacagcgagagaatccacaccgccctggccagaatcagaagaagaatcaagtggctgcaggacggcagccagagcctgttcggcagactgcacaacgactgcatctacatcctgatcgacaccagccacagcatgaagagcaagctggacctggtgaaggacaagatcatccagttcatccaggagcagctgaagtacaagagcaagttcaacttcgtgaagttcgacggccaggccgtggcctggagagagcagctggccgaggtgaacgaggacaacctggagcaggcccagagctggatcagagacatcaagatcggcagcagcaccaacaccctgagcgccctgaagaccgccttcgccgacaaggagacccaggccatctacctgctgaccgacggcagacccgaccagggcaccagcagccacctgctgctgaccgccgccgtgtag

SEQ ID NO: 299673 - DNA, 1875 bp, Artificial Sequence
  derived and/or modified sequence
atggaaaaatccggaccatcgagcaccatctcggagcagcagctgcaaagacaggaagggtggattaatactaagactgacctcgccgaacagagcttgattagctccgaaaagtggctccagctgcacggtttgaagtctaacaagctcaccctgaagcagatcctgagccagatcggttttccacattgtgaagactacgtcgcctccctcggtagaccggtcgcaagtaggtatgctgatggattattccctcagctctatagagccgaggacggcagagtatacaaccttacagccaaatcggaattgatttatcagttcgttgagcatctcacccaggcagtggaatcctacaaacaaagaatggactggctcacatccaaatctcggcaaatctttggggtcatcttggagcaatgcgttacgatagtcctggatttcggcgggattctggagggagagctggatctttgtagagaagctctaacaatggtgcttcaggagcaagtagcccacatcaccgaattcaatatcatccgagtttcccaagagccagtgaaatggcaggagaacgcaacaccagtgacagagcagtctattgccacagccatctcatgggtcgagaagctcactgtcgaactgacagtttctgaggcaggcaggcttgatgcacttctggaggccggacgcgataagacgatcgagagcatctactactttgtggtgggggacgttccagaagaaagcaaagagcttttgctccagagagccctggagataccctgtcctgtgtacactgtgtccttcaatgcgcggggtgagggcacaatcgcttttctcaaagacctgagtgccaagactcattcaagattccatgcttttgcggagcgtactgagtgcgtggagtttcctgccttcagtactaaagatggtgataacgtcatgacgtggaactctcggaagctgaagggcaagttgcctccaggggccggggtccgcgaagacgtctttcttgtgtggcaggaaatggaggaggcttgttcaaccttggctcagattcagaggctggtcgctgagcccccaaaacctgatgtagcaactgtcgactgtgaatccgagacaacctcggtggagatagccagtaatccagaagacacttgggacagtaaaacttggctgcaaaaatacggcctgaaggcccagaaattgtccctgtatgatgtcttagctgactgctccttcaggcatgcagacggggtcgtggacatcaaggcaaaacccgagaatgagtccgttcagacgtctgcggaaacaaacaagaagaccgtgcatgccaaatattgcagtaggtttgtacacgccccatggaaagatggaagtttagtgcacgttaacattaccaaggagaaatgcaagtggtactctgaaagaatccatacggctctcgcaaggataagaaggcgtattaaatggctgcaggacggctcacagagcctgtttggcaggctccataacgattgcatttacatcctgattgacacatctcacagcatgaaatcaaagctggacctggtgaaggataaaataatccaatttattcaggagcagctcaaatataaaagcaaattcaactttgtaaaatttgacggacaggcagtggcctggagagagcagctcgcagaggtaaatgaggacaacctcgaacaggcccaatcctggatacgagacataaaaatcggttcctccaccaacaccctgtccgccctgaagactgctttcgccgataaagaaacccaagctatctacctgctgaccgacggccggcctgatcagggcacaagctctcacttgctgttaacggcggccgtgtag

SEQ ID NO: 299674 - DNA, 1875 bp, Artificial Sequence
  derived and/or modified sequence
atggagaagagcggccccagcagcaccatcagcgagcagcagctgcagaggcaggagggctggatcaacaccaagacagacctggccgagcagagcctcatcagcagcgagaagtggctgcagctgcacggcctgaagagcaacaagctgaccctgaagcagatcctgagccagatcggcttcccccactgtgaagattatgtggccagcctgggccggcctgtggccagccgctatgcagatggcctcttcccccagctgtacagagcagaagatggccgggtgtacaacctgacagccaagtctgagctgatctaccagtttgtggagcacctgacccaggccgtggagagctacaagcagaggatggactggctgaccagcaagagccggcagatctttggagtcatcctggagcagtgtgtgaccatcgtgctggactttggaggcatcctggagggggagctggacctgtgccgggaggccctgaccatggtgctgcaggagcaggtggcccacatcacagagttcaacatcatccgggtgtcccaggagcctgtgaagtggcaggagaatgccacccctgtgacagagcagagcatcgccacagccatctcctgggtggagaagctgactgtggagctgactgtgtctgaggccggccgcctggatgccctgctggaggccggccgggacaagaccatcgagagcatctactactttgtggtgggagatgtgcctgaggagagcaaggagctgctgctgcagagggccctggagatcccctgccctgtgtacacagtgtccttcaatgcccggggggagggcaccatcgccttcctgaaggacctgagcgccaagacccacagccgcttccacgcctttgctgagaggacagaatgtgtggagttccctgccttcagcaccaaggatggagacaacgtgatgacctggaacagcaggaagctgaagggcaagctgcccccaggagctggggtgagagaagatgtgttcctggtgtggcaggagatggaggaggcctgcagcaccctggcccagatccagaggctggtggccgagccccccaagccagatgtggccaccgtggactgtgagagcgagaccacctctgtggagatcgccagcaaccctgaggacacctgggacagcaagacctggctgcagaagtatggcctgaaggcccagaagctgagcctgtatgatgtgctggccgactgcagcttcagacatgctgatggagtggtggacatcaaggccaagccagaaaatgaatctgtgcagaccagcgctgagaccaacaagaagacagtgcacgccaagtactgcagcagatttgtgcacgccccctggaaggatggcagcctggtgcacgtgaacatcaccaaggagaagtgcaagtggtacagcgagcgcatccacacagccctggcccgcatcagaagacgcatcaagtggctgcaggacggcagccagagcctgtttggccgcctgcacaatgactgcatctacatcctgattgacaccagccacagcatgaagagcaagctggacctggtgaaggacaagatcatccagttcatccaggagcagctgaagtacaagagcaagttcaactttgtgaagtttgatggccaggccgtggcctggagggagcagctggccgaggtgaatgaagacaacctggagcaggcccagagctggatccgggacatcaagattggcagcagcaccaacaccctgagcgccctgaagacagcctttgctgacaaggagacccaggccatctacctgctgacagatggccgcccagaccagggcaccagcagccacctgctgctgacagctgctgtgtag

SEQ ID NO: 299675 - DNA, 1875 bp, Artificial Sequence
  derived and/or modified sequence
atggagaagagcggccccagcagcaccatcagcgagcagcagctgcagcgacaggagggatggatcaacaccaaaaccgatctcgctgagcagagtctgatttcgtcagaaaaatggctacagctccacggattaaagtccaacaagcttaccctgaaacagatacttagtcaaattggctttccccattgtgaagactatgtggccagcttgggtcgaccagtggcaagcagatacgccgatggtttatttccacaactgtacagagctgaggatgggcgtgtttacaacctgacggctaaatccgaactgatttaccaattcgtggagcatctaacacaagctgtcgaatcgtataagcagagaatggactggctcacttccaagtctcggcaaatcttcggcgtcatcttggagcaatgtgtaaccatagtcctagacttcggaggcatcctggaaggagagctcgatctctgtagggaggctctgaccatggtgctacaagagcaagtcgcacatatcacagaatttaacataataagagtgtctcaggaacctgtcaaatggcaggagaacgccacccccgtgaccgagcagagcattgcaacggcgattagttgggttgaaaagttgacagtagagctgactgtttcggaagccgggagattggatgccctcttggaggctggaagggataagaccatcgagtcaatatactatttcgtagtgggtgacgtgccagaggaatctaaggagctcctgctacaacgagctctggagattccctgccccgtctacaccgtctcatttaacgcccggggggagggtacgatcgcctttctcaaagacctcagtgccaaaacccacagtcggttccacgcttttgctgaaagaaccgagtgcgtcgagttccctgccttctccactaaagatggggataacgtgatgacatggaattcccgcaagctcaaaggcaagctgccaccaggtgccggagtgcgggaggacgtcttccttgtttggcaagagatggaagaagcttgttccacccttgctcagatccagcggctggtggctgaacctccaaagcccgacgtggccacagtcgattgcgaaagtgagacgacctccgtggaaattgccagcaaccccgaagatacctgggattccaaaacttggttacagaagtacggacttaaagcacagaagctgagcttatacgatgtgctcgcggattgctccttcagacatgccgatggcgtggtggacattaaagcaaagccagaaaacgaaagcgtgcagactagcgccgagaccaacaagaagacagtccacgctaagtactgcagccgcttcgttcatgctccctggaaggacggtagcctcgtgcatgttaacattactaaggagaagtgcaaatggtattccgagagaatccacacagccctcgccagaattcgtcgtcgcatcaaatggctccaggacggcagtcagagtctgttcgggcgcttacataatgattgcatatacatcctgatcgataccagccatagcatgaaatcgaaattagacctggtgaaggacaagattattcaattcatccaggaacaactgaaatacaaatccaagtttaacttcgtgaagttcgatggacaagctgtggcctggcgggaacagctggcagaggtgaatgaagataacctcgagcaggcgcagagttggattagggacattaaaattgggtccagcaccaatactctctccgcgttgaagactgcgtttgccgacaaggagacgcaggccatttacttgctgacagatggcagaccagaccagggaactagtagtcacctgctgttgaccgctgctgtgtag

SEQ ID NO: 299676 - DNA, 1875 bp, Artificial Sequence
  derived and/or modified sequence
atggagaagtcaggcccatcttctaccatctcagaacagcaactccagcgccaggagggatggataaacaccaaaacagacctggctgagcagtctctaatctccagcgaaaagtggcttcagctgcacgggctcaaatctaacaagcttactttgaagcagattctatctcagattggattccctcattgcgaagattacgtggcgagccttggcagacctgtcgcctctaggtatgctgacgggctttttccgcaactgtatagggccgaggacgggagggtgtacaacctgactgcgaagtcagagctgatctatcagtttgtggaacacttaacacaagctgtggaaagttataagcagcgaatggattggctcacatcgaagtcaagacaaatctttggcgtgatcctcgagcaatgtgtgaccatcgtgctcgacttcggagggatcttggagggcgaactcgacctgtgtagggaagctctcacaatggttctgcaagagcaagtggcccatattaccgaatttaacattatacgcgtgtcacaagagccagtgaaatggcaggaaaacgccacccccgtcacggaacaaagcatcgccacagcaatcagctgggtggagaagctgaccgtggagctgacagtctctgaagccggacgactggacgcactgctggaggcagggagggacaagacgatcgagtccatctactatttcgtggtaggggatgtcccggaggagagcaaggagttactccttcagagagcccttgaaatcccttgcccggtctacacggtgagctttaacgcgaggggtgaggggactatagcgttcctgaaggatctgagcgctaagacgcactctcggtttcatgcattcgctgagcgcactgagtgtgtagagttccctgcattcagcacaaaagatggcgataatgtgatgacatggaactctagaaaactgaagggcaaactacctcccggtgcgggtgtgcgggaggatgtcttcctcgtctggcaagagatggaagaggcctgctcaactctcgcccaaatccaaaggctcgtggctgagcctccaaaaccagacgtggcaaccgtcgactgtgagtctgagacgacttcagtggagatagcaagcaatcctgaggacacttgggattccaagacatggctgcagaagtatgggctcaaggctcaaaaactgtcgctttacgatgtcctagcagactgctccttcagacatgcagatggtgttgtcgacattaaggctaaacctgaaaatgagtctgtgcagacatccgccgaaacaaataaaaaaaccgtgcatgcaaagtactgttcacgcttcgtgcacgctccttggaaagatggctctttggtccacgtgaatattaccaaggaaaagtgcaaatggtattctgaacgcatacataccgctctagcgaggatccggcgtcggatcaagtggttacaggatggtagccagagtctgtttgggaggttgcacaatgactgtatctacattctcatcgacacatcccactcgatgaagtcgaaactggatttagtgaaggataagatcatccagttcattcaggagcagctcaaatataagtccaaattcaacttcgtgaaatttgacggacaggccgtcgcctggcgcgagcagctagctgaggtgaatgaggacaatctagagcaggcacagagttggattagagatatcaaaattggatcctcgacgaacactcttagtgcactcaaaacggcgtttgctgacaaggagacacaggcaatttacctcctgaccgatggtagacccgaccaaggcacatctagccatctgctgcttacggctgctgtgtag

SEQ ID NO: 299677 - DNA, 2139 bp, Artificial Sequence
  derived and/or modified sequence
ggagacgccgtcgtcaacagaccgcgctcggaaccagaggcgcgggtcacagagacctagaacagctggaatccttcgcccccggcgcgcagccttcgcccgccggaatcgctgccttatccaccagcgggatgcttacctcgcccgccctctcgggtcaggcgggcccgggaggatgggagggtggctgctgagcgggagccgccacgtcttccacccgacatattgcctagagtttgctgtgacttagatcttgattcagagatggagaaatcaggcccatcttctaccatctctgagcagcagctgcagaggcaagagggatggattaacaccaaaacagacttggctgagcagagtctcatttcatctgagaaatggcttcaactgcatgggcttaagagcaacaaattgaccttgaaacagattttgtcacagatcggattcccacattgtgaagattatgtggcgtctctggggagacctgtggcttctcggtatgctgatggtctgtttccacagctctacagagcagaagatggcagagtatacaatctgacagctaaatcagaactgatttatcagtttgtggaacatttaacacaagctgtggagagctacaagcagcgaatggactggctcaccagcaagagccggcagatttttggtgtcatcttggaacagtgcgtcaccatagtgctggattttggcggcattctggagggggagcttgatctgtgccgagaggctctaacaatggttctccaggagcaggtggctcacataaccgagttcaatatcatacgggtttctcaagagcctgtgaagtggcaggaaaatgctactcctgtgaccgaacagtccatagctactgccatcagttgggttgagaaactgacggttgagctgactgtgagcgaggctggccgcctggatgctctgctggaagccgggagagacaagactattgaatccatttactactttgtggtgggggatgttcctgaagaatccaaggagcttctcctccagagggccttggagatcccgtgtccagtctacacagtgtccttcaacgccagaggagaaggcactatagcttttctaaaggatctgagtgccaagacccacagcagattccacgcatttgccgagagaacagagtgtgtagaatttcctgcattctccacaaaggatggtgacaatgtgatgacttggaattcaaggaaactgaaaggaaaactccctccaggagctggagtcagagaggacgtgtttctcgtttggcaagagatggaggaagcctgcagcacgctggcccagatccagaggctggtggccgagcctcccaagcccgacgtggccactgtggactgcgagtcagaaacaacctctgttgagattgcatcgaatccagaagacacctgggactctaagacatggctgcagaaatatggcttgaaggcccagaagctatccttgtatgatgtgcttgccgactgctctttccgccacgctgatggggttgtggatataaaagccaaaccggagaatgagtccgtgcagaccagtgcggagacgaacaagaagacagtccatgcaaaatattgcagcaggtttgtccatgctccctggaaggatgggagcttggtccacgtcaacattaccaaagagaagtgcaagtggtacagtgagagaatccacacagccctggcccggatccgaaggaggattaaatggctacaggatgggagtcaaagcctctttggaagattgcataatgattgcatctacattctcattgacacgtctcactcaatgaagagcaaactggacttggtgaaggacaagatcattcagttcatacaggaacagctgaaatataaaagtaagtttaactttgtgaagtttgatggtcaagcagttgcttggcgggaacaacttgctgaagtcaatgaagataatttggaacaggctcagtcctggattagagacataaagattggaagctccacaaacaccctgagtgccctgaaaactgcttttgctgataaagaaacacaggcaatctaccttctgaccgatgggagacctgatcagggaacatcatctcatttactcctcacagcagccgtttaa

SEQ ID NO: 299678 - protein, 1016 aa, Artificial Sequence
  derived and/or modified sequence
MEFQDHRYWLRTHPNCIVGKELVNWLIRNGHIATRAQAIAIGQAMVDGRWLDCVSHHDQLFRDEYALYRPLQSTEFSETPSPDSDSVNSVEGHSEPSWFKDIKFDDSDTEQIAEEGDDNLAKYLISDTGGQQLSISDAFIKESLFNRRVEEKSKELPFTPLGWHHNNLELLREENGEKQAMERLLSANHNHMMALLQQLLHSDSLSSSWRDIIVSLVCQVVQTVRPDVKNQDDDMDIRQFVHIKKIPGGKKFDSVVVNGFVCTKNIAHKKMSSCIKNPKILLLKCSIEYLYREETKFTCIDPIVLQEREFLKNYVQRIVDVRPTLVLVEKTVSRIAQDMLLEHGITLVINVKSQVLERISRMTQGDLVMSMDQLLTKPHLGTCHKFYMQIFQLPNEQTKTLMFFEGCPQHLGCTIKLRGGSDYELARVKEILIFMICVAYHSQLEISFLMDEFAMPPTLMQNPSFHSLIEGRGHEGAVQEQYGGGSIPWDPDIPPESLPCDDSSLLELRIVFEKGEQENKNLPQAVASVKHQEHSTTACPAGLPCAFFAPVPESLLPLPVDDQQDALGSEQPETLQQTVVLQDPKSQIRAFRDPLQDDTGLYVTEEVTSSEDKRKTYSLAFKQELKDVILCISPVITFREPFLLTEKGMRCSTRDYFAEQVYWSPLLNKEFKEMENRRKKQLLRDLSGLQGMNGSIQAKSIQVLPSHELVSTRIAEHLGDSQSLGRMLADYRARGGRIQPKNSDPFAHSKDASSTSSGQSGSKNEGDEERGLILSDAVWSTKVDCLNPINHQRLCVLFSSSSAQSSNAPSACVSPWIVTMEFYGKNDLTLGIFLERYCFRPSYQCPSMFCDTPMVHHIRRFVHGQGCVQIILKELDSPVPGYQHTILTYSWCRICKQVTPVVALSNESWSMSFAKYLELRFYGHQYTRRANAEPCGHSIHHDYHQYFSYNQMVASFSYSPIRLLEVCVPLPKIFIKRQAPLKVSLLQDLKDFFQKVSQVYVAIDERLASLKTDTFS

SEQ ID NO: 299679 - DNA, 3051 bp, Artificial Sequence
  derived and/or modified sequence
atggaatttcaggaccacaggtactggctaaggacccaccctaattgcattgtcgggaaagagctggtaaattggttgatacggaatggacacattgccaccagagcccaggcgatcgccattgggcaggctatggtggatggacgatggctggactgcgtttcccaccacgaccagttattcagagatgagtacgctctgtacagaccattgcaaagcaccgagttcagcgaaactccatctcctgattcagactccgtgaactctgtcgagggtcattcagaaccctcgtggttcaaggatattaagttcgatgacagtgataccgaacagatcgctgaagagggcgatgataacttggcaaaatacctaatctccgacactggcggccagcagctgtctataagtgatgcatttattaaagaaagcctttttaataggagggtggaggaaaaatcaaaggaactacccttcaccccacttggttggcatcataacaacctcgaactgctcagagaggaaaatggcgaaaagcaggcaatggagcggttgctcagtgccaaccacaatcacatgatggctttgctccagcagctgttgcatagtgattctttgagcagctcatggagagatattatcgttagcttagtatgccaggtcgtacagacagttcggccagacgtaaaaaaccaggatgacgatatggatatccgacagttcgtccacataaaaaagattcccggaggaaagaaattcgactcggttgtggtgaacggatttgtatgtacaaaaaacattgcccacaagaagatgtcctcctgcatcaaaaatcccaaaatactgctgcttaaatgtagtatcgaatatttgtacagagaagaaactaaattcacctgcattgacccaatcgttctgcaagagcgcgaatttctgaagaattacgtgcagcgaatcgtggatgtgcgccccacactggtgctcgtagagaagactgtaagcaggattgcgcaggacatgctgctagagcacggcataaccttggttataaatgtcaaatcgcaggtcctcgagcgcatttcccgaatgacccagggagacctggtaatgagcatggatcagctgctgactaaaccgcacttgggtacatgccataaattttacatgcagattttccaacttccaaatgagcagacaaaaactctcatgttctttgagggttgtccacagcacttgggatgcactatcaagttgagggggggttccgactatgaactcgcacgagtgaaggaaatccttatctttatgatctgcgtcgcctaccactcccagctcgagatttcgttcctaatggacgaatttgctatgccacccacccttatgcaaaacccttccttccattctctgattgaaggtagagggcatgagggggcagtgcaggaacagtacggcggcggatctataccatgggaccctgatattcctcccgaaagcctaccctgtgatgatagtagtcttttagagctgcggatcgtgtttgagaagggggagcaggagaataagaatctgccgcaggccgtggcctctgtgaagcaccaggaacacagcaccacagcttgccccgctggcctgccttgtgcatttttcgcacccgtgccagagtctctgttgccgctacctgttgatgatcagcaggatgccctgggttcagagcagccagagaccctccagcagaccgtagtgctgcaagaccctaagtctcaaatccgggcatttagagaccccttgcaggatgataccggcttatacgtaaccgaggaggtaacatcttccgaggataaacgaaagacatatagcctcgcgttcaagcaggagctgaaagacgtaattctgtgtatcagccccgtgatcactttccgagagccattcttgttaaccgagaagggaatgaggtgctctaccagggactacttcgctgaacaggtatattggagtcctctcctaaataaagaattcaaggaaatggagaacaggagaaagaagcaactgctccgggatctaagtgggttacaaggaatgaatgggtctattcaggctaagagtatccaggtgttacccagtcacgagcttgttagtactcggattgcagaacaccttggggactcccagtcactgggcagaatgctggcagactatcgggctcgaggcggaagaatacagcccaagaactccgacccctttgctcacagcaaggacgccagcagcactagctcaggccagtctggcagtaagaacgagggagacgaggagagagggcttatcctgagcgatgcagtgtggagcaccaaggttgactgtctgaacccgatcaaccaccagcggctctgtgtgctcttttcctcttcatccgctcagtcatcaaatgccccctctgcctgcgtgagcccgtggattgtcacgatggagttctatggaaagaacgacctcacactggggatctttcttgagagatactgttttcgccccagctaccagtgcccctcgatgttctgtgatacacccatggttcatcacattcggaggtttgtgcatggccagggatgcgttcagatcatcctcaaggagttggacagccctgtgccgggctatcagcacacaatattaacatatagctggtgccggatttgcaagcaggtgacgcctgtggttgcactgagtaatgagtcgtggtcgatgtccttcgcaaagtatctggagctccgcttctacggtcatcagtacacccggcgggctaacgctgaaccctgcggacactccatccatcacgactatcaccagtacttttcctacaaccagatggtggcctcattctcttactccccaatcagactgcttgaggtttgcgttcccctgcccaagatatttattaagaggcaggcaccactcaaggtgtctctgctgcaggatctgaaggacttcttccaaaaggtgtctcaagtgtatgtagctattgatgaacgactggcttcactcaagaccgacacgtttagctag

SEQ ID NO: 299680 - DNA, 3051 bp, Artificial Sequence
  derived and/or modified sequence
atggagttccaggaccaccgctactggctgcggacccaccccaactgcatcgtgggcaaggagctggtgaactggctgatcagaaatggccacatcgccacccgggcccaggccatcgccatcggccaggccatggtggatggccgctggctggactgtgtgagccaccacgaccagctgttcagagatgaatatgccctgtaccggcccctgcagagcacagagttcagcgagacccccagcccagacagcgacagcgtgaacagcgtggagggccacagcgagcccagctggttcaaggacatcaagtttgatgacagcgacacagagcagattgctgaggagggagatgacaacctggccaagtacctgatcagtgacaccggcggccagcagctgagcatcagtgatgccttcatcaaggagagcctcttcaacagaagagtggaggagaagagcaaggagctgcccttcacccccctgggctggcaccacaacaacctggagctgctgcgggaggagaatggagagaagcaggccatggagcggctgctgagcgccaaccacaaccacatgatggccctgctgcagcagctgctgcacagcgacagcctgagcagctcctggagggacatcatcgtgtccctggtgtgccaggtggtgcagacagtgcggccagatgtgaagaaccaggatgatgacatggacatccggcagtttgtgcacatcaagaagatccctgggggcaagaagtttgacagcgtggtggtgaatggatttgtgtgcaccaagaacatcgcccacaagaagatgagcagctgcatcaagaaccccaagatcctgctgctgaagtgcagcattgagtacctgtaccgggaggagaccaagttcacctgcatcgaccccatcgtgctgcaggagcgggagttcctgaagaactacgtgcagagaattgtggatgtgcggcccaccctggtgctggtggagaagacagtgtccagaattgcccaggacatgctgctggagcacggcatcaccctggtgatcaacgtgaagagccaggtgctggagcgcatcagcaggatgacccagggcgacctggtgatgtccatggaccagctgctgaccaagccccacctgggcacctgccacaagttctacatgcagatcttccagctgcccaatgagcagaccaagaccctgatgttctttgagggctgcccccagcacctgggctgcaccatcaagctgcggggcggcagtgactatgagctggcccgggtgaaggagatcctgatcttcatgatctgtgtggcctaccacagccagctggagatctccttcctgatggatgaatttgccatgccacccaccctgatgcagaaccccagcttccacagcctgattgagggccggggccacgagggcgctgtgcaggagcagtatggaggcggcagcatcccctgggaccctgacatccccccagagagcctgccctgtgatgacagcagcctgctggagctgcgcatcgtgtttgagaagggggagcaggagaacaagaacctgccccaggccgtggcctctgtgaagcaccaggagcacagcaccacagcctgcccagctggcctgccctgtgccttctttgcccctgtgcctgagagcctgctgcccctgcctgtggatgaccagcaggatgccctgggcagcgagcagcctgagaccctgcagcagacagtggtgctgcaggaccccaagagccagatccgggccttccgggaccccctgcaggatgacaccggcctgtatgtgacagaggaggtgaccagcagcgaggacaagaggaagacctacagcctggccttcaagcaggagctgaaggatgtgatcctgtgcatcagccctgtgatcaccttccgggagcccttcctgctgacagagaagggcatgcgctgcagcacccgggactactttgctgagcaggtgtactggagccccctgctgaacaaggagttcaaggagatggagaacagaaggaagaagcagctgctgcgggacctgagcggcctgcagggcatgaatggcagcatccaggccaagagcatccaggtgctgcccagccatgagctggtgtccaccagaattgctgagcacctgggggacagccagagcctgggccgcatgctggccgactaccgggcccggggcggccgcatccagcccaagaacagcgacccctttgcccacagcaaggatgccagcagcaccagcagcggccagagcggcagcaagaatgaaggagatgaggagcggggcctcatcctgagtgatgctgtgtggagcaccaaggtggactgcctgaaccccatcaaccaccagaggctgtgtgtgctcttcagcagcagcagcgcccagagcagcaatgcccccagcgcctgtgtgagcccctggatcgtgaccatggagttctacggcaagaatgacctgaccctgggcatcttcctggagcgctactgcttccggcccagctaccagtgccccagcatgttctgtgacacccccatggtgcaccacatcagaagatttgtgcacggccagggctgtgtgcagatcatcctgaaggagctggacagccctgtgcccggctaccagcacaccatcctgacctacagctggtgccgcatctgcaagcaggtgacccctgtggtggccctgagcaatgaatcctggagcatgagctttgccaagtacctggagctgcgcttctacggccaccagtacacccggcgggccaatgctgagccctgtggccacagcatccaccacgactaccaccagtacttctcctacaaccagatggtggccagcttctcctacagccccatccggctgctggaggtgtgtgtgcccctgcccaagatcttcatcaagaggcaggcccccctgaaggtgtccctgctgcaggacctgaaggacttcttccagaaggtgtcccaggtgtatgtggccattgatgagcggctggccagcctgaagacagacaccttctcctag

SEQ ID NO: 299681 - DNA, 3051 bp, Artificial Sequence
  derived and/or modified sequence
atggagttccaggaccaccggtactggctgcggacccaccccaactgtatcgtgggaaaagagctcgtgaactggcttatccgcaacggacacatcgcaactagagcccaggcgatagccattgggcaggcaatggtggacgggcgctggttggactgtgtcagccaccacgaccagttgttcagggatgagtatgcactgtacaggccactgcaaagcacagagttctcagagactccatctcccgattccgattctgtgaacagtgtggagggccactccgagccctcatggtttaaagacattaagtttgacgactctgacacagagcaaatagctgaggagggggacgataatttggccaaatacctcatctccgataccggggggcagcagctgtctatctccgacgctttcatcaaggaatctctttttaatcgacgtgtggaagagaaatctaaggaactcccattcacacctctggggtggcatcacaacaatcttgagctgttaagagaagagaacggggaaaagcaggccatggagcgtctgttaagcgctaatcacaaccatatgatggccctgctgcagcagcttctacatagtgattccctctctagtagctggagagacattatcgtatctttagtgtgtcaggttgtgcagaccgtgagacccgacgtgaaaaatcaggatgacgatatggacataaggcagttcgtccatattaagaaaatcccaggaggcaagaaattcgactcagtggtggtgaacgggttcgtttgcacaaagaatatcgcccacaagaagatgtcctcatgcataaagaaccctaagatccttctcctcaagtgttcaatcgaatacctctatcgcgaagaaaccaaatttacatgcattgacccaattgttctgcaggagcgcgaatttctgaagaattacgttcaaagaatcgttgatgtacgcccgacgcttgtgctggttgaaaagacagttagtaggatcgctcaagatatgcttctcgaacatgggatcacactggtaattaacgtgaagtcacaggtgctggagcggatctctaggatgacgcagggtgaccttgttatgtccatggatcagcttcttaccaaacctcatctgggcacatgccacaaattttacatgcagattttccagttgccgaatgagcagacaaagacattgatgttttttgaaggatgccctcagcacctggggtgcaccatcaagctaaggggaggcagcgattacgagttggcacgtgtgaaggagattcttatcttcatgatctgtgttgcctatcactctcagttggagatctccttcctgatggatgaattcgctatgccccccacactgatgcagaacccaagctttcattctctaatagaggggcgcggacatgagggagcggttcaggaacagtacggcggtggctccataccttgggatccagatattcctcccgagagtctgccttgtgatgacagctctctactggagctgcgaatcgtgtttgaaaaaggagaacaggagaacaagaacttgcctcaagccgtggcctctgttaaacatcaggagcattccacgaccgcgtgtcccgctggcctgccgtgtgccttctttgctcccgtcccagagagcttactgcccctacctgtcgacgaccagcaggatgccttgggatccgaacagccggagacgctgcagcagaccgtggtgctgcaggatcccaaatcacaaatccgagcattccgggaccccctgcaggatgacactggactctatgtgaccgaagaagtgacatcctctgaagataagagaaaaacctattctctcgccttcaagcaggaactcaaagacgtgattctgtgcatctccccggtgatcacgttccgcgaacctttcttgttaactgaaaaggggatgagatgcagtacgagggactattttgccgaacaagtctattggagcccactcctgaataaagaatttaaagagatggagaatcgacgaaaaaaacaactcctgcgcgacttgtcgggtcttcaggggatgaatggttccatacaggcgaaatcgattcaggtgttaccttcacatgagctagtgtcaacaagaatcgcagagcatttaggcgatagccagagcctggggcgcatgctagcagattatagagcccgtgggggccggatccagcctaagaattctgacccattcgcccatagtaaagatgcctcatccacaagctcaggccagagcgggtctaaaaatgaaggcgacgaggagagaggcctgatcctctcagatgctgtctggagcaccaaagtggattgcctgaacccaatcaatcaccaaaggctctgcgtattattttctagtagctccgctcagagctccaacgcaccaagcgcttgcgtctccccttggattgtgaccatggagttttacgggaagaatgacctcacccttggaatcttcttggaaaggtactgcttccggcctagctaccaatgtcccagcatgttttgtgatacgccaatggtgcatcacatccggagattcgtgcatgggcagggctgcgtgcagatcatcttgaaggaactggactctcctgtgcccggctatcagcatactatcctgacatattcttggtgtagaatctgcaaacaagtcacgccagtggtcgctttgtccaacgagtcgtggtcgatgtctttcgctaagtacctagagctgagattctacggccatcagtatactcggagggcgaacgccgaaccttgcgggcattcgatccaccacgactaccaccagtatttctcatataatcagatggtggcctccttctcatattctcccatcagactcttggaagtttgcgtacccttgccgaagatatttataaaaaggcaggcccccttgaaggtcagcctgttgcaggacttgaaggactttttccagaaagtgtctcaggtgtatgtcgcaatcgacgaacggctggcctcactcaagactgacactttttcctag

SEQ ID NO: 299682 - DNA, 9733 bp, Artificial Sequence
  derived and/or modified sequence
caaccatgtaagcagcttcgcttcctgccgcaaccgtccgcggcctgaggagcccaccgccgctctcgggggccgacttccgggggctgagccgttgaagcggaggctggggcggggggcagccggcgcggccggggcaggaggcgcagactcatgaaatggccacagatgataagacgtccccaacactggactctgctaatgatttgcctcgatctcctactagtccttctcatctcacacactttaaacctttgactcctgatcaagatgagcccccttttaaatcagcttatagttcttttgtaaatctctttcgttttaacaaagagagagcagaaggaggccagggagaacagcagcctttgagtggaagttggaccagccctcagctcccttcgaggacacagtctgttaggtcacccacaccttataaaaagcagcttaatgaggaactccagcggcgctcttcagcattagacacaagaaggaaagcagaacctacctttggaggtcatgaccctcgtacagctgttcagcttcgaagcctcagcacagtattaaaacgcctcaaggaaatcatggaggggaaaagccaggatagtgacctgaaacaatactggatgccagatagccaatgtaaagagtgctatgactgtagtgagaaatttacaacctttaggcgcagacaccattgccgactatgtgggcagattttctgcagtcgttgctgtaatcaagaaatccctggaaaatttatgggctatacaggagacctccgagcttgcacatattgtagaaaaatagccttaagttatgctcattccacagacagtaattctattggggaagacttgaatgctctttcagattctgcttgctctgtgtctgtgcttgatccaagtgaaccccgaacacctgttgggagtaggaaagccagccgtaacatatttttagaggatgatttggcctggcaaagtttgattcatccagattcctcaaatactcctctttcaacaagacttgtatctgtgcaagaggatgctgggaaatctcctgctcgaaatagatcagccagcattactaacctgtcactggatagatctggttctcctatggtaccttcatatgagacatctgtcagtccccaggctaaccgaacatatgttaggacagagaccactgaggatgaacgcaaaattcttctggacagtgtgcagttaaaagacctgtggaaaaaaatctgccatcacagcagtggaatggagtttcaggatcaccgctactggttgagaacgcatcccaactgcattgtaggaaaggaattagtcaactggctaatccgaaatgggcatattgccacaagggcacaagctatagcaattggacaagcaatggttgatggacgttggctggattgtgttagtcatcacgaccagcttttcagagatgagtatgcgctgtatagaccactgcagagtacagaattttctgagacgccttctcccgacagtgactcagtgaactccgtggaaggacactctgagccatcctggtttaaagacataaagtttgatgacagtgacacagaacagatagctgaagaaggtgacgataatttggctaagtatttgatttctgacactggaggacaacagctctcaataagtgacgctttcatcaaagaatccttatttaatcgccgagtagaggaaaaatccaaagagctgcctttcacacctttgggctggcatcataacaacctggagctcctgagggaggagaatggggagaaacaagccatggagaggttgctttcagctaatcataaccacatgatggcactactccagcagttgctccatagtgactcactgtcatcatcttggagggacatcatcgtgtcattggtctgccaggttgttcagacagtccgacctgatgtcaagaaccaggatgatgacatggatatccgtcagtttgtccacatcaaaaaaatcccaggtggaaagaagtttgattctgtggttgtcaatggctttgtttgtaccaagaacattgcacataaaaagatgagttcttgtattaaaaaccccaaaattcttctgttgaagtgttccattgagtatctctacagagaagaaactaagtttacttgcattgatcctattgtgcttcaggaaagggaattcttgaagaattatgtccagcgaatagttgatgttcgacccaccttggttcttgttgagaaaacagtgtctcggattgcccaggacatgttattggaacatggcattactttggtcattaatgtaaagtcacaagttttggaacgaatcagtcgaatgacccaaggtgatttagtgatgtcaatggaccagctgcttacgaaaccacacctgggcacttgtcacaaattttatatgcagatatttcagttgcctaatgaacaaaccaagacactgatgttttttgaaggttgtccacagcacctaggctgtacaatcaagctaagaggaggctctgattatgagctggctcgagttaaggagatcctaatatttatgatctgtgttgcttatcattctcaactagaaatatcctttctcatggatgaatttgctatgcctcccacattaatgcaaaacccttcattccattccctgattgagggacgagggcatgagggggctgtccaagagcagtacggtggaggttccatcccctgggatcctgacatccctcctgagtctctgccctgtgatgatagcagtttgctggaattgaggattgtgtttgagaagggtgagcaggaaaataaaaatcttccgcaggctgttgcctctgtgaagcatcaagaacatagcacaacagcttgcccggcgggtctcccttgtgctttctttgcacctgtaccggaatcattgttgccactccctgtggatgaccaacaagatgctttaggcagcgagcagccagagactttgcagcaaacagttgtgctgcaggatcccaaaagccagataagagcctttagagaccctctacaggatgacactggattatatgttactgaggaagtcacctcctctgaagataaacgaaagacttattctttggcctttaagcaggaattaaaagatgtgatcctctgtatctccccagtaatcacattccgagaaccctttcttttaactgaaaaggggatgagatgctctacccgagattattttgcagagcaggtttactggtctcctctcctcaataaagaattcaaagaaatggagaacaggaggaagaaacagctgctcagggatctctctggacttcagggcatgaatggaagtattcaggccaagtctattcaagtcttaccctcacatgagctagtgagcactagaattgctgagcatctgggcgatagccagagcttgggtagaatgctggccgattatcgagccagaggaggaagaattcagcccaaaaattcagacccttttgctcattcaaaggatgcatcaagtacttcaagtggccaatcaggaagcaaaaatgagggtgatgaagagagagggcttattctgagtgatgctgtgtggtcaacaaaggtggactgtctgaatcccattaatcaccagagactttgtgtgctcttcagcagctcttctgcccagtccagcaatgctcctagtgcctgtgtcagtccttggattgtaacaatggaattttatggaaagaatgatcttacattaggaatatttttagagagatactgtttcaggccttcttatcagtgtccaagcatgttctgtgatacccccatggtacatcatattcggcgctttgttcatggccaaggctgtgtgcagataatcctgaaggagttggattctccagtacctggatatcagcatacaattcttacatattcctggtgtagaatctgcaaacaggtaacaccagttgttgctctttccaatgagtcctggtctatgtcatttgcaaaataccttgaacttaggttttatgggcaccagtatactcgcagagccaacgctgagccctgtggtcactccatccatcatgattatcaccagtatttctcctataaccagatggtggcgtctttcagttattctcccattcggcttcttgaagtatgtgttccactccccaaaatattcattaagcgtcaggccccattaaaagtgtcccttcttcaggatctgaaggacttctttcaaaaagtttcacaggtatatgttgccattgatgaaagacttgcatctttgaaaactgatacatttagtaaaacaagagaggaaaaaatggaagatatttttgcacagaaagagatggaagaaggtgagttcaagaactggattgagaagatgcaagcaaggctcatgtcttcctctgtagatacccctcagcaactgcagtcggtctttgagtcactcattgccaagaaacaaagtctctgtgaagtgctgcaagcttggaataacaggttgcaggaccttttccaacaggaaaagggtagaaagagaccttcagttcctccaagtcctggaagactgagacaaggggaagaaagcaagataagtgcgatggatgcatctccacggaatatttctccaggacttcagaatggagaaaaagaggatcgcttcttaacaactttgtccagccagagctccaccagttctactcatctccaattgcctacgccacctgaagtcatgtctgaacagtcagtgggagggccccctgagctagatacagccagcagttccgaagatgtgtttgatgggcatttgctgggatccacagacagccaagtgaaggaaaagtcaaccatgaaagccatctttgcaaatttgcttccaggaaatagctataatcctattccatttccttttgatccagataaacactacttaatgtatgaacatgaacgagtgcccattgcagtctgcgagaaggaacccagctccatcattgcttttgctctcagttgtaaagaataccgaaatgccttagaggaattgtctaaagcgactcagtggaacagtgccgaagaagggcttccaacaaatagtacttcagatagcagaccaaagagtagcagccctatcagattacctgaaatgagtggaggacagacaaatcgtacaacagaaacagaaccacaaccaaccaaaaaggcttctggaatgttgtccttcttcagagggacagcagggaaaagccccgatctctcttcccagaagagagagaccttacgtggagcagatagtgcttactaccaggttgggcagacgggcaaggaggggaccgagaatcaaggcgttgagcctcaagatgaagtagatggaggagatacacaaaagaagcaactcataaatcctcatgtggaacttcaattttcagatgctaatgccaagttttactgtcggctctactatgcgggagagtttcataagatgcgtgaagtgattctggacagcagtgaagaagatttcattcgttccctctcccactcatcaccctggcaggcccggggaggcaaatcaggagctgccttctatgcaactgaggatgatagatttattttgaagcaaatgcctcgtctggaagtccagtccttcctcgactttgcaccacattacttcaattatattacaaatgctgttcaacaaaagaggcccacggcgttggccaaaattcttggagtttacagaattggttataagaactctcagaacaacactgagaagaagttagatctccttgtcatggaaaatcttttctacgggagaaagatggcacaggtttttgatttgaagggctctcttaggaatcggaatgtaaaaactgacactggaaaagagagttgtgatgtggtcctgctagatgaaaatctcctaaagatggttcgagacaaccctctatatattcgttctcattccaaagctgtgctgagaacctcgatccatagtgactcccatttcctttctagccacctcattatagattattctttgctggttgggcgagatgatactagcaatgagctagtagttggaattatagattatattcgaacatttacatgggacaaaaagcttgagatggttgtgaaatcaacaggaattttaggtggacaaggtaaaatgccaacagtggtgtctccggagttgtacaggactaggttttgtgaggcaatggacaagtatttcctaatggtaccagaccactggacaggcttgggtctgaattgctgaaatcaagcacatattttgaaatggactgtgaaggaaaaggggacaggaacaaaggaccaaaaataagctacatgttttatttcttcatcgtgttcaccactgtatgccaaggcttttcagttctgtggctgtttagactgtccgtaatggaatggtaaaactccatgaatttgcactttggtttttgatacctgtggagctgtctgtaggttgggaagtggcatgaaaattttcttaagctaaaatacagacatgtttcaaagggctaaagttggagatgagtagatagggtgaaaaatgggttaaatttgctagcttaattgttttaagaagaaaacagtgtctcataaattgactatcctggcatcacatttaacatgttatctacttagaaagcatttgtagagctgctgaatttgttttgtgtttttctgtaataatttaatgttacttattatcagaatttctgaaacctttacaaaaattctgatttattccattaatggccggttaaacacgtgggcatttattgttttattgaggaatttgacttaaactgggaatcctgtcatgttgtttatctttccagcttgcctgtttttgagtatgtttgatgtttttaaaattttgtcttctctgtggaagacaggaggctacagcaattaactttaagcctccttttagagatatttttaaaacttgtttaaaatttttgtgcaattcatatattaaattgcacttacttgcatacgctcatattctagggttttttctctatttttagggtatcatagtaaatcattagtaaatgagtctgtagttactaaaccctaatggaataattattaatgaaagatttttgaaatataaaaaataaattaggcccaatccaagaaattgagtgagaaggaaacacttgttttattcacagaggtaaagtgtcttttcaatataaccagcaatttaggtggcatctataaaataaaaaatttctactgtggacatccccttttccaactttctacataatggctagttctgactactaagaaatgttaagaaataggccaagtgcggtggctcacgcctataatcctatcactttgggaggcctaggcaggcagatcacctgaggtcaggagttcaagaccagcctggccaacatgacgaaaccccatctctactaaaaagacaaaaaattagctgggcatggtggcatatacctgtaaccccaactacttgggtggctgaggcaggagaattgtttgaacctgggaggcggaggctgcagtgagctgggattacaccattgcattccagcctgggcaacagagcaagactgtctcaaaaaacaaaacgaaacaaaaaaagaaagttattcttagtaaggaacttcttgtttaatagcatttttgtttattttaaaaagtgatcagaagtagtaaactatctttgaggaaatactgtaaccccagaatatttcctcttgacttctttttgtaacaaggataatttagggatttataaagttgtaaggatttcactgtttttggactgcctataataatagcacattaaccttcacataataagaaatctggacaagttcagttacacagtatgatgaatacttgaattaggaacattgtggaaaatttgctttagagaatcaaggcagtagtttggtatttggtgcttattaaaaatgtggtttgttttgaactggaagcaagttgaccaaggacttatgactaatgtgatgctaagttccacttggccccttttaaaaacgtgtatgtgccttttgaagatacacaaaacactgaggattttagttttgaaatcaaagactattaaaggagctgtacagaggtaaaaaaataaatgtggaacattattaacttactttgtgtctaggaacaatggattttgtatctgatttaaaatgccaacactgttttgtctctgttcattttttctgtgaggatacttaaggttattattcctgtctgtttcctgtactcccctagtcatgagcacttgaagtacaaggtgtctccccctaggtgcaattaggttgtttctttgtttttagtttcaattctatgtgcatagcaggaatgctccacaggaatggcttctgacaataatctgtcctgttgattttgttttccttgcccatgacttgaacaactgtgttttaaagtactgtagtctagtaggtaactttgtggcaaaaattttcaatataatacattctgaaacaatagttgctgccttgcaaaggtaatctctcattttaaaattggacagtattaatgaaggggaaatatacaatttatttctattgagtggtagaactatatgtctggtcccttgctgctcttgtttaggccactatcatagatatatttcaaatattgtactactcagtgttaagtattgaatgactgtttccctttccttcaaggcctagagtatattctgaaaatttaggaatgaggaagaaatcttaatacttccttccttaacatacaacatgagtcccgagaataattgatagtagcaagagaaaactatgtcagtaacatgttgctttgtataaaaatcttatttataaatgtgaagctttttgatgccatcaaaacttattaaaaaataggatttacttttttctaattctgacctaagaaaaataatgagaacaagctgttgcaagctcttttgtagtctattgaatattttatagatattcaaaatttcctacaaactataattttttccatgatttagcagtgagtgattttctagctttggctcttattaggtattgtaaatagtagggttatatcgatatcagcttttgtgatggcattgtggtcatcagcttcatgacattttacccatttgcagtgatcctgtgtaaaactgccaaggaaagtaattacctgtaggagtttgctgagcttgaagagtgaaaactgttgtgaatgagcctgatcataaaacggaccaggccattcattattcctcaagtgttaatatactgacttatgcagtattcaaaccatctagtgcaatgtttttgtttttgttttttttttggtaacacaggtgcagtgtattatagaaaaaataaaaactacaatcattagcagttttaatactgctgtgtcagttttgtaaaaaatgtacattatgtcttttgacatgttgaattttaaactagggaaatgacattgtaaatcatagtagcctcttttaatttaatatgaaaaatgccactatattgaaagtacttaatgtattgtatatatttctctactttggttctagctattttatatgattgacatgttatttaaaagataactgccttgaacttttggagacttgtactgtaaataaagaaatcttaacaataaactcagaatctacttactcca

SEQ ID NO: 299683 - DNA, 3051 bp, Artificial Sequence
  derived and/or modified sequence
atggagtttcaggatcaccgctactggctgagaacccaccctaattgcattgttggcaaggagctggtgaactggctgatcaggaatggccacatcgcaacgcgtgctcaggccatcgcaattggtcaggctatggttgatgggaggtggctggactgcgtaagccaccacgaccagctcttcagggatgagtacgcattgtaccgccctctgcagtccaccgaattcagtgagacacccagccctgactcagacagcgtcaactctgtcgaggggcacagcgagccatcttggtttaaagacattaagtttgacgacagcgacactgaacagatcgctgaggaaggcgacgacaacctcgccaagtatctgatctctgacacaggcggacagcagctatctattagcgatgcttttatcaaagagtcgctctttaatagaagggtagaagaaaagtcgaaggagctgcccttcacaccgttgggctggcaccataacaatctggaactgctgcgagaggaaaatggagagaagcaggcaatggagagactgttaagcgcgaatcataatcatatgatggcactgctgcagcagctgctgcactctgactcactgagttcatcttggcgcgacatcattgtgtcactcgtctgtcaggttgtccagaccgtcagaccagatgtgaaaaatcaggacgatgatatggatatccgtcaattcgtacatatcaaaaaaatccccggaggaaaaaaatttgattccgtggtggtcaatgggttcgtgtgtacgaaaaacatcgctcacaaaaagatgtcctcttgcatcaagaaccccaagatcctactgctcaagtgctctattgagtacttgtacagagaagagaccaagttcacgtgcatagaccctatcgtgctgcaggaacgcgagtttctgaaaaactatgtccagcggattgtcgacgtaaggcccaccttagtgctggtagagaaaactgtgagccggattgcccaagatatgctgctcgaacacgggattacgttagtaattaatgtcaagagtcaggtacttgaacgcatttcccgcatgacccagggcgatctggtgatgagcatggatcagttgttaaccaaaccacatctgggcacctgtcataaattctacatgcagatttttcagctccccaacgaacagactaaaacccttatgtttttcgagggatgcccgcagcatctcggctgtaccatcaagctgaggggcggatcagactacgaactcgctagggtgaaggagatcctgatctttatgatctgtgttgcctatcactcccagctcgagatatcctttctgatggacgagtttgccatgccgccaacgctgatgcagaatccaagtttccactcccttattgaggggagaggccacgagggcgctgtccaggagcagtacggaggcggaagcattccttgggaccccgacatccccccagagagcctgccatgcgacgactctagcctgctggaactgaggattgtgtttgaaaagggcgaacaggaaaacaaaaacctgccccaggcagtggccagcgtcaaacaccaagagcacagcaccactgcctgcccggctggcctgccatgtgctttctttgctccagttcctgaatcactgcttccgttgcccgtagacgaccagcaagacgcactgggatctgaacagccggagactttgcagcagacagtcgtattgcaggatcccaaatctcaaataagggcgtttcgtgaccccttgcaggatgataccggactgtacgttacagaagaggtgacatcttcggaggataagagaaagacatactccctcgcattcaaacaggaattaaaggacgtgattctgtgcattagccccgtgattacatttcgtgagcccttcctcctgactgaaaaagggatgcggtgttcaactcgtgattactttgccgaacaggtgtattggtctccgttactcaataaagagtttaaggaaatggagaatcgaagaaaaaagcaactgctcagagacctgagcggtctgcaggggatgaatggtagcatccaggcaaaatccattcaggtgctgccttctcacgaattggtgagtactagaatcgctgaacacttgggggattcacaaagtctgggacggatgttggctgactaccgcgcacgagggggacggatccaacccaagaatagtgacccgtttgcccattccaaggatgcgagttccacgtcttccggccagtccggcagcaaaaacgagggagatgaagagaggggcttgattctttcagatgccgtgtggtccaccaaggttgactgcctcaatcctatcaatcaccagcggctttgcgttttattttcctcctcttctgcacagagttcaaacgccccatctgcgtgcgtttctccttggattgttacgatggaattttacggcaagaatgacctgactctcgggattttcctagagcgatattgcttccggccaagctatcagtgtcctagcatgttttgtgatacgccaatggtccaccatattcggagattcgtgcacggccagggctgcgtacagatcatccttaaggagctcgacagccccgtaccaggttatcagcacactattcttacctacagctggtgcagaatctgcaaacaagtgaccccagtcgttgctctcagcaacgagagttggtccatgtcattcgctaaatacctcgagttaaggttctatggccaccagtacactcgcagggcaaatgcagagccatgtggccattcgattcaccatgactatcaccagtatttctcctacaatcagatggtcgcctccttctcctactcccccataaggctgctggaggtgtgtgtgcccctgcctaaaatttttatcaaacggcaggctccgttaaaggtctccctgctgcaggaccttaaggatttttttcagaaggtgtctcaggtatatgtagccatcgatgagagactcgctagcctgaagaccgatactttctcctag

SEQ ID NO: 299684 - DNA, 3051 bp, Artificial Sequence
  derived and/or modified sequence
atggagttccaggaccacagatactggctgagaacccaccccaactgcatcgtgggcaaggagctggtgaactggctgatcagaaacggccacatcgccaccagagcccaggccatcgccatcggccaggccatggtggacggcagatggctggactgcgtgagccaccacgaccagctgttcagagacgagtacgccctgtacagacccctgcagagcaccgagttcagcgagacccccagccccgacagcgacagcgtgaacagcgtggagggccacagcgagcccagctggttcaaggacatcaagttcgacgacagcgacaccgagcagatcgccgaggagggcgacgacaacctggccaagtacctgatcagcgacaccggcggccagcagctgagcatcagcgacgccttcatcaaggagagcctgttcaacagaagagtggaggagaagagcaaggagctgcccttcacccccctgggctggcaccacaacaacctggagctgctgagagaggagaacggcgagaagcaggccatggagagactgctgagcgccaaccacaaccacatgatggccctgctgcagcagctgctgcacagcgacagcctgagcagcagctggagagacatcatcgtgagcctggtgtgccaggtggtgcagaccgtgagacccgacgtgaagaaccaggacgacgacatggacatcagacagttcgtgcacatcaagaagatccccggcggcaagaagttcgacagcgtggtggtgaacggcttcgtgtgcaccaagaacatcgcccacaagaagatgagcagctgcatcaagaaccccaagatcctgctgctgaagtgcagcatcgagtacctgtacagagaggagaccaagttcacctgcatcgaccccatcgtgctgcaggagagagagttcctgaagaactacgtgcagagaatcgtggacgtgagacccaccctggtgctggtggagaagaccgtgagcagaatcgcccaggacatgctgctggagcacggcatcaccctggtgatcaacgtgaagagccaggtgctggagagaatcagcagaatgacccagggcgacctggtgatgagcatggaccagctgctgaccaagccccacctgggcacctgccacaagttctacatgcagatcttccagctgcccaacgagcagaccaagaccctgatgttcttcgagggctgcccccagcacctgggctgcaccatcaagctgagaggcggcagcgactacgagctggccagagtgaaggagatcctgatcttcatgatctgcgtggcctaccacagccagctggagatcagcttcctgatggacgagttcgccatgccccccaccctgatgcagaaccccagcttccacagcctgatcgagggcagaggccacgagggcgccgtgcaggagcagtacggcggcggcagcatcccctgggaccccgacatcccccccgagagcctgccctgcgacgacagcagcctgctggagctgagaatcgtgttcgagaagggcgagcaggagaacaagaacctgccccaggccgtggccagcgtgaagcaccaggagcacagcaccaccgcctgccccgccggcctgccctgcgccttcttcgcccccgtgcccgagagcctgctgcccctgcccgtggacgaccagcaggacgccctgggcagcgagcagcccgagaccctgcagcagaccgtggtgctgcaggaccccaagagccagatcagagccttcagagaccccctgcaggacgacaccggcctgtacgtgaccgaggaggtgaccagcagcgaggacaagagaaagacctacagcctggccttcaagcaggagctgaaggacgtgatcctgtgcatcagccccgtgatcaccttcagagagcccttcctgctgaccgagaagggcatgagatgcagcaccagagactacttcgccgagcaggtgtactggagccccctgctgaacaaggagttcaaggagatggagaacagaagaaagaagcagctgctgagagacctgagcggcctgcagggcatgaacggcagcatccaggccaagagcatccaggtgctgcccagccacgagctggtgagcaccagaatcgccgagcacctgggcgacagccagagcctgggcagaatgctggccgactacagagccagaggcggcagaatccagcccaagaacagcgaccccttcgcccacagcaaggacgccagcagcaccagcagcggccagagcggcagcaagaacgagggcgacgaggagagaggcctgatcctgagcgacgccgtgtggagcaccaaggtggactgcctgaaccccatcaaccaccagagactgtgcgtgctgttcagcagcagcagcgcccagagcagcaacgcccccagcgcctgcgtgagcccctggatcgtgaccatggagttctacggcaagaacgacctgaccctgggcatcttcctggagagatactgcttcagacccagctaccagtgccccagcatgttctgcgacacccccatggtgcaccacatcagaagattcgtgcacggccagggctgcgtgcagatcatcctgaaggagctggacagccccgtgcccggctaccagcacaccatcctgacctacagctggtgcagaatctgcaagcaggtgacccccgtggtggccctgagcaacgagagctggagcatgagcttcgccaagtacctggagctgagattctacggccaccagtacaccagaagagccaacgccgagccctgcggccacagcatccaccacgactaccaccagtacttcagctacaaccagatggtggccagcttcagctacagccccatcagactgctggaggtgtgcgtgcccctgcccaagatcttcatcaagagacaggcccccctgaaggtgagcctgctgcaggacctgaaggacttcttccagaaggtgagccaggtgtacgtggccatcgacgagagactggccagcctgaagaccgacaccttcagctag

SEQ ID NO: 299685 - protein, 151 aa, Artificial Sequence
  derived and/or modified sequence
MTERFDCHHCNESLFGKKYILREESPYCVVCFETLFANTCEECGKPIGCDCKVPARWSTRAAAGMRPASSATAASSQLEPRVSSPKTIRISVCPAMRNNMPCSAFSAKSPSPREGSLTGSSPGTRSASCAPPAGSSCLGSASQLAMTLPTA

SEQ ID NO: 299686 - protein, 19 aa, Artificial Sequence
  derived and/or modified sequence
MTERFDCHHCNESLFGKKY

SEQ ID NO: 299687 - DNA, 456 bp, Artificial Sequence
  derived and/or modified sequence
atgacagagagattcgattgtcaccattgcaacgagagcttgttcggaaagaagtacatacttcgtgaggaatctccatactgcgtcgtttgttttgagactcttttcgccaatacctgcgaagagtgcgggaagccgataggatgtgattgtaaggtgcccgcaagatggagtactcgcgctgcagccggaatgcggccagcatctagcgctaccgctgccagttcacagttagagcccagagtctccagccccaaaactatccgaatcagtgtgtgtccagccatgagaaataacatgccttgttccgcatttagcgctaagtccccttcacctcgagagggatccctcaccggcagtagccccggtacccgctcagcgtcatgtgctccccctgccggttcttcgtgcctagggtctgcctcgcagctggcaatgacactgccaacagcctag

SEQ ID NO: 299688 - DNA, 60 bp, Artificial Sequence
  derived and/or modified sequence
atgaccgagaggtttgactgtcatcattgcaatgagtcattgttcggaaaaaagtattag

SEQ ID NO: 299689 - DNA, 456 bp, Artificial Sequence
  derived and/or modified sequence
atgacagaaagatttgactgccaccactgcaatgaaagcctgtttgggaagaagtacatcctgcgggaggagagcccctactgtgtggtgtgctttgagaccctgtttgccaacacctgtgaggagtgtgggaagcccatcggctgtgactgcaaggtgcctgcccgctggagcaccagggctgctgctggcatgaggcctgccagcagcgccacagctgccagcagccagctggagccccgggtgagcagccccaagaccatccgcatctctgtgtgcccagccatgaggaacaacatgccctgcagcgccttcagcgccaagagccccagcccccgggagggcagcctgaccggcagcagccctggcaccaggtctgccagctgtgcccctcctgctggcagcagctgcctgggcagcgccagccagctggccatgaccctgcccacagcctag

SEQ ID NO: 299690 - DNA, 60 bp, Artificial Sequence
  derived and/or modified sequence
atgacagaaagatttgactgccaccactgcaatgaaagcctgtttgggaagaagtactag

SEQ ID NO: 299691 - DNA, 456 bp, Artificial Sequence
  derived and/or modified sequence
atgaccgagcggttcgactgccaccactgcaacgagagcctgttcggcaagaaatacatcctccgcgaggagtccccttattgcgttgtgtgcttcgagacattgttcgcaaacacgtgtgaggaatgcggcaagcctatcggttgtgactgcaaggtgcctgcccgctggtccactagagcagccgcggggatgaggccagcaagtagcgccaccgcagcttcttctcaactggagccgcgagtgagcagccctaagactattcggatcagtgtgtgcccagctatgcggaataacatgccttgttccgccttttctgcgaaatcaccctctcccagagagggaagcctgaccggctccagccctggaacgcgctcagccagctgcgccccacccgcagggtccagctgtctgggatcagctagccaattggccatgacactcccaacagcctag

SEQ ID NO: 299692 - DNA, 60 bp, Artificial Sequence
  derived and/or modified sequence
atgaccgagcggttcgactgccaccactgcaacgagagcctgttcgggaagaaatactag

SEQ ID NO: 299693 - DNA, 456 bp, Artificial Sequence
  derived and/or modified sequence
atgacggagaggtttgattgtcatcactgcaacgagtccctgttcggaaaaaaatacatcctgcgggaagagagcccatactgtgtggtatgttttgagaccctgtttgctaatacttgtgaagaatgcggtaagcccatcggctgcgattgtaaagtcccagcaaggtggtccacccgcgctgccgcaggcatgagacccgcatcatctgccaccgccgcatccagccagcttgaaccacgggtatcaagccccaagacaatccgtatcagcgtatgtcctgccatgcgaaacaacatgccctgctccgccttttccgccaagtcacctagtcctagggaaggctcactgaccggcagctctcctggcactcgctcagctagttgcgcccctcctgcaggatcaagttgcctgggatccgcgagccagctggcgatgactcttcctacagcttag

SEQ ID NO: 299694 - DNA, 60 bp, Artificial Sequence
  derived and/or modified sequence
atgacagagcgcttcgactgtcaccactgcaatgaatcactctttggcaaaaaatactag

SEQ ID NO: 299695 - DNA, 456 bp, Artificial Sequence
  derived and/or modified sequence
atgaccgagagattcgactgccaccactgcaacgagagcctgttcggcaagaagtacatcctgagagaggagagcccctactgcgtggtgtgcttcgagaccctgttcgccaacacctgcgaggagtgcggcaagcccatcggctgcgactgcaaggtgcccgccagatggagcaccagagccgccgccggcatgagacccgccagcagcgccaccgccgccagcagccagctggagcccagagtgagcagccccaagaccatcagaatcagcgtgtgccccgccatgagaaacaacatgccctgcagcgccttcagcgccaagagccccagccccagagagggcagcctgaccggcagcagccccggcaccagaagcgccagctgcgccccccccgccggcagcagctgcctgggcagcgccagccagctggccatgaccctgcccaccgcctag

SEQ ID NO: 299696 - DNA, 60 bp, Artificial Sequence
  derived and/or modified sequence
atgaccgagagattcgactgccaccactgcaacgagagcctgttcggcaagaagtactag

SEQ ID NO: 299697 - protein, 532 aa, Artificial Sequence
  derived and/or modified sequence
MHCTLTMETEAIDGYITCDNELSPEREHSNMAIDLTSSTPNGQHASPSHMTSTNSVKLEMQSDEECDRKPLSREDEIRGHDEGSSLEEPLIESSEVADNRKVQELQGEGGIRLPNGKLKCDVCGMVCIGPNVLMVHKRSHTGERPFHCNQCGASFTQKGNLLRHIKLHSGEKPFKCPFCSYACRRRDALTGHLRTHSVGKPHKCNYCGRSYKQRSSLEEHKERCHNYLQNVSMEAAGQVMSHHVPPMEDCKEQEPIMDNNISLVPFERPAVIEKLTGNMGKRKSSTPQKFVGEKLMRFSYPDIHFDMNLTYEKEAELMQSHMMDQAINNAITYLGAEALHPLMQHPPSTIAEVAPVISSAYSQVYHPNRIERPISRETADSHENNMDGPISLIRPKSRPQEREASPSNSCLDSTDSESSHDDHQSYQGHPALNPKRKQSPAYMKEDVKALDTTKAPKGSLKDIYKVFNGEGEQIRAFKCEHCRVLFLDHVMYTIHMGCHGYRDPLECNICGYRSQDRYEFSSHIVRGEHTFH

SEQ ID NO: 299698 - protein, 526 aa, Artificial Sequence [sequence omitted]

SEQ ID NO: 299699 - DNA, 9443 bp, Artificial Sequence
  derived and/or modified sequence
gggcttggcttggagggggcaagggagggaaagagagaagggggaaacacaaaaaacttctttctttctccctccgtttatcttcagcccgacattgtcacctcctctttgaggggttagaagaagctgagatctcccgacagagctggaaatgcattgcactttgactatggaaacagaggctattgatggctatataacgtgtgacaatgagctttcacccgaaagggagcactccaatatggcaattgacctcacctcaagcacacccaatggacagcatgcctcaccaagtcacatgacaagcacaaattcagtaaagctagaaatgcagagtgatgaagagtgtgacaggaaacccctgagccgtgaagatgagatcaggggccatgatgagggtagcagcctagaagaacccctaattgagagcagcgaggtggctgacaacaggaaagtccaggagcttcaaggcgagggaggaatccggcttccgaatggtaaactgaaatgtgacgtctgtggcatggtttgcattgggcccaatgtgcttatggtacataaaaggagtcacactggtgaacgccccttccactgtaaccagtgtggagcttcttttactcagaagggcaaccttctgagacacataaagttacactctggagagaagccgttcaaatgtcctttctgtagctacgcctgtagaagaagggacgccctcacaggacacctcaggacccattctgtgggtaaacctcacaagtgcaactactgtggacgaagctacaagcagcgcagttcactggaggagcacaaggaacgctgccacaactatctccagaatgtcagcatggaggctgctgggcaggtcatgagtcaccatgtacctcctatggaagattgtaaggaacaagagcctattatggacaacaatatttctctggtgccttttgagagacctgctgtcatagagaagctcacggggaatatgggaaaacgtaaaagctccactccacaaaagtttgtgggggaaaagctcatgcgattcagctacccagatattcactttgatatgaacttaacatatgagaaggaggctgagctgatgcagtctcatatgatggaccaagccatcaacaatgcaatcacctaccttggagctgaggcccttcaccctctgatgcagcacccgccaagcacaatcgctgaagtggccccagttataagctcagcttattctcaggtctatcatccaaataggatagaaagacccattagcagggaaactgctgatagtcatgaaaacaacatggatggccccatctctctcatcagaccaaagagtcgaccccaggaaagagaggcctctcccagcaatagctgcctggattccactgactcagaaagcagccatgatgaccaccagtcctaccaaggacaccctgccttaaatcccaagaggaaacaaagcccagcttacatgaaggaggatgtcaaagctttggatactaccaaggctcctaagggctctctgaaggacatctacaaggtcttcaatggagaaggagaacagattagggccttcaagtgtgagcactgccgagtccttttcctagaccatgtcatgtacaccattcacatgggttgccatggctaccgggacccactggaatgcaacatctgtggctacagaagccaggaccgttatgagttttcatcacacattgttcgaggggagcacacattccactaggccttttcattccaaaggggacccctatgaagtaaagaactgcacatgaagaaatactgcacttacaatcccacctttcctcaaatgttgacataccttttattttttttaatattattactgttgataattcttattttgtggaggcagtgtcatttgctctgcctaattacgataaggaagaaacagaagagagaaggggcgggaatattgtttctttatcacctggcttgtttattttgtgggaatttaagagcagtccatttctaccaaggcatatcatgctttgaaaaatcacttgattcataaagattcacctaagagattctgatttgccactgatattcagaattatgatggaagacaggaaagttcagagttttctgggtaggactttggtggtttaaaaatggtataagtaactttattcttgaaagaagaatgtgtttcaaactgtaaaccaattttttgttcttcagagatcatggaacacaaacacattgttattttcagtgataactcctaagaggagctgagttgttgtgggttctatgtttacttcccctatggaatttataattcagtatgttttacactgtaccatatagcaaaacttttaaactacaggtagttaagggccacctacaatacatctgaggtcctgtgatcttatttttctaaacgtaagcactgtttttccatagttttgatgactggcattttatagacaccctggcagccttacttttaacacctttaaggaatagtatttttatgtagttttcagaataacatatggtctaagagtggataaaaggcagtcaataatttctgggagggacttctactttcataaatttgtttgagaggttttcttttaaagttgtaatgtgatggcagcatagtatatgtatttgtttctaaaagtatgcttacgattgtcactttatcagcatttaatcagtgttaaccagtcagcagaaaaatataattatgctaacagtagggggagaaaacccacttagaaatcccttttctggtatttctcttttcactagtttttttcaagatgtgacctcccggtgttctgtccatagttcattcatcctttactcttcgagtagaaggtcttaaaagtcttcctgtcggctgtttctttcaaaatctcctcagagcaattgctaatttggcctgaatctggtaacttgaaccctgtaaggttacagaactagggctatttattttagcatttcttcagtagtatttactactcttgttgcaaagaaaagggaatgggacttctttgtaacctgtaccttggacaacagataaaagaaacaaaaaaataagaaagtttacttttacccttcttggagtctagaatgtgacagaacccccaaaggaaagtcctgcacatttttctgtttccaaaacatttaattgtgtaagtccttgtcagaaatgaatctcaatcccttagtatagaattccccttacatggtataggttgccatatttcatgtgcagattttaatttcatttatgtgggcgctctgttttttctttgcagtccagccacattagaggggaggaaccgagtgatattgattcaagtcattttagggggacatacttggaaggcagaacttgctgcttctgtttggggaggacagacctgactgtgactggattatctgataaccatttgtgaatactgaaattctgttaggcagtaactgataactgctctaaaggatcattaaataggatgctgaaattatgtatcttaatacagtgtggtatgagaattaccaagtcaagagaattgtggacataagcaagtttggccccaatactgctcttaactcattttccagcttactatttgctatttaaatggtaggcaccagctaagcacttctaagcactaacacagctagaactaggcaaaaatggttagaactcagctctcttctactagtccctgtcataattatttttgggaaaatgtccaaactgccccctttaaatctaagggaatgcaccaaaacagagatatatagaatgtcaaccatttcatttttttttttctgcatgccttggtacatagtgaacatacaacctatttaaagataaagcatgtttttgagactcgctcacccccccccacccaaccactcccaaataataattgggatgccattttttttccttttggatgaggtaaataattttaaggttcacaattttgtcttttactgcaatttaaggaaacatttggatgtcagtcaatatgttcataattttggctgtgtgcgaatttctgctggcattatctatgaattttcttcctacttatttttttttcagtatatgaacaatcatgtatctacctgccccaggatgaaactaaatttaggtggaccctaaaccttatgaagacagtgctgaggcactttccttttctgatttcatctttttgggaatctgttttattgaaggtagttagtagttgagagtgcatttgctacaagcatatacttgtatcttcctagcttcatgaggaacagaaagaggtggatatggctcagggtgtggcagggacaattgaggacaaagtcaattcaaatttgtgggtcagaaagaatttttgtggacgtagtgtttttggagaaactctggatggttatatgtgcatgccttttcttcaaaaggaaatacgcaaggttgtagcatctaaaaataaacataagagtcagacaccaaataaatcaagttttacataacagttgtatgcccagtttgtttaggtgagatttcacattacagaaagtatttgaggagcatgaaaatgggttatcttctgtattttccagtttggcaaaagttcagaatttcatcacattgctttgccctaattttgcccagaattttatcttagcctctctctgacagtgatgaatcatgctcaaaagccattctaattggacctttttaagacagggaaagggatcagtaggcggattggaagaaatttcaagtcattgaaatattccattgagatttcctaaagggacaaaattgggaaaataagaaactacgacttagatttggctacgtagtagaaagtatctcccctacatacatacaggcaattgtatgtatgaatcatagggtatatgtgtgtgtatactacacacacattcttttaaagagaattcatggaaaaaaaagcagttggagtgatcagatgtattgcaaaaacatacagagaatttaaatgacagttaataccaagaaattagttgggtttactttatcaggtcgtaataggaatcactaaagaagttactagtgtgtctttaggaccagtggcaactcttaaactaaaactttgggtccttattatctacttacagaacaaagtgaaacaaacaatgattaagctgattggatatacattcaaagatatttaatgtaaagttttttggaatacgaagaaaattcagaaaataaatattatcaacagttacttattggcaaatagagaaagacaagaatagtttagtgagcccggtattttgtttttatagtttttatctcagttgtacaactcacaaaaccatgaagtctttggtattttataaatgtttaacaaaatttacatcagattaaggcatttagatgaaaattattatgttctcactatcttccaaattttatttcatcctatctccaaaatgatttcttagggtacaaaaagagcagacggggctgtaaaaatacaagcaaaaaactgtgtgcccctagtttcaggcagaacttaaactgtcagaggtactagctacatgatttgttttttaactttggattgttcacgtccaaaaatggataaattacatttgtgtttatcatcagttgcattttatgtattattttaataaatactatctgaatgaagactattctaaaccagaaaattccccaaatccaaaagaaaaaaaaagtgggaagaggtgaaattgaagtttgtgtatatgaaagttatcttagacatatttttaattctccagtttctgcaaaataattaaaatatacagtaactggtctcctaaatcctgaatttaatgtattaaatacttatgttctttatattggtgcctttttaaaatgcattgagagtgttggttagctgttgcagctgtacaacacttttaatatgcatttttaaaaatcacttaaaattgagtactatataattcatctctgcatttttagtgcaaatctttagagcaatttctaatagagaaattttcagctcagctgttaaaaggaaaaggaaactttgaaactagactttactacctttttagtttcatagtatttctgaatatgattacaagattatgcaggtaaaatatagagtgaaactttacctgtgaattgaattataatttgtgtttttgttttgtttttaaggaagaataagttctgtatcaaacaagaatttattagataattttttggtcaataaaatacagtattcatttggattttcatctccagactagtattgttctagtcttggaatctgtattttctaatctgttagaaaatagagattgaaaattgatggaataatgtgaaaaagcaggtaattaattctccttgaacaaagcaaaactgaacagtcatatcacattgctattctccaaagcataatctcaaatggtttcatatcatggttgtgtattacttgcaatgggtgtgttaggatatgacagctttttaaaaaaatgagctgctggttatacaaagcaaatggcatatgaccaagaagctgtgatatgctagtgtttctttttatcatagtgtattactaggccaaataatgacaccttgaatatttttacatttattgcagaaaccttaaactttggaatttccataaggtttttatgtaatattctatttctagctttttagttttatcttgctgtactgtaagtttgaggatatttttcacctgcactcttaggaataagttcataattctgtttatggggctttcctcccataacactgcatttgtatattttctgtataaaatatgtgttgtgtattaacctttatcccatacagagagtggtacatgaatgactagttttctaagatgtcctttttattgtgaataaaatataaaagttaaaggccctctgctaagtcacataaagtacagcatataagttcatataggtacaaataaatgagtttgcagtgaattgggccttcaaattacctcaagtgacagatagtaagaaaagcttcttgagcaggtggaggtcactgaatcccctactatgcacttaccaagattttacttactttaatttactggaaattgattttttaaaaaatgactacactgtaacaagggaagggatctgggtttttttgttgttttattcttgttttttttaagtagttcaaattctgaaactgtgatttaaaaattttttacagtcaagcattctgattttgaacataactcccttccctttctgtgtaacaaaggtctctctgttatctcttaaattttgttacatctccctcagcctctttctttgtccgtctcccttctgtcattgtctatggatgtttacctctctgttctcctaaaagtttgaagattaggtcaactcttatttctagttcattggtaatttaatcttaatttttttttcgtgatttttgttggttgtataatctgctgacgtatttttatactcaagtgtagttttctattaaaaagaaaagtggttggattaaaaatagtaagctatgtaaccctcatgttactttcactttcaaatattgggtacctaaaacattacttcagagattatgtaatcctattatagtatgtttgctttcctttattgttggattttacattctgatttggctttcctccaaaaaatgtatatcatgaaagactagacagttatttgcaagtgtttagaaaggtgttaaaaatgtaaagcaaagagtcttaactttctcctaattgggagaaaaatgctttaacattactataataatattccaggtttggagggggtctccaggccccatatttgctgttaatagttggaccttttagaccatgtgttatttgcaatcccagaatgattgcttctgctattagttaaaaagatactattcttttctttctgtacaagtgcaatactccccttgaagtcttaaaaactatggtgatttttttttcttttctgacctattcttcctttagctaatgacaaaaagaaactcataaaagtcatagtatgttaaaggacacaacaagcaaagagaaaaacactccacaatcaaaagattacagaatgtggaaaccactagtctgatctcatggtatctttatttaagctaaatttccatggaaattagtaatcttttgcttgaaaaatgtgtcctaaagttgaactttttacagattgaatcttcttagaccctcgcccaatgctctaaattaagaacctaatacttaatatttttattttacttctccccttttagaaataaacttttaaataaaagcaaagcacttagctgagttttaaacacttacatatcacctattggagaaattttttttaaaaatatttggagcagtcctgttttcatacaaatttaagtaagaggtatttttcttatacatatttatatgtagtgtgctaattttctttttttatacctgtgtccctgtagtaaaactgctgtaatataaatacatgttttgttaaaagataacatttctttggcatttcttttaaaggcagttactgcatttctgcatttgtacagtatgtgtcttggccattttagatattctttctttaacaataccaaaggtaattagactattttaaagactaattgcttgacagtttctagggtattttgtgttttagaagcaaaaaaagaaaaaaaaataggtcaaaccagtaaacctcattttttttcaaactaataatttggggaaataaaaactattgtttaaaaaagaaatatatatatatatatataaatatatatgtaaagttaaaattccataccttgtatgtcaggtttgctaagtgtaatgtagtttttttaaggctcaaataccatacctcagaaaatgaggtttactatggaaatactgaaacagtctttgcagctgtgtgacaagtcactctactacatactgatttggagacctccgctaaatagttttatcactgcagactaaaatgtgggacttgtatcttctttgtttttaatgcacacacatacatgttctgtgcatgtatgtggttactgtgtatatgtgtatgagtgttgtatatgcatgtgtgagtgtgtgtctgtatgtgtgtacaactaaagaagctgcagaaactttgtaatactttgtgaaaaggattatattataaaggtttgtactgtctgagtgcacagctactggaataaatttagggaatctcaggaacaagcatataatttgtccaagatttatttcttctcagaagtgtaagtgcagtttttaattctgtatattatttaatattttaccaataaaataaacttctgacataaaaagtttgctataaaaaaaaaaaaaaaaaaaaaa

SEQ ID NO: 299700 - DNA, 3888 bp, Artificial Sequence
  derived and/or modified sequence
gctcctcgctgaagatggaggaagtaaaaacaggattacccttagctacagatccactgccttagtttccaccaccaactgcagtgcacaaacacacgttaggcacaggaaagaaagaaagacagaggacacattaacagtaaacacaaacaaaagggtgatgggattattttactgcatgcactgctgagcccgacattgtcacctcctctttgaggggttagaagaagctgagatctcccgacagagctggaaatggtgatgaatcttttttaatcaaaggacaatttcttttcattgcactttgactatggaaacagaggctattgatggctatataacgtgtgacaatgagctttcacccgaaagggagcactccaatatggcaattgacctcacctcaagcacacccaatggacagcatgcctcaccaagtcacatgacaagcacaaattcagtaaagctagaaatgcagagtgatgaagagtgtgacaggaaacccctgagccgtgaagatgagatcaggggccatgatgagggtagcagcctagaagaacccctaattgagagcagcgaggtggctgacaacaggaaagtccaggagcttcaaggcgagggaggaatccggcttccgaatggtaaactgaaatgtgacgtctgtggcatggtttgcattgggcccaatgtgcttatggtacataaaaggagtcacactggtgaacgccccttccactgtaaccagtgtggagcttcttttactcagaagggcaaccttctgagacacataaagttacactctggagagaagccgttcaaatgtcctttctgtagctacgcctgtagaagaagggacgccctcacaggacacctcaggacccattctgtgggtaaacctcacaagtgcaactactgtggacgaagctacaagcagcgcagttcactggaggagcacaaggaacgctgccacaactatctccagaatgtcagcatggaggctgctgggcaggtcatgagtcaccatgtacctcctatggaagattgtaaggaacaagagcctattatggacaacaatatttctctggtgccttttgagagacctgctgtcatagagaagctcacggggaatatgggaaaacgtaaaagctccactccacaaaagtttgtgggggaaaagctcatgcgattcagctacccagatattcactttgatatgaacttaacatatgagaaggaggctgagctgatgcagtctcatatgatggaccaagccatcaacaatgcaatcacctaccttggagctgaggcccttcaccctctgatgcagcacccgccaagcacaatcgctgaagtggccccagttataagctcagcttattctcaggtctatcatccaaataggatagaaagacccattagcagggaaactgctgatagtcatgaaaacaacatggatggccccatctctctcatcagaccaaagagtcgaccccaggaaagagaggcctctcccagcaatagctgcctggattccactgactcagaaagcagccatgatgaccaccagtcctaccaaggacaccctgccttaaatcccaagaggaaacaaagcccagcttacatgaaggaggatgtcaaagctttggatactaccaaggctcctaagggctctctgaaggacatctacaaggtcttcaatggagaaggagaacagattagggccttcaagtgtgagcactgccgagtccttttcctagaccatgtcatgtacaccattcacatgggttgccatggctaccgggacccactggaatgcaacatctgtggctacagaagccaggaccgttatgagttttcatcacacattgttcgaggggagcacacattccactaggccttttcattccaaaggggacccctatgaagtaaagaactgcacatgaagaaatactgcacttacaatcccacctttcctcaaatgttgacataccttttattttttttaatattattactgttgataattcttattttgtggaggcagtgtcatttgctctgcctaattacgataaggaagaaacagaagagagaaggggcgggaatattgtttctttatcacctggcttgtttattttgtgggaatttaagagcagtccatttctaccaaggcatatcatgctttgaaaaatcacttgattcataaagattcacctaagagattctgatttgccactgatattcagaattatgatggaagacaggaaagttcagagttttctgggtaggactttggtggtttaaaaatggtataagtaactttattcttgaaagaagaatgtgtttcaaactgtaaaccaattttttgttcttcagagatcatggaacacaaacacattgttattttcagtgataactcctaagaggagctgagttgttgtgggttctatgtttacttcccctatggaatttataattcagtatgttttacactgtaccatatagcaaaacttttaaactacaggtagttaagggccacctacaatacatctgaggtcctgtgatcttatttttctaaacgtaagcactgtttttccatagttttgatgactggcattttatagacaccctggcagccttacttttaacacctttaaggaatagtatttttatgtagttttcagaataacatatggtctaagagtggataaaaggcagtcaataatttctgggagggacttctactttcataaatttgtttgagaggttttcttttaaagttgtaatgtgatggcagcatagtatatgtatttgtttctaaaagtatgcttacgattgtcactttatcagcatttaatcagtgttaaccagtcagcagaaaaatataattatgctaacagtagggggagaaaacccacttagaaatcccttttctggtatttctcttttcactagtttttttcaagatgtgacctcccggtgttctgtccatagttcattcatcctttactcttcgagtagaaggtcttaaaagtcttcctgtcggctgtttctttcaaaatctcctcagagcaattgctaatttggcctgaatctggtaacttgaaccctgtaaggttacagaactagggctatttattttagcatttcttcagtagtatttactactcttgttgcaaagaaaagggaatgggacttctttgtaacctgtaccttggacaacagataaaagaaacaaaaaaataagaaagtttacttttacccttcttggagtctagaatgtgacagaacccccaaaggaaagtcctgcacatttttctgtttccaaaacatttaattgtgtaagtccttgtcagaaatgaatctcaatcccttagtatagaattccccttacatggtataggttgccatatttcatgtgcagattttaatttcatttatgtgggcgctctgttttttctttgcagtccagccacattagaggggaggaaccgagtgatattgattcaagtcattttagggggacatacttggaaggcagaacttgctgcttctgtttggggaggacagacctgactgtgactggattatctgataaccatttgtgaatactgaaattctgttaggcagtaactgataactgctctaaaggatcattaaataggatgctgaaattatgtatcttaatacagtgtggtatgagaattaccaagtcaagagaattgtggacataagcaagtttggccccaatactgctcttaactcattttccagcttactatttgctatttaaatggtaggcaccagctaagcacttctaagcactaacacagctagaactaggcaaaaatggttagaactcagctctcttctactagtccctgtcataattat

SEQ ID NO: 299701 - DNA, 9405 bp, Artificial Sequence
  derived and/or modified sequence
gggcttggcttggagggggcaagggagggaaagagagaagggggaaacacaaaaaacttctttctttctccctccgtttatcttcagcccgacattgtcacctcctctttgaggggttagaagaagctgagatctcccgacagagctggaaatgcattgcactttgactatggaaacagaggctattgatggctatataacgtgtgacaatgagctttcacccgaaagggagcactccaatatggcaattgacctcacctcaagcacacccaatggacagcatgcctcaccaagtcacatgacaagcacaaattcagtaaagctagaaatgcagagtgatgaagagtgtgacaggaaacccctgagccgtgaagatgagatcaggggccatgatgagggtagcagcctagaagaacccctaattgagagcagcgaggtggctgacaacaggaaagtccaggagcttcaaggcgagggaggaatccggcttccgaatggtaaactgaaatgtgacgtctgtggcatggtttgcattgggcccaatgtgcttatggtacataaaaggagtcacactggtgaacgccccttccactgtaaccagtgtggagcttcttttactcagaagggcaaccttctgagacacataaagttacactctggagagaagccgttcaaatgtcctttctgtagctacgcctgtagaagaagggacgccctcacaggacacctcaggacccattctgtgggtaaacctcacaagtgcaactactgtggacgaagctacaagcagcgcagttcactggaggagcacaaggaacgctgccacaactatctccagaatgtcagcatggaggctgctgggcaggtcatgagtcaccatgtacctcctatggaagattgtaaggaacaagagcctattatggacaacaatatttctctggtgccttttgagagacctgctgtcatagagaagctcacggggaatatgggaaaacgtaaaagctccactccacaaaagtttgtgggggaaaagctcatgcgattcagctacccagatattcactttgatatgaacttaacatatgagaaggaggctgagctgatgcagtctcatatgatggaccaagccatcaacaatgcaatcacctaccttggagctgaggcccttcaccctctgatgcagcacccgccaagcacaatcgctgaagtggccccagttataagctcagcttattctcaggtctatcatccaaataggatagaaagacccattagcagggaaactgctgatagtcatgaaaacaacatggatggccccatctctctcatcagaccaaagagtcgaccccaggaaagagaggcctctcccagcaatagctgcctggattccactgactcagaaagcagccatgatgaccaccagtcctaccaaggacaccctgccttaaatcccaagaggaaacaaagcccagcttacatgaaggaggatgtcaaagctttggatactaccaaggctcctaagggctctctgaaggacatctacaaggtcttcaatggagaaggagaacagattagggccttcaagtgtgagcactgccgagtccttttcctagaccatgtcatgtacaccattcacatgggttgccatggctaccgggacccactggaatgcaacatctgtggctacagaagccaggaccgttatgagttttcatcacacattgttcgaggggagcacacattccactaggccttttcattccaaaggggacccctatgaagtaaagaactgcacatgaagaaatactgcacttacaatcccacctttcctcaaatgttgacataccttttattttttttaatattattactgttgataattcttattttgtggaggcagtgtcatttgctctgcctaattacgataaggaagaaacagaagagagaaggggcgggaatattgtttctttatcacctggcttgtttattttgtgggaatttaagagcagtccatttctaccaaggcatatcatgctttgaaaaatcacttgattcataaagattcacctaagagattctgatttgccactgatattcagaattatgatggaagacaggaaagttcagagttttctgggtaggactttggtggtttaaaaatggtataagtaactttattcttgaaagaagaatgtgtttcaaactgtaaaccaattttttgttcttcagagatcatggaacacaaacacattgttattttcagtgataactcctaagaggagctgagttgttgtgggttctatgtttacttcccctatggaatttataattcagtatgttttacactgtaccatatagcaaaacttttaaactacaggtagttaagggccacctacaatacatctgaggtcctgtgatcttatttttctaaacgtaagcactgtttttccatagttttgatgactggcattttatagacaccctggcagccttacttttaacacctttaaggaatagtatttttatgtagttttcagaataacatatggtctaagagtggataaaaggcagtcaataatttctgggagggacttctactttcataaatttgtttgagaggttttcttttaaagttgtaatgtgatggcagcatagtatatgtatttgtttctaaaagtatgcttacgattgtcactttatcagcatttaatcagtgttaaccagtcagcagaaaaatataattatgctaacagtagggggagaaaacccacttagaaatcccttttctggtatttctcttttcactagtttttttcaagatgtgacctcccggtgttctgtccatagttcattcatcctttactcttcgagtagaaggtcttaaaagtcttcctgtcggctgtttctttcaaaatctcctcagagcaattgctaatttggcctgaatctggtaacttgaaccctgtaaggttacagaactagggctatttattttagcatttcttcagtagtatttactactcttgttgcaaagaaaagggaatgggacttctttgtaacctgtaccttggacaacagataaaagaaacaaaaaaataagaaagtttacttttacccttcttggagtctagaatgtgacagaacccccaaaggaaagtcctgcacatttttctgtttccaaaacatttaattgtgtaagtccttgtcagaaatgaatctcaatcccttagtatagaattccccttacatggtataggttgccatatttcatgtgcagattttaatttcatttatgtgggcgctctgttttttctttgcagtccagccacattagaggggaggaaccgagtgatattgattcaagtcattttagggggacatacttggaaggcagaacttgctgcttctgtttggggaggacagacctgactgtgactggattatctgataaccatttgtgaatactgaaattctgttaggcagtaactgataactgctctaaaggatcattaaataggatgctgaaattatgtatcttaatacagtgtggtatgagaattaccaagtcaagagaattgtggacataagcaagtttggccccaatactgctcttaactcattttccagcttactatttgctatttaaatggtaggcaccagctaagcacttctaagcactaacacagctagaactaggcaaaaatggttagaactcagctctcttctactagtccctgtcataattatttttgggaaaatgtccaaactgccccctttaaatctaagggaatgcaccaaaacagagatatatagaatgtcaaccatttcatttttttttttctgcatgccttggtacatagtgaacatacaacctatttaaagataaagcatgtttttgagactcgctcacccccccccacccaaccactcccaaataataattgggatgccattttttttccttttggatgaggtaaataattttaaggttcacaattttgtcttttactgcaatttaaggaaacatttggatgtcagtcaatatgttcataattttggctgtgtgcgaatttctgctggcattatctatgaattttcttcctacttatttttttttcagtatatgaacaatcatgtatctacctgccccaggatgaaactaaatttaggtggaccctaaaccttatgaagacagtgctgaggcactttccttttctgatttcatctttttgggaatctgttttattgaaggtagttagtagttgagagtgcatttgctacaagcatatacttgtatcttcctagcttcatgaggaacagaaagaggtggatatggctcagggtgtggcagggacaattgaggacaaagtcaattcaaatttgtgggtcagaaagaatttttgtggacgtagtgtttttggagaaactctggatggttatatgtgcatgccttttcttcaaaaggaaatacgcaaggttgtagcatctaaaaataaacataagagtcagacaccaaataaatcaagttttacataacagttgtatgcccagtttgtttaggtgagatttcacattacagaaagtatttgaggagcatgaaaatgggttatcttctgtattttccagtttggcaaaagttcagaatttcatcacattgctttgccctaattttgcccagaattttatcttagcctctctctgacagtgatgaatcatgctcaaaagccattctaattggacctttttaagacagggaaagggatcagtaggcggattggaagaaatttcaagtcattgaaatattccattgagatttcctaaagggacaaaattgggaaaataagaaactacgacttagatttggctacgtagtagaaagtatctcccctacatacatacaggcaattgtatgtatgaatcatagggtatatgtgtgtgtatactacacacacattcttttaaagagaattcatggaaaaaaaagcagttggagtgatcagatgtattgcaaaaacatacagagaatttaaatgacagttaataccaagaaattagttgggtttactttatcaggtcgtaataggaatcactaaagaagttactagtgtgtctttaggaccagtggcaactcttaaactaaaactttgggtccttattatctacttacagaacaaagtgaaacaaacaatgattaagctgattggatatacattcaaagatatttaatgtaaagttttttggaatacgaagaaaattcagaaaataaatattatcaacagttacttattggcaaatagagaaagacaagaatagtttagtgagcccggtattttgtttttatagtttttatctcagttgtacaactcacaaaaccatgaagtctttggtattttataaatgtttaacaaaatttacatcagattaaggcatttagatgaaaattattatgttctcactatcttccaaattttatttcatcctatctccaaaatgatttcttagggtacaaaaagagcagacggggctgtaaaaatacaagcaaaaaactgtgtgcccctagtttcaggcagaacttaaactgtcagaggtactagctacatgatttgttttttaactttggattgttcacgtccaaaaatggataaattacatttgtgtttatcatcagttgcattttatgtattattttaataaatactatctgaatgaagactattctaaaccagaaaattccccaaatccaaaagaaaaaaaaagtgggaagaggtgaaattgaagtttgtgtatatgaaagttatcttagacatatttttaattctccagtttctgcaaaataattaaaatatacagtaactggtctcctaaatcctgaatttaatgtattaaatacttatgttctttatattggtgcctttttaaaatgcattgagagtgttggttagctgttgcagctgtacaacacttttaatatgcatttttaaaaatcacttaaaattgagtactatataattcatctctgcatttttagtgcaaatctttagagcaatttctaatagagaaattttcagctcagctgttaaaaggaaaaggaaactttgaaactagactttactacctttttagtttcatagtatttctgaatatgattacaagattatgcaggtaaaatatagagtgaaactttacctgtgaattgaattataatttgtgtttttgttttgtttttaaggaagaataagttctgtatcaaacaagaatttattagataattttttggtcaataaaatacagtattcatttggattttcatctccagactagtattgttctagtcttggaatctgtattttctaatctgttagaaaatagagattgaaaattgatggaataatgtgaaaaagcaggtaattaattctccttgaacaaagcaaaactgaacagtcatatcacattgctattctccaaagcataatctcaaatggtttcatatcatggttgtgtattacttgcaatgggtgtgttaggatatgacagctttttaaaaaaatgagctgctggttatacaaagcaaatggcatatgaccaagaagctgtgatatgctagtgtttctttttatcatagtgtattactaggccaaataatgacaccttgaatatttttacatttattgcagaaaccttaaactttggaatttccataaggtttttatgtaatattctatttctagctttttagttttatcttgctgtactgtaagtttgaggatatttttcacctgcactcttaggaataagttcataattctgtttatggggctttcctcccataacactgcatttgtatattttctgtataaaatatgtgttgtgtattaacctttatcccatacagagagtggtacatgaatgactagttttctaagatgtcctttttattgtgaataaaatataaaagttaaaggccctctgctaagtcacataaagtacagcatataagttcatataggtacaaataaatgagtttgcagtgaattgggccttcaaattacctcaagtgacagatagtaagaaaagcttcttgagcaggtggaggtcactgaatcccctactatgcacttaccaagattttacttactttaatttactggaaattgattttttaaaaaatgactacactgtaacaagggaagggatctgggtttttttgttgttttattcttgttttttttaagtagttcaaattctgaaactgtgatttaaaaattttttacagtcaagcattctgattttgaacataactcccttccctttctgtgtaacaaaggtctctctgttatctcttaaattttgttacatctccctcagcctctttctttgtccgtctcccttctgtcattgtctatggatgtttacctctctgttctcctaaaagtttgaagattaggtcaactcttatttctagttcattggtaatttaatcttaatttttttttcgtgatttttgttggttgtataatctgctgacgtatttttatactcaagtgtagttttctattaaaaagaaaagtggttggattaaaaatagtaagctatgtaaccctcatgttactttcactttcaaatattgggtacctaaaacattacttcagagattatgtaatcctattatagtatgtttgctttcctttattgttggattttacattctgatttggctttcctccaaaaaatgtatatcatgaaagactagacagttatttgcaagtgtttagaaaggtgttaaaaatgtaaagcaaagagtcttaactttctcctaattgggagaaaaatgctttaacattactataataatattccaggtttggagggggtctccaggccccatatttgctgttaatagttggaccttttagaccatgtgttatttgcaatcccagaatgattgcttctgctattagttaaaaagatactattcttttctttctgtacaagtgcaatactccccttgaagtcttaaaaactatggtgatttttttttcttttctgacctattcttcctttagctaatgacaaaaagaaactcataaaagtcatagtatgttaaaggacacaacaagcaaagagaaaaacactccacaatcaaaagattacagaatgtggaaaccactagtctgatctcatggtatctttatttaagctaaatttccatggaaattagtaatcttttgcttgaaaaatgtgtcctaaagttgaactttttacagattgaatcttcttagaccctcgcccaatgctctaaattaagaacctaatacttaatatttttattttacttctccccttttagaaataaacttttaaataaaagcaaagcacttagctgagttttaaacacttacatatcacctattggagaaattttttttaaaaatatttggagcagtcctgttttcatacaaatttaagtaagaggtatttttcttatacatatttatatgtagtgtgctaattttctttttttatacctgtgtccctgtagtaaaactgctgtaatataaatacatgttttgttaaaagataacatttctttggcatttcttttaaaggcagttactgcatttctgcatttgtacagtatgtgtcttggccattttagatattctttctttaacaataccaaaggtaattagactattttaaagactaattgcttgacagtttctagggtattttgtgttttagaagcaaaaaaagaaaaaaaaataggtcaaaccagtaaacctcattttttttcaaactaataatttggggaaataaaaactattgtttaaaaaagaaatatatatatatatatataaatatatatgtaaagttaaaattccataccttgtatgtcaggtttgctaagtgtaatgtagtttttttaaggctcaaataccatacctcagaaaatgaggtttactatggaaatactgaaacagtctttgcagctgtgtgacaagtcactctactacatactgatttggagacctccgctaaatagttttatcactgcagactaaaatgtgggacttgtatcttctttgtttttaatgcacacacatacatgttctgtgcatgtatgtggttactgtgtatatgtgtatgagtgttgtatatgcatgtgtgagtgtgtgtctgtatgtgtgtacaactaaagaagctgcagaaactttgtaatactttgtgaaaaggattatattataaaggtttgtactgtctgagtgcacagctactggaataaatttagggaatctcaggaacaagcatataatttgtccaagatttatttcttctcagaagtgtaagtgcagtttttaattctgtatattatttaatattttaccaataaaataaacttctgac

SEQ ID NO: 299702 - DNA, 1599 bp, Artificial Sequence
  derived and/or modified sequence
atgcactgcacacttacaatggagacggaggcaatcgacggctacataacatgcgacaatgagctgagtccggagcgagaacattccaacatggcgatagatctcacaagcagtacgccaaatggtcaacacgcttccccaagtcacatgactagcaccaactcagttaagctggaaatgcagagcgacgaggaatgcgaccgcaaaccattgtcgcgggaagatgaaataagagggcacgacgaaggatcatctctggaggaaccactcatcgagtcatccgaagttgccgacaatcggaaagtacaggaactgcagggagagggcggcatccgattgcctaatggaaagctgaagtgcgatgtatgtggaatggtgtgtattggcccaaacgtactcatggtgcacaaaagaagtcacacgggagagagaccttttcattgtaaccagtgcggtgccagttttacccagaaaggtaacctgctccgccatataaaactccattcgggcgagaaacccttcaaatgtcctttctgctcttacgcatgtagacgcagagatgcactgacgggtcacttacggacccacagcgtgggcaagccacacaagtgcaattattgtgggcgctcctataagcagcggagctcactggaagaacataaggaacggtgtcacaattacctgcaaaatgtctctatggaagcagctggacaggtaatgtctcaccacgtcccacccatggaggattgtaaggagcaggaacctattatggataacaatattagcttagtgccatttgaacgtcctgccgttatcgagaaattgactgggaatatggggaagcgcaaaagtagcacaccacagaagtttgttggcgagaagctcatgcgattctcctatcctgatatccattttgacatgaatctgacctacgagaaggaggccgaattgatgcagagtcatatgatggatcaggccataaacaatgccatcacatacctgggggccgaggcccttcatcccctgatgcaacacccgccctctaccattgccgaggtggctcccgtcattagttccgcgtactctcaggtgtatcatcctaataggatcgagcggccaatctctagagaaaccgccgacagccacgaaaacaacatggacggtccgattagtctaataagacctaagagccgaccacaggaacgagaggcttcacccagcaacagttgcctggattccacagacagcgaatcttctcacgacgatcaccagagttaccagggtcatccagccctaaatccgaaaaggaaacagtcacccgcttacatgaaggaagatgtaaaggcgcttgacaccaccaaggctcctaagggcagtctgaaagatatctacaaagtcttcaacggcgagggcgaacaaatcagggcgtttaaatgtgaacactgccgggtgttatttttggaccatgtcatgtacaccatccatatgggctgtcatgggtatcgggaccctctggagtgcaacatctgtggctacaggtctcaggaccgttacgaatttagcagtcatatcgtccgaggggaacacaccttccattag

SEQ ID NO: 299703 - DNA, 1599 bp, Artificial Sequence
  derived and/or modified sequence
atgcactgcaccctgaccatggagacagaggccattgatggctacatcacctgtgacaatgagctgagccctgagcgggagcacagcaacatggccatcgacctgaccagcagcaccccaaatggccagcacgccagccccagccacatgaccagcaccaacagcgtgaagctggagatgcagagtgatgaagaatgtgacaggaagcccctgagccgggaggatgagatccggggccatgatgagggcagcagcctggaggagcccctgattgagagcagcgaggtggccgacaacaggaaggtgcaggagctgcagggcgagggcggcatccggctgcccaacgggaagctgaagtgtgatgtgtgtggcatggtgtgcatcggccccaacgtgctgatggtgcacaagaggagccacactggagagcggcccttccactgcaaccagtgtggggccagcttcacccagaagggcaacctgctgcggcacatcaagctgcacagcggggagaagcccttcaagtgccccttctgcagctatgcctgcagaagaagagatgccctgaccggccacctgcggacccacagcgtgggcaagccccacaagtgcaactactgcggccgcagctacaagcagaggagcagcctggaggagcacaaggagcgctgccacaactacctgcagaatgtgtccatggaggccgccggccaggtgatgagccaccacgtgccccccatggaggactgcaaggagcaggagcccatcatggacaacaacatcagcctggtgccctttgagaggcctgctgtgattgagaagctgaccggcaacatgggcaagaggaagagcagcaccccccagaagtttgtgggggagaagctgatgaggttctcctacccagacatccactttgacatgaacctgacctatgagaaggaggccgagctgatgcagagccacatgatggaccaggccatcaacaatgccatcacctacctgggcgctgaggccctgcaccccctgatgcagcacccccccagcaccatcgccgaggtggcccctgtgatcagcagcgcctacagccaggtgtaccaccccaaccgcatcgagcggcccatcagccgggagacagctgacagccatgagaacaacatggatggccccatcagcctcatccggcccaagagccggccccaggagcgggaggccagccccagcaacagctgcctggacagcacagacagcgagagcagccatgatgaccaccagagctaccagggccacccagccctgaaccccaagaggaagcagagccctgcctacatgaaggaggatgtgaaggccctggacaccaccaaggcccccaagggcagcctgaaggacatctacaaggtgttcaacggggagggggagcagatccgggccttcaagtgtgagcactgccgggtgctcttcctggaccacgtgatgtacaccatccacatgggctgccacggctacagagaccccctggagtgcaacatctgtggctaccgcagccaggacagatatgagttcagcagccacatcgtgcggggggagcacaccttccactag

SEQ ID NO: 299704 - DNA, 1599 bp, Artificial Sequence
  derived and/or modified sequence
atgcactgcaccctgaccatggagaccgaggccatcgacggctacatcacctgcgacaacgagctcagccctgagcgcgagcacagcaatatggcaatagatttgaccagcagtacacctaatggacagcacgcaagtccaagtcatatgacttctacaaattccgtgaagttggaaatgcagagcgatgaagagtgcgatcggaaaccactttcaagggaagatgaaattagaggacacgacgagggctcttctctggaggagccactgatcgaatccagcgaagtggccgacaaccggaaagtccaggagctccagggagaaggtgggataagactaccaaatggcaagttgaagtgcgatgtatgtggcatggtctgcattggcccgaatgtgctgatggttcataaacggtcgcatacaggcgagcgaccatttcactgtaaccagtgtggtgccagtttcacccagaaggggaatctgttgcggcatattaagctacactctggagagaaaccattcaaatgccctttctgctcttacgcttgcaggcgcagagacgcactgactggacaccttcgcacacactcagtgggaaagccccataagtgtaattattgtgggcgatcctacaaacagagaagttcactggaggagcataaagagcggtgccataactatctgcagaacgtctctatggaagcagccggccaggtgatgagccaccacgttccccccatggaagattgtaaggagcaggaacctattatggataacaacatatccctggtgccatttgagagaccagccgttatcgagaagctgacaggaaatatgggtaagcgcaagagctctacaccccagaagttcgttggcgaaaagctgatgcggttctcttatcctgatatacattttgacatgaatctcacatatgagaaggaggcagaacttatgcagagccacatgatggaccaggctataaacaatgcgatcacctatctaggggcggaggccctgcatcctctgatgcagcaccctccttctacgattgccgaggtagctcccgtaatatcctctgcttactcccaggtgtaccatcccaataggattgagaggcccatatctcgcgaaacagctgattcgcatgagaacaacatggacggccctatttctttgatcagaccaaaaagccggcctcaagaacgggaagcctcccccagtaattcctgcctggactctacagactctgaatcttctcatgatgatcaccagtcgtaccagggacatcccgcactgaatcccaaaaggaagcagtcgcccgcctatatgaaggaggacgtcaaggcgttagatactacaaaagcacctaaggggagcctgaaggacatctataaagtcttcaacggcgaaggcgagcagatcagggcatttaaatgtgagcactgtcgggtgctgttcctggaccacgtgatgtacacaatccacatgggctgtcacgggtacagggaccctttggagtgcaatatatgcggctatagatctcaggataggtacgaattctcctcccatatcgtgcgcggggaacatacttttcactag

SEQ ID NO: 299705 - DNA, 1599 bp, Artificial Sequence
  derived and/or modified sequence
atgcattgcactctgactatggagaccgaagccatcgacggatacatcacctgcgataacgaattgagccctgaacgcgaacactccaatatggctattgatctcacaagttccactcctaatgggcagcacgcatcaccctcccatatgaccagcacaaactccgtcaaactcgagatgcagtccgacgaggagtgcgatcgtaaacccctgagtagagaggatgaaatcagggggcacgacgaagggtcctctcttgaggaaccgctcatcgagagcagcgaggtggctgataacagaaaggttcaagaactacagggcgagggtggaatacgcctgccaaacggcaagctaaagtgcgacgtctgcggcatggtctgcataggcccaaacgtactcatggtgcacaaacggagccatacaggcgaaagaccattccactgtaatcagtgcggggcttctttcacgcaaaaaggaaacctgttgagacacatcaagctgcattctggagagaagccgttcaagtgtccattctgtagctacgcttgcagacgcagggatgcccttaccggccacctgcgtactcattctgtcggtaaaccccacaaatgcaactactgtggacgatcctataagcagcgcagttcccttgaggagcacaaggaacgttgtcataattatttgcagaatgtctccatggaagccgcaggtcaagttatgagtcatcatgttccacctatggaggactgcaaggaacaggaaccaattatggataacaatatcagcctggtcccctttgagaggcccgcagtgatcgaaaagctgacaggcaatatgggaaaacgaaaatcatccacaccacagaagtttgttggcgaaaaactcatgcgattttcataccccgatattcatttcgatatgaacttgacgtatgaaaaggaggccgagctgatgcaaagccatatgatggaccaggcaataaacaatgcaatcacctacctaggcgcagaggctttgcacccactgatgcagcaccccccttccacaatcgctgaggttgcaccagtgatttcatccgcttactctcaggtgtatcacccgaaccgaatcgaacgccctatttcacgcgagactgcggacagccacgaaaataacatggatggccctatctcattgattagaccaaagtcccggccacaagaaagggaagcctccccctctaactcctgcctggacagcaccgactcagagagcagccacgacgaccaccagtcttaccaaggccatcccgcactcaaccccaaacggaaacaatcccctgcttacatgaaggaagacgttaaggctcttgacacaacgaaagctcctaaaggctcactaaaggacatatacaaagtgttcaatggagaaggcgaacagatccgcgcattcaaatgcgagcattgtcgggtgctgtttttggaccacgtgatgtataccattcatatggggtgccatggatatagagatccgttggagtgtaatatctgtggctacaggtcacaggacaggtatgagttcagtagccacatcgtgcgaggcgagcatacttttcattag

SEQ ID NO: 299706 - DNA, 1599 bp, Artificial Sequence
  derived and/or modified sequence
atgcactgcaccctgaccatggagaccgaggccatcgacggctacatcacctgcgacaacgagctgagccccgagagagagcacagcaacatggccatcgacctgaccagcagcacccccaacggccagcacgccagccccagccacatgaccagcaccaacagcgtgaagctggagatgcagagcgacgaggagtgcgacagaaagcccctgagcagagaggacgagatcagaggccacgacgagggcagcagcctggaggagcccctgatcgagagcagcgaggtggccgacaacagaaaggtgcaggagctgcagggcgagggcggcatcagactgcccaacggcaagctgaagtgcgacgtgtgcggcatggtgtgcatcggccccaacgtgctgatggtgcacaagagaagccacaccggcgagagacccttccactgcaaccagtgcggcgccagcttcacccagaagggcaacctgctgagacacatcaagctgcacagcggcgagaagcccttcaagtgccccttctgcagctacgcctgcagaagaagagacgccctgaccggccacctgagaacccacagcgtgggcaagccccacaagtgcaactactgcggcagaagctacaagcagagaagcagcctggaggagcacaaggagagatgccacaactacctgcagaacgtgagcatggaggccgccggccaggtgatgagccaccacgtgccccccatggaggactgcaaggagcaggagcccatcatggacaacaacatcagcctggtgcccttcgagagacccgccgtgatcgagaagctgaccggcaacatgggcaagagaaagagcagcaccccccagaagttcgtgggcgagaagctgatgagattcagctaccccgacatccacttcgacatgaacctgacctacgagaaggaggccgagctgatgcagagccacatgatggaccaggccatcaacaacgccatcacctacctgggcgccgaggccctgcaccccctgatgcagcacccccccagcaccatcgccgaggtggcccccgtgatcagcagcgcctacagccaggtgtaccaccccaacagaatcgagagacccatcagcagagagaccgccgacagccacgagaacaacatggacggccccatcagcctgatcagacccaagagcagaccccaggagagagaggccagccccagcaacagctgcctggacagcaccgacagcgagagcagccacgacgaccaccagagctaccagggccaccccgccctgaaccccaagagaaagcagagccccgcctacatgaaggaggacgtgaaggccctggacaccaccaaggcccccaagggcagcctgaaggacatctacaaggtgttcaacggcgagggcgagcagatcagagccttcaagtgcgagcactgcagagtgctgttcctggaccacgtgatgtacaccatccacatgggctgccacggctacagagaccccctggagtgcaacatctgcggctacagaagccaggacagatacgagttcagcagccacatcgtgagaggcgagcacaccttccactag

SEQ ID NO: 299707 - DNA, 3747 bp, Artificial Sequence
  derived and/or modified sequence
gggcttggcttggagggggcaagggagggaaagagagaagggggaaacacaaaaaacttctttctttctccctccgtttatcttcagcccgacattgtcacctcctctttgaggggttagaagaagctgagatctcccgacagagctggaaatgcattgcactttgactatggaaacagaggctattgatggctatataacgtgtgacaatgagctttcacccgaaagggagcactccaatatggcaattgacctcacctcaagcacacccaatggacagcatgcctcaccaagtcacatgacaagcacaaattcagtaaagctagaaatgcagagtgatgaagagtgtgacaggaaacccctgagccgtgaagatgagatcaggggccatgatgagggtagcagcctagaagaacccctaattgagagcagcgaggtggctgacaacaggaaagtccaggagcttcaaggcgagggaggaatccggcttccgaatggtaaactgaaatgtgacgtctgtggcatggtttgcattgggcccaatgtgcttatggtacataaaaggagtcacactggtgaacgccccttccactgtaaccagtgtggagcttcttttactcagaagggcaaccttctgagacacataaagttacactctggagagaagccgttcaaatgtcctttctgtagctacgcctgtagaagaagggacgccctcacaggacacctcaggacccattctgtgggtaaacctcacaagtgcaactactgtggacgaagctacaagcagcgcagttcactggaggagcacaaggaacgctgccacaactatctccagaatgtcagcatggaggctgctgggcaggtcatgagtcaccatgtacctcctatggaagattgtaaggaacaagagcctattatggacaacaatatttctctggtgccttttgagagacctgctgtcatagagaagctcacggggaatatgggaaaacgtaaaagctccactccacaaaagtttgtgggggaaaagctcatgcgattcagctacccagatattcactttgatatgaacttaacatatgagaaggaggctgagctgatgcagtctcatatgatggaccaagccatcaacaatgcaatcacctaccttggagctgaggcccttcaccctctgatgcagcacccgccaagcacaatcgctgaagtggccccagttataagctcagcttattctcaggtctatcatccaaataggatagaaagacccattagcagggaaactgctgatagtcatgaaaacaacatggatggccccatctctctcatcagaccaaagagtcgaccccaggaaagagaggcctctcccagcaatagctgcctggattccactgactcagaaagcagccatgatgaccaccagtcctaccaaggacaccctgccttaaatcccaagaggaaacaaagcccagcttacatgaaggaggatgtcaaagctttggatactaccaaggctcctaagggctctctgaaggacatctacaaggtcttcaatggagaaggagaacagattagggccttcaagtgtgagcactgccgagtccttttcctagaccatgtcatgtacaccattcacatgggttgccatggctaccgggacccactggaatgcaacatctgtggctacagaagccaggaccgttatgagttttcatcacacattgttcgaggggagcacacattccactaggccttttcattccaaaggggacccctatgaagtaaagaactgcacatgaagaaatactgcacttacaatcccacctttcctcaaatgttgacataccttttattttttttaatattattactgttgataattcttattttgtggaggcagtgtcatttgctctgcctaattacgataaggaagaaacagaagagagaaggggcgggaatattgtttctttatcacctggcttgtttattttgtgggaatttaagagcagtccatttctaccaaggcatatcatgctttgaaaaatcacttgattcataaagattcacctaagagattctgatttgccactgatattcagaattatgatggaagacaggaaagttcagagttttctgggtaggactttggtggtttaaaaatggtataagtaactttattcttgaaagaagaatgtgtttcaaactgtaaaccaattttttgttcttcagagatcatggaacacaaacacattgttattttcagtgataactcctaagaggagctgagttgttgtgggttctatgtttacttcccctatggaatttataattcagtatgttttacactgtaccatatagcaaaacttttaaactacaggtagttaagggccacctacaatacatctgaggtcctgtgatcttatttttctaaacgtaagcactgtttttccatagttttgatgactggcattttatagacaccctggcagccttacttttaacacctttaaggaatagtatttttatgtagttttcagaataacatatggtctaagagtggataaaaggcagtcaataatttctgggagggacttctactttcataaatttgtttgagaggttttcttttaaagttgtaatgtgatggcagcatagtatatgtatttgtttctaaaagtatgcttacgattgtcactttatcagcatttaatcagtgttaaccagtcagcagaaaaatataattatgctaacagtagggggagaaaacccacttagaaatcccttttctggtatttctcttttcactagtttttttcaagatgtgacctcccggtgttctgtccatagttcattcatcctttactcttcgagtagaaggtcttaaaagtcttcctgtcggctgtttctttcaaaatctcctcagagcaattgctaatttggcctgaatctggtaacttgaaccctgtaaggttacagaactagggctatttattttagcatttcttcagtagtatttactactcttgttgcaaagaaaagggaatgggacttctttgtaacctgtaccttggacaacagataaaagaaacaaaaaaataagaaagtttacttttacccttcttggagtctagaatgtgacagaacccccaaaggaaagtcctgcacatttttctgtttccaaaacatttaattgtgtaagtccttgtcagaaatgaatctcaatcccttagtatagaattccccttacatggtataggttgccatatttcatgtgcagattttaatttcatttatgtgggcgctctgttttttctttgcagtccagccacattagaggggaggaaccgagtgatattgattcaagtcattttagggggacatacttggaaggcagaacttgctgcttctgtttggggaggacagacctgactgtgactggattatctgataaccatttgtgaatactgaaattctgttaggcagtaactgataactgctctaaaggatcattaaataggatgctgaaattatgtatcttaatacagtgtggtatgagaattaccaagtcaagagaattgtggacataagcaagtttggccccaatactgctcttaactcattttccagcttactatttgctatttaaatggtaggcaccagctaagcacttctaagcactaacacagctagaactaggcaaaaatggttagaactcagctctcttctactagtccctgtcataattat

SEQ ID NO: 299708 - DNA, 1658 bp, Artificial Sequence
  derived and/or modified sequence
atggaaacagaggctattgatggctatataacgtgtgacaatgagctttcacccgaaagggagcactccaatatggcaattgacctcacctcaagcacacccaatggacagcatgcctcaccaagtcacatgacaagcacaaattcagtaaagctagaaatgcagagtgatgaagagtgtgacaggaaacccctgagccgtgaagatgagatcaggggccatgatgagggtagcagcctagaagaacccctaattgagagcagcgaggtggctgacaacaggaaagtccaggagcttcaaggcgagggaggaatccggcttccgaatggtaaactgaaatgtgacgtctgtggcatggtttgcattgggcccaatgtgcttatggtacataaaaggagtcacactggtgaacgccccttccactgtaaccagtgtggagcttcttttactcagaagggcaaccttctgagacacataaagttacactctggagagaagccgttcaaatgtcctttctgtagctacgcctgtagaagaagggacgccctcacaggacacctcaggacccattctgtgggtaaacctcacaagtgcaactactgtggacgaagctacaagcagcgcagttcactggaggagcacaaggaacgctgccacaactatctccagaatgtcagcatggaggctgctgggcaggtcatgagtcaccatgatagttagagctgattccacattagtctgtaggctgcctaaaagaatgaattggttatttgaatattttcatctcagtacctcctatggaagattgtaaggaacaagagcctattatggacaacaatatttctctggtgccttttgagagacctgctgtcatagagaagctcacggggaatatgggaaaacgtaaaagctccactccacaaaagtttgtgggggaaaagctcatgcgattcagctacccagatattcactttgatatgaacttaacatatgagaaggaggctgagctgatgcagtctcatatgatggaccaagccatcaacaatgcaatcacctaccttggagctgaggcccttcaccctctgatgcagcacccgccaagcacaatcgctgaagtggccccagttataagctcagcttattctcaggtctatcatccaaataggatagaaagacccattagcagggaaactgctgatagtcatgaaaacaacatggatggccccatctctctcatcagaccaaagagtcgaccccaggaaagagaggcctctcccagcaatagctgcctggattccactgactcagaaagcagccatgatgaccaccagtcctaccaaggacaccctgccttaaatcccaagaggaaacaaagcccagcttacatgaaggaggatgtcaaagctttggatactaccaaggctcctaagggctctctgaaggacatctacaaggtcttcaatggagaaggagaacagattagggccttcaagtgtgagcactgccgagtccttttcctagaccatgtcatgtacaccattcacatgggttgccatggctaccgggacccactggaatgcaacatctgtggctacagaagccaggaccgttatgagttttcatcacacattgttcgaggggagcacacattccactag

SEQ ID NO: 299709 - protein, 230 aa, Artificial Sequence
  derived and/or modified sequence
METEAIDGYITCDNELSPEREHSNMAIDLTSSTPNGQHASPSHMTSTIAEVAPVISSAYSQVYHPNRIERPISRETADSHENNMDGPISLIRPKSRPQEREASPSNSCLDSTDSESSHDDHQSYQGHPALNPKRKQSPAYMKEDVKALDTTKAPKGSLKDIYKVFNGEGEQIRAFKCEHCRVLFLDHVMYTIHMGCHGYRDPLECNICGYRSQDRYEFSSHIVRGEHTFH

SEQ ID NO: 299710 - DNA, 1763 bp, Artificial Sequence
  derived and/or modified sequence
atggaaacagaggctattgatggctatataacgtgtgacaatgagctttcacccgaaagggagcactccaatatggcaattgacctcacctcaagcacacccaatggacagcatgcctcaccaagtcacatgacaagcacaaattcagtaaagctagaaatgcagagtgatgaagagtgtgacaggaaacccctgagccgtgaagatgagatcaggggccatgatgagggtagcagcctagaagaacccctaattgagagcagcgaggtggctgacaacaggaaagtccaggagcttcaaggcgagggaggaatccggcttccgaatggtaaactgaaatgtgacgtctgtggcatggtttgcattgggcccaatgtgcttatggtacataaaaggagtcacactggggtggcagtggtgaaaactaccttttcagaattctgctagtattggattgcagaaaaacagagagtagcctgggtcttgacttccagccttcaaatctgaatagcatatcagaaaagaagtttgggattcagtttccacagttcttaatatagcaataatatgataagggttcaaaaggtgaacgccccttccactgtaaccagtgtggagcttcttttactcagaagggcaaccttctgagacacataaagttacactctggagagaagccgttcaaatgtcctttctgtagctacgcctgtagaagaagggacgccctcacaggacacctcaggacccattctgtgggtaaacctcacaagtgcaactactgtggacgaagctacaagcagcgcagttcactggaggagcacaaggaacgctgccacaactatctccagaatgtcagcatggaggctgctgggcaggtcatgagtcaccatgtacctcctatggaagattgtaaggaacaagagcctattatggacaacaatatttctctggtgccttttgagagacctgctgtcatagagaagctcacggggaatatgggaaaacgtaaaagctccactccacaaaagtttgtgggggaaaagctcatgcgattcagctacccagatattcactttgatatgaacttaacatatgagaaggaggctgagctgatgcagtctcatatgatggaccaagccatcaacaatgcaatcacctaccttggagctgaggcccttcaccctctgatgcagcacccgccaagcacaatcgctgaagtggccccagttataagctcagcttattctcaggtctatcatccaaataggatagaaagacccattagcagggaaactgctgatagtcatgaaaacaacatggatggccccatctctctcatcagaccaaagagtcgaccccaggaaagagaggcctctcccagcaatagctgcctggattccactgactcagaaagcagccatgatgaccaccagtcctaccaaggacaccctgccttaaatcccaagaggaaacaaagcccagcttacatgaaggaggatgtcaaagctttggatactaccaaggctcctaagggctctctgaaggacatctacaaggtcttcaatggagaaggagaacagattagggccttcaagtgtgagcactgccgagtccttttcctagaccatgtcatgtacaccattcacatgggttgccatggctaccgggacccactggaatgcaacatctgtggctacagaagccaggaccgttatgagttttcatcacacattgttcgaggggagcacacattccactaggcc

SEQ ID NO: 299711 - DNA, 1146 bp, Artificial Sequence
  derived and/or modified sequence
atggagacagaagcaattgatggatacatcacctgtgacaatgagctctcccctgaacgcgagcactccaatatggcgatcgacctgaccagctcgacgcccaatggccaacatgcatctccatcacatatgacaagtatgggtaaaccacataagtgtaattattgcggtaggagctacaagcagagatcttcactggaggagcacaaggaacgctgtcataactaccttcagaacgtgtctatggaggccgctggacaggtgatgagtcaccatgtcccgcccatggaggattgtaaggagcaggagcccataatggacaataatattagcctcgtccctttcgagcgaccagccgttattgaaaagcttacaggcaatatggggaaacgcaagtcctccacccctcagaagtttgtgggagaaaaacttatgcgcttctcttatcctgatatccactttgacatgaacctgacttacgaaaaagaggccgaacttatgcaaagccacatgatggaccaagctatcaacaacgccattacctacttgggggcagaagccctacaccccctcatgcagcatcccccctccacgatcgctgaagtcgcccccgtgatttcgagcgcctacagccaggtttaccacccaaatcggatagaaaggccaatatctcgggagaccgcagacagccatgagaacaacatggacggcccgattagcctgatccggcccaaatcccggccccaggaacgggaggccagccccagcaacagctgtctggactccacggacagcgagtcctcgcacgatgaccatcagtcataccaggggcaccccgctctaaacccgaagagaaagcaatctccagcatatatgaaagaagatgtgaaggccctagatactacaaaggcacccaaaggcagcctaaaggacatctataaggtgttcaacggagagggcgaacagattagagccttcaagtgcgaacattgcagagtgttatttctggatcacgtcatgtatactattcatatggggtgccacggttaccgagatcccctcgagtgcaacatatgcggataccgttcccaggacagatacgaattcagcagtcatattgtgaggggtgagcataccttccattag

SEQ ID NO: 299712 - DNA, 1146 bp, Artificial Sequence
  derived and/or modified sequence
atggagacagaggccattgatggctacatcacctgtgacaatgagctgagccctgagcgggagcacagcaacatggccatcgacctgaccagcagcaccccaaatggccagcacgccagccccagccacatgacctccatgggcaagccccacaagtgcaactactgcggccgcagctacaagcagaggagcagcctggaggagcacaaggagcgctgccacaactacctgcagaatgtgtccatggaggccgccggccaggtgatgagccaccacgtgccccccatggaggactgcaaggagcaggagcccatcatggacaacaacatcagcctggtgccctttgagaggcctgctgtgattgagaagctgactggaaacatgggcaagaggaagagcagcaccccccagaagtttgtgggggagaagctgatgaggttctcctacccagacatccactttgacatgaacctgacctatgagaaggaggccgagctgatgcagagccacatgatggaccaggccatcaacaatgccatcacctacctgggcgctgaggccctgcaccccctgatgcagcacccccccagcaccatcgccgaggtggcccctgtgatcagcagcgcctacagccaggtgtaccaccccaacagaattgagcggcccatcagccgggagacagctgacagccatgagaacaacatggatggccccatcagcctcatccggcccaagagccggccccaggagcgggaggccagccccagcaacagctgcctggacagcacagattctgagagcagccatgatgaccaccagagctaccagggccacccagccctgaaccccaagaggaagcagagccctgcctacatgaaggaggatgtgaaggccctggacaccaccaaggcccccaagggcagcctgaaggacatctacaaggtgttcaatggagagggggagcagatccgggccttcaagtgtgagcactgccgggtgctcttcctggaccacgtgatgtacaccatccacatgggctgccacggctacagagaccccctggagtgcaacatctgtggctaccgcagccaggacagatatgagttcagcagccacatcgtgcggggggagcacaccttccactag

SEQ ID NO: 299713 - DNA, 1146 bp, Artificial Sequence
  derived and/or modified sequence
atggagaccgaggccatcgacggctacatcacctgcgacaacgagctctccccagaaagagagcattcgaacatggccattgatcttaccagcagcacccccaacggccagcacgcatccccaagtcatatgacctcaatggggaaaccacacaagtgcaattactgcggacggtcatacaagcagcgctcaagcctggaggagcataaggagcgctgtcataactatcttcagaatgtatccatggaggctgctggtcaagtgatgagccatcatgtaccccccatggaagactgtaaggagcaggaacccatcatggataacaacatatccctggtgcctttcgaacgtcctgcagtcattgagaagctgacaggaaacatgggcaaacggaaatcgtccacgcctcaaaagttcgtgggggaaaagctcatgaggttttcctatcctgatatccatttcgacatgaacctcacttacgagaaggaagccgagctcatgcaaagtcacatgatggaccaggcgatcaataacgccatcacctatctgggcgctgaggctcttcatcccctgatgcaacacccgccgagtaccatcgccgaagtcgcgcccgtgatcagtagcgcctactcccaagtctaccatcctaaccggatcgagagacctattagccgcgagaccgccgattcccacgaaaataacatggacggacccattagtttgataagaccaaaatcccggccacaggagagggaggcatcaccaagcaactcatgcctcgattccaccgacagtgagtcatcgcatgatgaccatcaatcctatcaggggcacccagctttaaatccaaagagaaagcaatcgccggcttacatgaaagaggatgtaaaggctctggacacgaccaaggccccaaaggggtccctgaaggacatttacaaagtttttaacggtgagggcgagcaaattcgcgcattcaagtgcgaacattgccgagtcctgttcctagaccacgtgatgtacacaatccacatggggtgtcacggttatcgtgaccctctggagtgtaacatctgtggctacagaagtcaagatagatatgaattttcctcccacatcgtacggggagaacacaccttccattag

SEQ ID NO: 299714 - DNA, 1146 bp, Artificial Sequence
  derived and/or modified sequence
atggagaccgaagcaattgacggttacattacatgtgataatgagctgtctcctgaaagggagcacagcaatatggctattgatctgacatccagcacacccaatggtcagcacgcatccccttcccatatgactagtatggggaagccacataaatgcaactactgtggccgttcctacaagcaaagaagctccctggaggagcacaaagaacgttgtcataactacctgcagaacgtttccatggaagctgccggacaggtgatgagccaccatgtcccccctatggaagattgcaaggagcaagagcccatcatggataacaatatctcccttgtacctttcgagcgcccagcggtcatagaaaaactgacgggcaatatgggaaaaaggaagagctctaccccacagaagtttgtcggagagaaacttatgcgattcagctatcctgacattcacttcgatatgaatctgacctatgaaaaagaggccgaactgatgcagagccacatgatggaccaagctattaacaacgcaatcacctatctgggggctgaggccctacacccgcttatgcaacacccccctagtaccattgcagaagtggcccctgtaatttcatccgcctatagccaggtctatcacccaaacaggatcgagcggcctatctccagggagacggccgatagtcacgaaaacaatatggacggacctattagcttgataaggccaaaaagccggcctcaggaacgggaagcgagcccgtcaaattcctgtctggattctaccgattccgagtccagccatgatgatcaccaatcatatcagggtcaccctgccctgaacccaaaacgcaaacagagccctgcatacatgaaagaggatgtgaaggcactagacactaccaaggctccaaaagggtcactcaaagacatctataaggtctttaatggagagggtgagcagattagggcttttaagtgcgagcattgtagagttctattcctggaccatgtgatgtatactatccatatgggatgtcacggctaccgggatccactcgagtgcaacatttgcggatatcgatcacaggatcggtacgaattctcaagccacattgttcgtggggagcacacatttcactag

SEQ ID NO: 299715 - DNA, 1146 bp, Artificial Sequence
  derived and/or modified sequence
atggagaccgaggccatcgacggctacatcacctgcgacaacgagctgagccccgagagagagcacagcaacatggccatcgacctgaccagcagcacccccaacggccagcacgccagccccagccacatgaccagcatgggcaagccccacaagtgcaactactgcggcagaagctacaagcagagaagcagcctggaggagcacaaggagagatgccacaactacctgcagaacgtgagcatggaggccgccggccaggtgatgagccaccacgtgccccccatggaggactgcaaggagcaggagcccatcatggacaacaacatcagcctggtgcccttcgagagacccgccgtgatcgagaagctgaccggcaacatgggcaagagaaagagcagcaccccccagaagttcgtgggcgagaagctgatgagattcagctaccccgacatccacttcgacatgaacctgacctacgagaaggaggccgagctgatgcagagccacatgatggaccaggccatcaacaacgccatcacctacctgggcgccgaggccctgcaccccctgatgcagcacccccccagcaccatcgccgaggtggcccccgtgatcagcagcgcctacagccaggtgtaccaccccaacagaatcgagagacccatcagcagagagaccgccgacagccacgagaacaacatggacggccccatcagcctgatcagacccaagagcagaccccaggagagagaggccagccccagcaacagctgcctggacagcaccgacagcgagagcagccacgacgaccaccagagctaccagggccaccccgccctgaaccccaagagaaagcagagccccgcctacatgaaggaggacgtgaaggccctggacaccaccaaggcccccaagggcagcctgaaggacatctacaaggtgttcaacggcgagggcgagcagatcagagccttcaagtgcgagcactgcagagtgctgttcctggaccacgtgatgtacaccatccacatgggctgccacggctacagagaccccctggagtgcaacatctgcggctacagaagccaggacagatacgagttcagcagccacatcgtgagaggcgagcacaccttccactag

SEQ ID NO: 299716 - DNA, 1146 bp, Artificial Sequence
  derived and/or modified sequence
atggaaacagaggctattgatggctatataacgtgtgacaatgagctttcacccgaaagggagcactccaatatggcaattgacctcacctcaagcacacccaatggacagcatgcctcaccaagtcacatgacaagcatgggtaaacctcacaagtgcaactactgtggacgaagctacaagcagcgcagttcactggaggagcacaaggaacgctgccacaactatctccagaatgtcagcatggaggctgctgggcaggtcatgagtcaccatgtacctcctatggaagattgtaaggaacaagagcctattatggacaacaatatttctctggtgccttttgagagacctgctgtcatagagaagctcacggggaatatgggaaaacgtaaaagctccactccacaaaagtttgtgggggaaaagctcatgcgattcagctacccagatattcactttgatatgaacttaacatatgagaaggaggctgagctgatgcagtctcatatgatggaccaagccatcaacaatgcaatcacctaccttggagctgaggcccttcaccctctgatgcagcacccgccaagcacaatcgctgaagtggccccagttataagctcagcttattctcaggtctatcatccaaataggatagaaagacccattagcagggaaactgctgatagtcatgaaaacaacatggatggccccatctctctcatcagaccaaagagtcgaccccaggaaagagaggcctctcccagcaatagctgcctggattccactgactcagaaagcagccatgatgaccaccagtcctaccaaggacaccctgccttaaatcccaagaggaaacaaagcccagcttacatgaaggaggatgtcaaagctttggatactaccaaggctcctaagggctctctgaaggacatctacaaggtcttcaatggagaaggagaacagattagggccttcaagtgtgagcactgccgagtccttttcctagaccatgtcatgtacaccattcacatgggttgccatggctaccgggacccactggaatgcaacatctgtggctacagaagccaggaccgttatgagttttcatcacacattgttcgaggggagcacacattccactag

SEQ ID NO: 299717 - DNA, 1780 bp, Artificial Sequence
  derived and/or modified sequence
atggaaacagaggctattgatggctatataacgtgtgacaatgagctttcacccgaaagggagcactccaatatggcaattgacctcacctcaagcacacccaatggacagcatgcctcaccaagtcacatgacaagcacaaattcagtaaagctagaaatgcagagtgatgaagagtgtgacaggaaacccctgagccgtgaagatgagatcaggggccatgatgagggtagcagcctagaagaacccctaattgagagcagcgaggtggctgacaacaggaaagtccaggagcttcaaggcgagggaggaatccggcttccgaatggtaaactgaaatgtgacgtctgtggcatggtttgcattgggcccaatgtgcttatggtacataaaaggagtcacactggtgaacgccccttccactgtaaccagtgtggagcttcttttactcagaagggcaaccttctgagacacataaagttacactctggagagaagccgttcaaatgtcctttctgtagctacgcctgtagaagaagggacgccctcacaggacacctcaggacccattctgtgggtaaacctcacaagtgcaactactgtggacgaagctacaagcagcgcagttcactggaggagcacaaggaacgctgccacaactatctccagaatgtcagcatggaggctgctgggcaggtcatgagtcaccatgatagttagagctgattccacattagtctgtaggctgcctaaaagaatgaattggttatttgaatattttcatctcagatcgggtaacacggagaaaatttgcaacaatatagaagacatctgttgtttttgcctgcctgacatcccttcctccttctcttgataacaagagtgcccatttacctttagagaactttccttacctcctatggaagattgtaaggaacaagagcctattatggacaacaatatttctctggtgccttttgagagacctgctgtcatagagaagctcacggggaatatgggaaaacgtaaaagctccactccacaaaagtttgtgggggaaaagctcatgcgattcagctacccagatattcactttgatatgaacttaacatatgagaaggaggctgagctgatgcagtctcatatgatggaccaagccatcaacaatgcaatcacctaccttggagctgaggcccttcaccctctgatgcagcacccgccaagcacaatcgctgaagtggccccagttataagctcagcttattctcaggtctatcatccaaataggatagaaagacccattagcagggaaactgctgatagtcatgaaaacaacatggatggccccatctctctcatcagaccaaagagtcgaccccaggaaagagaggcctctcccagcaatagctgcctggattccactgactcagaaagcagccatgatgaccaccagtcctaccaaggacaccctgccttaaatcccaagaggaaacaaagcccagcttacatgaaggaggatgtcaaagctttggatactaccaaggctcctaagggctctctgaaggacatctacaaggtcttcaatggagaaggagaacagattagggccttcaagtgtgagcactgccgagtccttttcctagaccatgtcatgtacaccattcacatgggttgccatggctaccgggacccactggaatgcaacatctgtggctacagaagccaggaccgttatgagttttcatcacacattgttcgaggggagcacacattccactag

SEQ ID NO: 299718 - protein, 452 aa, Artificial Sequence
  derived and/or modified sequence
METEAIDGYITCDNELSPEREHSNMAIDLTSSTPNGQHASPSHMTSTNSVKLEMQSDEECDRKPLSREDEIRGHDEGSSLEEPLIESSEVADNRKVQELQGEGGIRLPNGERPFHCNQCGASFTQKGNLLRHIKLHSGEKPFKCPFCSYACRRRDALTGHLRTHSVGKPHKCNYCGRSYKQRSSLEEHKERCHNYLQNVSMEAAGQVMSHHGEKLMRFSYPDIHFDMNLTYEKEAELMQSHMMDQAINNAITYLGAEALHPLMQHPPSTIAEVAPVISSAYSQVYHPNRIERPISRETADSHENNMDGPISLIRPKSRPQEREASPSNSCLDSTDSESSHDDHQSYQGHPALNPKRKQSPAYMKEDVKALDTTKAPKGSLKDIYKVFNGEGEQIRAFKCEHCRVLFLDHVMYTIHMGCHGYRDPLECNICGYRSQDRYEFSSHIVRGEHTFH

SEQ ID NO: 299719 - protein, 126 aa, Artificial Sequence
  derived and/or modified sequence
MHCTLTMETEAIDGYITCDNELSPEREHSNMAIDLTSSTPNGQHASPSHMTSTNSVKLEMQSDEECDRKPLSREDEIRGHDEGSSLEEPLIESSEVADNRKVQELQGEGGIRLPNGERPFHCNQCG

SEQ ID NO: 299720 - DNA, 567 bp, Artificial Sequence
  derived and/or modified sequence
gacatgaatgtctttctcagtctattccccaggacccctcttatcccgcttcaggtcccggtcaatgcggtgcgctttccgaaatggggccgcagagttgccggcggagaccagtaggtgggaggctccacgcacactccccgactcggccgggacgcggctcccggactccgcgcagggcgccaagatcgccgccccgctcccttcccccggcctccccaccaatcccagtttgaaagaaaacttcacgcggccgaaatgaacgtcacctcaccgctccaagcctccagccggcagaaaaccattgcactttgactatggaaacagaggctattgatggctatataacgtgtgacaatgagctttcacccgaaagggagcactccaatatggcaattgacctcacctcaagcacacccaatggacagcatgcctcaccaagtcacatgacaagcacaaattcagtaaagctagaaatgcagagtgatgaagagtgtgacaggaaacccctgagccgtgaagatgagatcaggggccatgatgagggtagcagcctagaagaacccc

SEQ ID NO: 299721 - DNA, 693 bp, Artificial Sequence
  derived and/or modified sequence
atggaaacagaggctattgatggctatataacgtgtgacaatgagctttcacccgaaagggagcactccaatatggcaattgacctcacctcaagcacacccaatggacagcatgcctcaccaagtcacatgacaagcacaatcgctgaagtggccccagttataagctcagcttattctcaggtctatcatccaaataggatagaaagacccattagcagggaaactgctgatagtcatgaaaacaacatggatggccccatctctctcatcagaccaaagagtcgaccccaggaaagagaggcctctcccagcaatagctgcctggattccactgactcagaaagcagccatgatgaccaccagtcctaccaaggacaccctgccttaaatcccaagaggaaacaaagcccagcttacatgaaggaggatgtcaaagctttggatactaccaaggctcctaagggctctctgaaggacatctacaaggtcttcaatggagaaggagaacagattagggccttcaagtgtgagcactgccgagtccttttcctagaccatgtcatgtacaccattcacatgggttgccatggctaccgggacccactggaatgcaacatctgtggctacagaagccaggaccgttatgagttttcatcacacattgttcgaggggagcacacattccactag

SEQ ID NO: 299722 - DNA, 1359 bp, Artificial Sequence
  derived and/or modified sequence
atggaaactgaagcaattgacgggtacattacctgcgataatgaactgtcacccgagagagaacattctaatatggctatagatctcacctccagtacgcccaacgggcaacacgcttcgccatcacacatgactagtaccaattccgtcaaactagagatgcagtctgacgaagaatgcgaccgcaagccactttccagggaggatgaaatacgcggccacgatgagggcagctctttagaagaacctctcatcgagagcagtgaggtagctgataatagaaaggtgcaggagctgcagggagaagggggaattcgccttccaaacggcgagaggccgttccattgcaatcagtgcggggcctccttcacgcagaaggggaatctactccggcacataaagctgcattctggggagaagccattcaagtgtcccttctgcagttacgcatgtcgaagacgggacgccctgaccgggcacctcagaactcacagcgtgggaaaaccccacaaatgcaattactgcgggaggagctataagcagaggtcttccctcgaggaacacaaagagagatgccataactacctgcagaacgtgtccatggaagccgccggccaggtgatgtcacatcacggggaaaagcttatgcgattctcgtacccagacatccacttcgacatgaatctcacctatgagaaagaggcggagctcatgcagagccacatgatggaccaagcaatcaataacgccattacatacctcggagctgaggcattacacccactcatgcagcatcctcctagtacaattgcagaagtggctcccgtcattagctccgcatatagccaggtgtatcatcctaatagaattgagagacccatatcaagagaaaccgctgactcccacgaaaacaacatggatggccccatttctctgatcaggcccaaatcacggccccaggagagggaagcttcaccctctaacagttgtctcgacagcacagatagtgagtcaagccatgacgatcaccagtcatatcaaggtcatccagcgttgaatccaaagcgaaagcagtctccggcttacatgaaggaggacgtgaaagcccttgacactacgaaggcacccaaggggtctctaaaagatatatacaaagtgttcaatggcgagggagagcagattcgtgcttttaagtgtgagcactgccgcgtactctttttggaccatgtgatgtacacgatccatatgggctgtcatggctatcgggaccccctggaatgcaacatctgcgggtatcgctcacaggaccggtatgaattctcatctcatattgtcaggggcgagcacacgttccattag

SEQ ID NO: 299723 - DNA, 381 bp, Artificial Sequence
  derived and/or modified sequence
atgcactgtaccctaacaatggagacggaagctatcgacggctatataacctgtgataacgagttgtcccctgagcgcgagcatagcaacatggccatcgacctcacaagtagcacacctaatggtcagcacgctagccccagccacatgacttccacgaactccgtgaagcttgaaatgcaaagcgatgaggaatgcgatagaaagccactctcacgcgaggacgaaatacgaggacatgatgaagggtccagcctcgaggagcccctgattgaaagttctgaggtggcagataatcgaaaagtgcaggagttgcagggcgaaggcggtattagactgcccaatggcgagcgtccttttcattgtaatcagtgtggatag

SEQ ID NO: 299724 - DNA, 252 bp, Artificial Sequence
  derived and/or modified sequence
atggagacagaagcaattgatggctacattacctgcgataacgaactttccccagagagagaacacagtaacatggctatcgacctcacttcgtctactccaaacggacagcacgccagtccctctcacatgaccagtaccaactctgtcaagttagagatgcagagcgatgaggagtgtgacaggaaaccactatcacgtgaagatgagatacggggccatgatgaaggttccagtttggaggagccgtag

SEQ ID NO: 299725 - DNA, 693 bp, Artificial Sequence
  derived and/or modified sequence
atggagaccgaggccatcgacggatacatcacctgtgataatgagttaagtccagaacgcgagcactctaatatggcaattgatcttacctctagcacaccaaatgggcaacatgcttctccctcacatatgacttctacgatagccgaagtcgcgccagtgatatcatctgcttattcgcaagtgtaccaccctaacagaatcgaacgcccaatcagtagggaaactgcagattctcatgagaataacatggatggtcctatttctcttatcaggccaaagagcaggccccaagagagggaggcatctcctagcaatagttgtcttgattcgacagatagtgaaagtagtcacgacgatcaccaaagctatcagggtcacccagcactgaacccaaaaaggaaacaaagccccgcttatatgaaagaggatgtcaaggctctggacacaacaaaggcccctaaaggcagtcttaaggacatctacaaggtctttaacggtgaaggcgagcagatacgggcgttcaaatgtgaacactgcagggtgctttttcttgatcacgtaatgtacacgatccacatgggctgccacggctacagagacccgctggagtgtaacatctgcgggtacagaagtcaggatcgttatgaattcagcagccacatcgtaaggggtgaacatactttccactag

SEQ ID NO: 299726 - DNA, 1359 bp, Artificial Sequence
  derived and/or modified sequence
atggagacagaggccattgatggctacatcacctgtgacaatgagctgagccctgagcgggagcacagcaacatggccatcgacctgaccagcagcaccccaaatggccagcacgccagccccagccacatgaccagcaccaacagcgtgaagctggagatgcagagtgatgaagaatgtgacaggaagcccctgagccgggaggatgagatccggggccatgatgagggcagcagcctggaggagcccctgattgagagcagcgaggtggccgacaacaggaaggtgcaggagctgcagggcgagggcggcatccggctgcccaatggagagcggcccttccactgcaaccagtgtggggccagcttcacccagaagggcaacctgctgcggcacatcaagctgcacagcggggagaagcccttcaagtgccccttctgcagctatgcctgcagaagaagagatgccctgaccggccacctgcggacccacagcgtgggcaagccccacaagtgcaactactgcggccgcagctacaagcagaggagcagcctggaggagcacaaggagcgctgccacaactacctgcagaatgtgtccatggaggccgccggccaggtgatgagccaccacggggagaagctgatgaggttctcctacccagacatccactttgacatgaacctgacctatgagaaggaggccgagctgatgcagagccacatgatggaccaggccatcaacaatgccatcacctacctgggcgctgaggccctgcaccccctgatgcagcacccccccagcaccatcgccgaggtggcccctgtgatcagcagcgcctacagccaggtgtaccaccccaaccgcatcgagcggcccatcagccgggagacagctgacagccatgagaacaacatggatggccccatcagcctcatccggcccaagagccggccccaggagcgggaggccagccccagcaacagctgcctggacagcacagacagcgagagcagccatgatgaccaccagagctaccagggccacccagccctgaaccccaagaggaagcagagccctgcctacatgaaggaggatgtgaaggccctggacaccaccaaggcccccaagggcagcctgaaggacatctacaaggtgttcaacggggagggggagcagatccgggccttcaagtgtgagcactgccgggtgctcttcctggaccacgtgatgtacaccatccacatgggctgccacggctacagagaccccctggagtgcaacatctgtggctaccgcagccaggacagatatgagttcagcagccacatcgtgcggggggagcacaccttccactag

SEQ ID NO: 299727 - DNA, 381 bp, Artificial Sequence
  derived and/or modified sequence
atgcactgcaccctgaccatggagacagaggccattgatggctacatcacctgtgacaatgagctgagccctgagcgggagcacagcaacatggccatcgacctgaccagcagcaccccaaatggccagcacgccagccccagccacatgaccagcaccaacagcgtgaagctggagatgcagagtgatgaagaatgtgacaggaagcccctgagccgggaggatgagatccggggccatgatgagggcagcagcctggaggagcccctgattgagagcagcgaggtggccgacaacaggaaggtgcaggagctgcagggcgagggcggcatccggctgcccaatggagagcggcccttccactgcaaccagtgtggctag

SEQ ID NO: 299728 - DNA, 252 bp, Artificial Sequence
  derived and/or modified sequence
atggagacagaggccattgatggctacatcacctgtgacaatgagctgagccctgagcgggagcacagcaacatggccatcgacctgaccagcagcaccccaaatggccagcacgccagccccagccacatgaccagcaccaacagcgtgaagctggagatgcagagtgatgaagaatgtgacaggaagcccctgagccgggaggatgagatccggggccatgatgagggcagcagcctggaggagccctag

SEQ ID NO: 299729 - DNA, 693 bp, Artificial Sequence
  derived and/or modified sequence
atggagacagaggccattgatggctacatcacctgtgacaatgagctgagccctgagcgggagcacagcaacatggccatcgacctgaccagcagcaccccaaatggccagcacgccagccccagccacatgaccagcaccatcgccgaggtggcccctgtgatcagcagcgcctacagccaggtgtaccaccccaaccgcatcgagcggcccatcagccgggagacagctgacagccatgagaacaacatggatggccccatcagcctcatccggcccaagagccggccccaggagcgggaggccagccccagcaacagctgcctggacagcacagacagcgagagcagccatgatgaccaccagagctaccagggccacccagccctgaaccccaagaggaagcagagccctgcctacatgaaggaggatgtgaaggccctggacaccaccaaggcccccaagggcagcctgaaggacatctacaaggtgttcaacggggagggggagcagatccgggccttcaagtgtgagcactgccgggtgctcttcctggaccacgtgatgtacaccatccacatgggctgccacggctacagagaccccctggagtgcaacatctgtggctaccgcagccaggacagatatgagttcagcagccacatcgtgcggggggagcacaccttccactag

SEQ ID NO: 299730 - DNA, 1359 bp, Artificial Sequence
  derived and/or modified sequence
atggagaccgaggccatcgacggctacatcacctgcgacaacgagctgagccccgaacgagaacattcaaacatggctattgacttgacctcaagcactcccaatggccaacatgccagccctagtcacatgacatctaccaacagcgttaagctcgaaatgcagtctgatgaagagtgcgataggaaacccttgtcccgagaggacgagataaggggccacgatgaggggagttcactggaggagcccctgatagaaagttctgaagtcgcggataaccggaaggtacaagaactgcagggcgaaggcggcatacgactgcctaacggcgagagaccattccattgtaaccagtgcggggcttctttcacccagaagggcaacctgctcagacatattaagttgcattccggcgaaaaaccttttaagtgccctttttgttcgtacgcctgcagacgtcgtgacgcactcacaggccacctgcgaacccatagcgtgggcaaaccgcataagtgcaactattgtggacgatcttacaagcaaaggtcctcccttgaggagcataaggaacggtgtcacaattatcttcagaatgtgtctatggaagccgccggtcaagttatgagccaccatggcgaaaaattgatgaggttttcctatccagacattcactttgatatgaaccttacctatgagaaagaggcagagttgatgcaatcccacatgatggaccaagccatcaataacgctattacctatctgggagctgaggcgctacaccctctgatgcagcaccccccttcaactattgcggaggtggccccagtgattagtagtgcctattctcaggtctatcatcccaaccgcattgagaggcctatctctcgcgaaactgccgattcgcacgagaacaatatggacggtccaatctccctaatcaggcctaagtctaggcctcaagaaagggaggcatctcctagcaactcctgcctggacagtaccgacagcgagtcctcacacgacgatcaccagagttatcagggccatcctgccctgaaccccaagcgcaagcagtcccccgcctatatgaaggaggatgtcaaggccctggacaccaccaaggcgccaaaggggtccctcaaagatatatacaaagtatttaacggcgagggagaacagattagagcctttaaatgcgagcactgccgagttcttttcctggatcacgtcatgtacacaatccatatgggctgtcatggataccgagaccctctagaatgcaacatctgtggctacaggtcccaggataggtatgaatttagttcacacatcgtcaggggggagcacacttttcattag

SEQ ID NO: 299731 - DNA, 381 bp, Artificial Sequence
  derived and/or modified sequence
atgcactgcaccctgaccatggagaccgaggccatcgacggctacatcacctgcgataacgagttgtcaccagagagggagcactccaatatggctatagaccttaccagtagcacgcctaatggccagcacgcctccccatcccatatgacctctacgaattctgtgaaacttgagatgcaatctgacgaggaatgtgacaggaagccactttctagggaggacgagatccggggccatgacgaggggagttccctcgaagagccccttattgaatcatctgaagtggccgacaatcgcaaggtgcaggaactgcagggtgaaggagggattaggctcccaaacggggagcggccttttcattgcaatcagtgcggctag

SEQ ID NO: 299732 - DNA, 252 bp, Artificial Sequence
  derived and/or modified sequence
atggagaccgaggccatcgacggctacatcacctgcgacaacgagctgtcacccgagcgtgagcattctaatatggccatagacctcacgagtagtacgccaaatggccagcatgcctctcctagccacatgaccagcacaaacagtgtgaaactggaaatgcaaagtgatgaagagtgcgacagaaaaccactgagccgggaggatgaaatacgtggccatgatgaaggcagctcacttgaagagccctag

SEQ ID NO: 299733 - DNA, 693 bp, Artificial Sequence
  derived and/or modified sequence
atggagaccgaggccatcgacggctacatcacctgcgacaacgagctgagccccgagagagaacatagcaacatggccatcgaccttacctcttcaacacccaatggacagcacgcgtcaccgtctcacatgaccagtaccatagcggaggttgctcccgttatcagctctgcatatagtcaagtgtatcaccccaataggatagagcggccaatcagccgggagaccgcagacagccacgaaaacaatatggacggaccaatcagtttaatcagacctaaaagtagaccccaggagcgtgaagcatcaccctccaacagctgtctggacagcacagactctgagtcgagtcacgatgaccatcaatcttatcagggtcatcctgccctcaacccaaaacgtaagcagtcccccgcgtacatgaaagaagacgttaaagcgttagataccacaaaggccccaaaggggagtctcaaggacatatacaaagtatttaatggcgagggggaacagatccgagcctttaagtgtgagcactgtagagtgttgtttcttgatcatgtgatgtataccatccacatgggctgccacggctatcgtgacccattggagtgcaacatctgcgggtatcgcagccaagacagatacgagttttccagtcacatcgtccgcggagagcacacattccattag

SEQ ID NO: 299734 - DNA, 1359 bp, Artificial Sequence
  derived and/or modified sequence
atggagaccgaagctattgacggttatattacttgcgacaacgaactatctcccgagagggagcattcgaacatggctattgatctgacatccagtacccccaacggacagcacgctagtccctcccatatgacgagcacaaacagcgtcaaattagaaatgcagtctgatgaggaatgcgacaggaaacccctgtcacgggaggacgagatacgcggacacgatgagggtagtagtcttgaagaaccactgatagagtcttccgaagtcgcggacaatcggaaggtgcaggagttgcagggggaagggggtattaggctacccaatggcgaaagaccattccattgtaaccaatgcggcgcaagcttcactcagaagggcaacctcttaaggcatatcaagctgcactcaggcgagaagccatttaaatgcccgttctgttcttacgcttgtcgacgcagagatgctctcaccggccacctccgcacacattctgtcgggaagccacataagtgtaattattgcggaaggtcttacaaacagcgtagttccctggaagaacacaaggaaaggtgtcataattatcttcaaaatgtgtcaatggaggcagctggccaagtcatgtcgcaccatggtgagaaacttatgcgcttcagctaccccgacatccattttgacatgaacctcacatacgaaaaggaggcagaattaatgcagtcccacatgatggaccaggcgatcaataatgccataacctacctgggggctgaggctctgcaccccttaatgcagcacccgccatccactattgccgaggttgcccctgtcatatcctcagcctattcccaggtgtatcatcctaatcgaattgaacgacccatatcccgggaaacagcagacagccacgaaaacaacatggacggccctatcagtttgattcggcctaagtctcgtcctcaggaacgcgaggcaagtccctcgaattcttgtctcgactctaccgattccgaaagttcacatgacgaccaccaaagctatcagggccatcccgcactgaatcccaaacggaaacagtcccctgcttatatgaaggaggatgtaaaggccttagacaccacgaaagcacctaaggggtcactcaaagatatttacaaagtgttcaatggcgaaggtgaacagatccgggcattcaagtgtgaacactgtcgtgtcctgtttcttgaccacgtaatgtatacgattcatatgggctgtcatgggtaccgcgatcccctggaatgcaacatttgcggctatcgctcacaggatcggtacgagttctctagccatattgtccgaggtgaacatacttttcactag

SEQ ID NO: 299735 - DNA, 381 bp, Artificial Sequence
  derived and/or modified sequence
atgcactgtacactgactatggagaccgaagctatagacgggtacataacttgcgataatgaactgtcacccgagcgtgagcattccaatatggctatcgaccttacctctagcacgcctaacggtcaacatgcctccccctcccatatgacctctacaaattcggtgaaactcgagatgcagtccgatgaggagtgtgatcgcaaacccctgagccgcgaagacgagatcagaggacatgacgaaggaagtagtctggaggagcccctgatcgagagctcggaggtcgccgataaccgtaaggtgcaggaactccaaggggaaggtggcatcagactccccaacggtgaacgaccgttccattgcaaccagtgcgggtag

SEQ ID NO: 299736 - DNA, 252 bp, Artificial Sequence
  derived and/or modified sequence
atggagacagaagctatcgacggctacatcacctgtgataacgaactcagcccggagagagaacatagcaacatggctatagacctcacttccagcactccaaacgggcaacatgctagtcccagtcacatgactagtactaattcagtgaaacttgagatgcagtctgacgaagaatgcgaccggaaacctctgtcccgtgaagacgagatcagggggcacgacgaaggttcgagcctggaggagccctag

SEQ ID NO: 299737 - DNA, 693 bp, Artificial Sequence
  derived and/or modified sequence
atggagacggaggctatcgacggttatatcacttgtgataacgagctttcacctgaaagagaacactcaaacatggccatcgacctcacatctagcacaccgaatggccagcatgctagtccaagccacatgacctctaccattgccgaggtcgccccagttatatcttccgcttactcccaagtgtaccacccaaataggattgagcgacccatttccagggaaactgctgattcacatgaaaacaacatggacggtccgatatctctaatacgaccaaagtctcgaccccaggagcgagaggccagtccatccaattcatgtctcgacagcactgacagcgagtcctcccacgacgaccatcagtcataccagggccatcccgctctgaatccaaaaagaaagcagagtccagcctacatgaaagaagacgtcaaggcgctagatacaaccaaagcacctaagggctctctcaaggatatctacaaagtgtttaatggggagggggagcagatcagagcgttcaagtgtgagcactgtagagtcctctttcttgatcacgttatgtacacaatccatatggggtgccacggctaccgtgacccactggagtgcaatatctgtggctatcggtcccaggaccgctacgagttctcatcccacatagtcagaggcgaacacacatttcattag

SEQ ID NO: 299738 - DNA, 1359 bp, Artificial Sequence
  derived and/or modified sequence
atggagaccgaggccatcgacggctacatcacctgcgacaacgagctgagccccgagagagagcacagcaacatggccatcgacctgaccagcagcacccccaacggccagcacgccagccccagccacatgaccagcaccaacagcgtgaagctggagatgcagagcgacgaggagtgcgacagaaagcccctgagcagagaggacgagatcagaggccacgacgagggcagcagcctggaggagcccctgatcgagagcagcgaggtggccgacaacagaaaggtgcaggagctgcagggcgagggcggcatcagactgcccaacggcgagagacccttccactgcaaccagtgcggcgccagcttcacccagaagggcaacctgctgagacacatcaagctgcacagcggcgagaagcccttcaagtgccccttctgcagctacgcctgcagaagaagagacgccctgaccggccacctgagaacccacagcgtgggcaagccccacaagtgcaactactgcggcagaagctacaagcagagaagcagcctggaggagcacaaggagagatgccacaactacctgcagaacgtgagcatggaggccgccggccaggtgatgagccaccacggcgagaagctgatgagattcagctaccccgacatccacttcgacatgaacctgacctacgagaaggaggccgagctgatgcagagccacatgatggaccaggccatcaacaacgccatcacctacctgggcgccgaggccctgcaccccctgatgcagcacccccccagcaccatcgccgaggtggcccccgtgatcagcagcgcctacagccaggtgtaccaccccaacagaatcgagagacccatcagcagagagaccgccgacagccacgagaacaacatggacggccccatcagcctgatcagacccaagagcagaccccaggagagagaggccagccccagcaacagctgcctggacagcaccgacagcgagagcagccacgacgaccaccagagctaccagggccaccccgccctgaaccccaagagaaagcagagccccgcctacatgaaggaggacgtgaaggccctggacaccaccaaggcccccaagggcagcctgaaggacatctacaaggtgttcaacggcgagggcgagcagatcagagccttcaagtgcgagcactgcagagtgctgttcctggaccacgtgatgtacaccatccacatgggctgccacggctacagagaccccctggagtgcaacatctgcggctacagaagccaggacagatacgagttcagcagccacatcgtgagaggcgagcacaccttccactag

SEQ ID NO: 299739 - DNA, 381 bp, Artificial Sequence
  derived and/or modified sequence
atgcactgcaccctgaccatggagaccgaggccatcgacggctacatcacctgcgacaacgagctgagccccgagagagagcacagcaacatggccatcgacctgaccagcagcacccccaacggccagcacgccagccccagccacatgaccagcaccaacagcgtgaagctggagatgcagagcgacgaggagtgcgacagaaagcccctgagcagagaggacgagatcagaggccacgacgagggcagcagcctggaggagcccctgatcgagagcagcgaggtggccgacaacagaaaggtgcaggagctgcagggcgagggcggcatcagactgcccaacggcgagagacccttccactgcaaccagtgcggctag

SEQ ID NO: 299740 - DNA, 252 bp, Artificial Sequence
  derived and/or modified sequence
atggagaccgaggccatcgacggctacatcacctgcgacaacgagctgagccccgagagagagcacagcaacatggccatcgacctgaccagcagcacccccaacggccagcacgccagccccagccacatgaccagcaccaacagcgtgaagctggagatgcagagcgacgaggagtgcgacagaaagcccctgagcagagaggacgagatcagaggccacgacgagggcagcagcctggaggagccctag

SEQ ID NO: 299741 - DNA, 693 bp, Artificial Sequence
  derived and/or modified sequence
atggagaccgaggccatcgacggctacatcacctgcgacaacgagctgagccccgagagagagcacagcaacatggccatcgacctgaccagcagcacccccaacggccagcacgccagccccagccacatgaccagcaccatcgccgaggtggcccccgtgatcagcagcgcctacagccaggtgtaccaccccaacagaatcgagagacccatcagcagagagaccgccgacagccacgagaacaacatggacggccccatcagcctgatcagacccaagagcagaccccaggagagagaggccagccccagcaacagctgcctggacagcaccgacagcgagagcagccacgacgaccaccagagctaccagggccaccccgccctgaaccccaagagaaagcagagccccgcctacatgaaggaggacgtgaaggccctggacaccaccaaggcccccaagggcagcctgaaggacatctacaaggtgttcaacggcgagggcgagcagatcagagccttcaagtgcgagcactgcagagtgctgttcctggaccacgtgatgtacaccatccacatgggctgccacggctacagagaccccctggagtgcaacatctgcggctacagaagccaggacagatacgagttcagcagccacatcgtgagaggcgagcacaccttccactag

SEQ ID NO: 299742 - DNA, 1359 bp, Artificial Sequence
  derived and/or modified sequence
atggaaacagaggctattgatggctatataacgtgtgacaatgagctttcacccgaaagggagcactccaatatggcaattgacctcacctcaagcacacccaatggacagcatgcctcaccaagtcacatgacaagcacaaattcagtaaagctagaaatgcagagtgatgaagagtgtgacaggaaacccctgagccgtgaagatgagatcaggggccatgatgagggtagcagcctagaagaacccctaattgagagcagcgaggtggctgacaacaggaaagtccaggagcttcaaggcgagggaggaatccggcttccgaatggtgaacgccccttccactgtaaccagtgtggagcttcttttactcagaagggcaaccttctgagacacataaagttacactctggagagaagccgttcaaatgtcctttctgtagctacgcctgtagaagaagggacgccctcacaggacacctcaggacccattctgtgggtaaacctcacaagtgcaactactgtggacgaagctacaagcagcgcagttcactggaggagcacaaggaacgctgccacaactatctccagaatgtcagcatggaggctgctgggcaggtcatgagtcaccatggggaaaagctcatgcgattcagctacccagatattcactttgatatgaacttaacatatgagaaggaggctgagctgatgcagtctcatatgatggaccaagccatcaacaatgcaatcacctaccttggagctgaggcccttcaccctctgatgcagcacccgccaagcacaatcgctgaagtggccccagttataagctcagcttattctcaggtctatcatccaaataggatagaaagacccattagcagggaaactgctgatagtcatgaaaacaacatggatggccccatctctctcatcagaccaaagagtcgaccccaggaaagagaggcctctcccagcaatagctgcctggattccactgactcagaaagcagccatgatgaccaccagtcctaccaaggacaccctgccttaaatcccaagaggaaacaaagcccagcttacatgaaggaggatgtcaaagctttggatactaccaaggctcctaagggctctctgaaggacatctacaaggtcttcaatggagaaggagaacagattagggccttcaagtgtgagcactgccgagtccttttcctagaccatgtcatgtacaccattcacatgggttgccatggctaccgggacccactggaatgcaacatctgtggctacagaagccaggaccgttatgagttttcatcacacattgttcgaggggagcacacattccactag

SEQ ID NO: 299743 - DNA, 602 bp, Artificial Sequence
  derived and/or modified sequence
gtttgctggatttgggcttggaatgacccacctgtaaagtgcttttccttcctcctccccttgaactctgcagggggcttggcttggagggggcaagggagggaaagagagaagggggaaacacaaaaaacttctttctttctccctccgtttatcttcagcccgacattgtcacctcctctttgaggggttagaagaagctgagatctcccgacagagctggaaatgcattgcactttgactatggaaacagaggctattgatggctatataacgtgtgacaatgagctttcacccgaaagggagcactccaatatggcaattgacctcacctcaagcacacccaatggacagcatgcctcaccaagtcacatgacaagcacaaattcagtaaagctagaaatgcagagtgatgaagagtgtgacaggaaacccctgagccgtgaagatgagatcaggggccatgatgagggtagcagcctagaagaacccctaattgagagcagcgaggtggctgacaacaggaaagtccaggagcttcaaggcgagggaggaatccggcttccgaatggtgaacgccccttccactgtaaccagtgtgg

SEQ ID NO: 299744 - protein, 935 aa, Artificial Sequence
  derived and/or modified sequence
MFSLISGIFTSGTWEEKSDEISFADFKFSVTHHYLVQESTDKEGKDELLEDVVPQSMQDLLGMNNDFPPRAHCLVRWYGLREFVVIAPAAHSDAVLSESKCNLLLSSVSIALGNTGCQVPLFVQIHHKWRRMYVGECQGPGVRTDFEMVHLRKVPNQYTHLSGLLDIFKSKIGCPLTPLPPVSIAIRFTYVLQDWQQYFWPQQPPDIDALVGGEVGGLEFGKLPFGACEDPISELHLATTWPHLTEGIIVDNDVYSDLDPIQAPHWSVRVRKAENPQCLLGDFVTEFFKICRRKESTDEILGRSAFEEEGKETADITHALSKLTEPASVPIHKLSVSNMVHTAKKKIRKHRGVEESPLNNDVLNTILLFLFPDAVSEKPLDGTTSTDNNNPPSESEDYNLYNQFKSAPSDSLTYKLALCLCMINFYHGGLKGVAHLWQEFVLEMRFRWENNFLIPGLASGPPDLRCCLLHQKLQMLNCCIERKKARDEGKKTSASDVTNIYPGDAGKAGDQLVPDNLKETDKEKGEVGKSWDSWSDSEEEFFECLSDTEELKGNGQESGKKGGPKEMANLRPEGRLYQHGKLTLLHNGEPLYIPVTQEPAPMTEDLLEEQSEVLAKLGTSAEGAHLRARMQSACLLSDMESFKAANPGCSLEDFVRWYSPRDYIEEEVIDEKGNVVLKGELSARMKIPSNMWVEAWETAKPIPARRQRRLFDDTREAEKVLHYLAIQKPADLARHLLPCVIHAAVLKVKEEESLENISSVKKIIKQIISHSSKVLHFPNPEDKKLEEIIHQITNVEALIARARSLKAKFGTEKCEQEEEKEDLERFVSCLLEQPEVLVTGAGRGHAGRIIHKLFVNAQRAAAMTPPEEELKRMGSPEERRQNSVSDFPPPAGREFILRTTVPRPAPYSKALPQRMYSVLTKEDFRLAVKIIDGDV

SEQ ID NO: 299745 - DNA, 2808 bp, Artificial Sequence
  derived and/or modified sequence
atgttttcccttattagcggaatattcacgtcaggcacttgggaggaaaagtccgacgaaatctcatttgccgattttaagttctccgtgacacaccactatctggtacaggaatcaacggataaggagggcaaggatgagttgctggaggacgtggttccccagtcaatgcaggatctgctgggaatgaataatgacttcccaccacgtgcacactgtctggtgcgctggtatggcctcagagagttcgtagtgatagcgcctgccgctcacagtgatgccgtgttgagcgagagtaaatgcaatctcctgctttcctccgtaagtatcgcccttggcaacactgggtgccaggtgccactgtttgtccagatacatcacaagtggcgtcgtatgtacgtgggtgagtgccagggccccggtgtgcgaaccgatttcgaaatggttcacctgcggaaagtgcccaatcaatatacgcacttatctgggcttttggacatctttaagagcaagattggctgccccctgacacccctcccacctgtctcaatagctattcgtttcacatacgtgcttcaggattggcaacagtatttctggccacaacagccacctgacatcgatgcactggtgggtggcgaagtgggtggtctcgaattcgggaagctgccctttggggcttgtgaagacccaatcagcgagttgcatctcgctacgacatggccccatctaacagagggaattattgtagataacgatgtttattcagacctggatccaatccaggccccgcactggtcggtgagagtgcgcaaggcagaaaatccacagtgtctcctgggtgacttcgtcactgaatttttcaagatatgtcggcgcaaagaaagtacagatgagatacttggtagatccgccttcgaggaagagggaaaagagaccgcggacattacccacgccctgagcaagttaaccgaacccgcaagtgttcccatccacaagctgagcgtctccaacatggtccacacagccaagaaaaaaattcggaaacaccgtggcgtcgaggagtccccactgaataatgacgtgctgaacaccatactattatttctattcccagacgctgtgagcgaaaaaccactcgatggcacaaccagtaccgataataataacccaccttctgagagcgaagactataatctgtacaaccagtttaaaagcgccccttcggacagcttgacatacaaattggcgttgtgcttatgcatgatcaacttttaccacggaggactcaagggtgttgcacatctatggcaggagtttgttttagaaatgagattccgctgggaaaacaatttcctgatcccagggctcgcgtccggtccacctgatttaagatgctgtcttctgcaccagaaactgcaaatgctcaattgttgcatcgaaagaaaaaaggctcgagatgaggggaagaaaaccagcgcatccgacgttacaaacatatacccaggcgatgctggaaaggccggtgaccagctggtgccagacaacctcaaggaaacagacaaagagaagggggaagtaggaaagtcttgggactcttggagtgacagtgaagaagagtttttcgaatgtctgtccgacacagaagagctaaaaggaaatgggcaggaatctgggaagaaaggggggcctaaagagatggccaatctccggccagaaggtagactttaccagcacgggaaattgactctactgcacaacggagagcccctctacatccccgtgactcaggagccagctccaatgaccgaggatctcctggaggaacagagtgaagtattagctaagctcggcacatcggccgaaggagcccaccttagggcccgaatgcaaagtgcgtgcctgttgagcgacatggagtcctttaaggcagcgaaccctggttgcagcctcgaagattttgtgaggtggtactctcctcgggactatatcgaagaagaagtcatcgacgagaaaggtaacgtggtgctgaaaggcgaactgtctgcacggatgaaaatccccagcaatatgtgggtcgaagcatgggagaccgccaagcctatccctgcacggcgacagcgccgtctgtttgatgatacacgggaagccgaaaaggtcctgcactacctcgccattcagaagcccgccgacctagcacggcatctgttaccgtgcgtgattcacgccgcagttctaaaggtgaaagaggaagagagcctggaaaacatcagttctgtcaaaaagatcatcaaacaaatcatttctcattcctccaaggtcttgcacttccccaatccagaggacaagaaactggaagagattatacatcaaattacaaacgttgaagctctgatcgcaagggcccgttccttgaaggctaagttcggtacagaaaagtgtgaacaggaggaagaaaaagaagacctcgagaggttcgtgtcttgtctgctcgagcagcctgaggtgctggtgaccggagccggcagagggcacgccggccgaatcattcataaactattcgtgaatgcccagcgggccgcagctatgactccaccagaggaagagctgaaacgaatggggagccctgaagaacgtaggcagaactccgtgtccgacttccccccccccgccggaagggaatttatcttgcgcaccaccgtgcctcgtcccgctccttactcgaaggcgctaccacagcgcatgtactctgtgctgacaaaagaggacttcaggttggctgtgaagatcatagatggggatgtctag

SEQ ID NO: 299746 - DNA, 2808 bp, Artificial Sequence
  derived and/or modified sequence
atgttcagcctcatcagcggcatcttcaccagcggcacctgggaggagaagagtgatgagatcagctttgctgacttcaagttctctgtgacccaccactacctggtgcaggagagcacagacaaggagggcaaggatgagctgctggaggatgtggtgccccagagcatgcaggacctgctgggcatgaacaatgacttccccccccgggcccactgcctggtgcgctggtacggcctgcgggagtttgtggtgattgccccagctgcccacagtgatgctgtgctgtctgagagcaagtgcaacctgctgctgagctctgtgtccatcgccctgggcaacacaggctgccaggtgcccctgtttgtgcagatccaccacaagtggaggaggatgtatgtgggggagtgccagggccctggggtgaggacagactttgagatggtgcacctgaggaaggtgcccaaccagtacacccacctgagcggcctgctggacatcttcaagagcaagattggctgccccctgacccccctgccccctgtgtccatcgccatccgcttcacctacgtgctgcaggactggcagcagtacttctggccccagcagcccccagacattgatgccctggtgggcggggaggtgggcggcctggagtttgggaagctgccctttggagcctgtgaggaccccatcagcgagctgcacctggccaccacctggccccacctgacagagggcatcatcgtggacaatgatgtgtacagcgacctggaccccatccaggccccccactggagcgtgcgggtgaggaaggccgagaacccccagtgcctgctgggggactttgtgacagagttcttcaagatctgcaggaggaaggagagcacagatgagatcctgggccgcagcgcctttgaggaggagggcaaggagacagctgacatcacccacgccctgagcaagctgacagagcccgcctctgtgcccatccacaagctgtctgtgagcaacatggtgcacacagccaagaagaagatcaggaagcaccggggcgtggaggagagccccctgaacaatgatgtgctgaacaccatcctgctcttcctgttcccagatgctgtgtctgagaagcccctggatggcaccaccagcacagacaacaacaaccccccatctgagagcgaggactacaacctgtacaaccagttcaagagcgcccccagcgacagcctgacctacaagctggccctgtgcctgtgcatgatcaacttctaccatggaggcctgaagggcgtggcccacctgtggcaggagtttgtgctggagatgaggttccgctgggagaacaacttcctgatccctggcctggccagcggccccccagacctgcgctgctgcctgctgcaccagaagctgcagatgctgaactgctgcatcgagaggaagaaggccagagatgagggcaagaagaccagcgccagtgatgtgaccaacatctacccaggagatgctgggaaggccggggaccagctggtgcctgacaacctgaaggagacagacaaggagaagggggaggtgggcaagtcctgggacagctggagcgacagcgaggaggagttctttgaatgtctgagtgacacagaggagctgaagggaaatggccaggagagcggcaagaagggcggccccaaggagatggccaacctgcggcctgagggccgcctgtaccagcacggcaagctgaccctgctgcacaatggagagcccctgtacatccctgtgacccaggagcccgcccccatgacagaggacctgctggaggagcagagcgaggtgctggccaagctgggcaccagcgctgagggcgcccacctgcgggccaggatgcagagcgcctgcctgctgagtgacatggagagcttcaaggccgccaaccctggctgcagcctggaggactttgtgcgctggtacagcccccgggactacatcgaggaggaggtgattgatgagaagggaaatgtggtgctgaagggggagctgagcgccaggatgaagatccccagcaacatgtgggtggaggcctgggagacagccaagcccatcccagcccggcggcagaggcggctgtttgatgacacccgggaggccgagaaggtgctgcactacctggccatccagaagccagctgacctggcccggcacctgctgccctgtgtgattcatgctgctgtgctgaaggtgaaggaggaggagagcctggagaacatcagctctgtgaagaagatcatcaagcagatcatcagccacagcagcaaggtgctgcacttccccaaccctgaggacaagaagctggaggagatcatccaccagatcaccaacgtggaggccctgattgcccgggcccggagcctgaaggccaagtttggaacagagaagtgtgagcaggaggaggagaaggaggacctggagagatttgtgtcctgcctgctggagcagcctgaggtgctggtgactggagctggccggggccacgccggccgcatcatccacaagctgtttgtgaatgcccagagagctgctgccatgaccccacctgaggaggagctgaagaggatgggcagccctgaggagcggcggcagaacagcgtgtctgacttccccccacctgctggccgggagttcatcctgcggaccaccgtgcccaggcctgccccctacagcaaggccctgccccagaggatgtacagcgtgctgaccaaggaggacttccggctggccgtgaagatcattgatggagatgtgtag

SEQ ID NO: 299747 - DNA, 2808 bp, Artificial Sequence
  derived and/or modified sequence
atgttcagcctgatcagcggcatcttcaccagcggcacctgggaggagaagtctgacgagatcagcttcgcagactttaagtttagcgttacacaccattatctggtccaggaatctaccgacaaagagggcaaggacgagcttctggaggatgtcgtaccacagtccatgcaggatttgctgggaatgaataacgattttccccccagggcgcactgcctggtaagatggtacggactgagagaattcgtcgtgatcgccccagcagcccatagcgatgccgtgttgtccgaatcaaaatgcaacctgctgctctcatccgtaagcatcgccctgggaaacactggctgtcaagtccctttgtttgtccagattcatcacaaatggcgcaggatgtatgttggtgagtgccagggtcccggcgttagaaccgacttcgagatggtgcatctccgaaaagttccaaatcagtatacccatctgtcaggcctcctggacatatttaagtctaagatcggatgccctctcacccctctgccaccagtcagcatcgctatacggttcacctatgtcctccaggactggcagcagtacttttggcctcaacagccacctgatatcgatgcccttgtcgggggcgaggtcggtgggttagaatttggcaaactgcctttcggtgcttgtgaggaccccatctccgagcttcatttggccactacatggccccaccttaccgagggaatcatcgtcgacaacgacgtgtacagcgacctggacccgattcaagcgccgcattggtcagtcagagtccgtaaggcagaaaacccacaatgtcttttgggggacttcgttacggaatttttcaagatctgccggaggaaagaatccaccgacgaaattttaggccggtcagctttcgaggaggaaggtaaagagacagccgatattacccacgccctgtcaaagctgaccgagcctgcctctgttccaattcacaagctttccgtctccaacatggtgcatactgcaaagaaaaaaatccggaaacacagaggagtggaagagagtcccctgaacaacgatgtcttgaatactatcctcctatttctgtttcctgatgctgtaagcgagaagccattggacggaaccacctccacagataacaacaatcccccatcagagtcggaggactacaatctgtataaccagtttaagagcgcgcctagcgacagcctgacatataagctggccctttgcctttgtatgatcaacttttaccatgggggcttaaaaggcgtggcccatctgtggcaggagttcgtgttggagatgagatttagatgggagaacaattttttgatacctgggctggcctcgggccctccagacctccgttgttgtttgcttcaccagaagctgcagatgcttaattgttgtatcgagcggaagaaagcccgggacgagggcaaaaagacgtccgcctccgacgttaccaatatttatcccggcgacgctggcaaagccggggaccagctcgtgcctgataatctaaaagagaccgataaagagaagggcgaggtcgggaagtcttgggatagttggtcagactccgaagaggagttcttcgagtgcttatctgatacagaggagctgaaagggaatggacaagagtctggtaagaaagggggacccaaagaaatggccaaccttaggcccgaaggacgcctgtaccaacacgggaaacttacactcttgcacaacggtgagcctctctatatcccagtgactcaggagcccgctccgatgaccgaggatttgctcgaagagcagtccgaagtgctggcaaagctcggtacctcagctgagggtgctcacctcagggccagaatgcagtcggcgtgcctgctgtcagatatggagagtttcaaggccgcgaaccccggctgttctttggaggattttgtcaggtggtatagcccccgtgactacatcgaggaagaagtgattgatgagaaaggcaatgtggtgctgaagggcgaactgtccgctcgcatgaaaattccgtctaatatgtgggtggaggcatgggagacggctaagcccatccccgcaagaaggcagcgacgcctctttgacgacactcgggaggccgaaaaagtcctgcactacctggctatccagaaaccagctgatcttgcgagacacctgctgccatgcgtcattcatgccgccgttcttaaggtcaaagaggaagagagtctagaaaacatctcatcggtcaagaagatcattaagcaaatcattagccactcgtccaaagtgctgcatttcccgaaccccgaagacaagaagctagaggaaataattcaccagatcactaacgtcgaggcgctcattgcccgcgcccgctctctaaaagcaaagttcggaacagaaaagtgcgagcaggaagaagaaaaagaagatttagagagatttgtcagctgcttgctcgagcaacctgaagtcctcgtgactggagccggcagagggcatgccgggcgaataatccataagctattcgtaaatgcccagcgagcagccgctatgacacccccggaggaggaattaaagcgcatgggatcacctgaggaaagacggcagaatagcgtgtctgacttcccccctcccgccggtagagagttcatcctgaggacaactgtacctagacccgccccttatagcaaagccctgcctcagagaatgtactccgtgctcactaaggaagatttccgcctggctgtgaagattatcgatggggatgtctag

SEQ ID NO: 299748 - DNA, 2808 bp, Artificial Sequence
  derived and/or modified sequence
atgtttagcctcatatcaggcatctttacctccggtacttgggaggaaaaaagcgacgaaatctcctttgctgactttaagttctctgtgactcaccactaccttgttcaagaatccactgataaggagggcaaggatgagttacttgaggacgttgtgcctcaatccatgcaggatctgctaggaatgaacaacgattttccaccacgcgcacactgcttggtgaggtggtacggcctgcgtgagtttgtggtcatcgctcccgcagcacacagtgacgccgtgctttctgagtccaagtgtaacttgttgttgtcaagcgtctctatagccctgggtaacacagggtgtcaagtgccactcttcgtccagatccatcataagtggcgcagaatgtacgtaggcgagtgtcagggtccaggtgtgcgcacagatttcgaaatggttcatctcaggaaggtccccaatcagtacactcacttaagcggcctgctggatatattcaagtctaagatcggctgtccgctgacacctctgccacccgtctccattgccataagattcacctacgtcctccaagactggcagcagtatttttggcctcagcagccccctgatattgacgcgctcgtcggaggcgaagtgggcggacttgagtttggcaaacttcccttcggtgcatgtgaagatccaatctctgaattacacctggccactacatggccccacctcaccgaggggattattgtcgataacgatgtctactctgacctcgatcccatccaggctccccattggtcagtccgggttcggaaggctgagaaccctcagtgccttcttggcgactttgtgactgaattttttaaaatttgtaggaggaaggagtccacggatgagatactcgggcgttcagcatttgaggaggaggggaaggagaccgcggacattacacatgcccttagcaaactgaccgagcccgcatctgtgccaatccataaactgtctgtgtccaacatggttcacaccgcgaaaaagaaaataaggaaacaccgaggggtggaagagtctcccctgaataatgacgttctcaatactattctgttgtttctgttcccagatgccgtgtccgaaaagcctctcgatggcaccactagcacggacaacaataacccaccatctgagtctgaagattataacctgtataaccagtttaaaagtgcgccttccgactctctgacctataagctcgcactgtgtctctgcatgatcaacttctaccacggcggtctgaaaggcgtcgcccatctatggcaagaattcgtgttggagatgaggttccgttgggaaaacaacttcctgattccaggcctggcgagcgggcctccagatctccgttgttgtctcctccaccagaagttgcagatgctgaattgctgtatcgagcggaaaaaagctcgggacgaggggaagaaaacctctgcatccgacgtcaccaacatttatccaggcgacgccggtaaggccggtgaccagcttgttcccgataacttaaaggaaacggataaagaaaaaggtgaagttggaaaatcctgggactcctggtccgactcagaggaggaatttttcgagtgcctgtccgacactgaggagctaaaggggaacggtcaggagtcggggaagaagggaggccctaaagaaatggccaatctgcggccagagggcagactgtaccagcacgggaagctcaccctcctccataatggcgaacccctgtatatccccgtcacacaagaacctgctcccatgacagaagatctgttggaggaacaaagtgaagtcctggccaagttagggaccagcgcagagggcgctcacttgcgagccagaatgcagtcggcatgcctcctgagcgacatggaaagtttcaaagcagcaaatccaggctgtagccttgaggactttgtgagatggtactccccgagggactatatagaagaagaggtgatagatgaaaagggaaacgtagttctgaagggggagctatcagcaaggatgaaaattccctcaaacatgtgggttgaggcatgggagacagccaaacctattcctgctagacggcaaaggcgtctattcgatgatacaagggaagccgaaaaggtattgcactacctggccatccagaagccagctgaccttgccaggcatctcttgccatgtgtgattcacgccgctgtgctcaaagtcaaagaagaagaaagtctagagaatatcagtagcgtcaagaaaattatcaaacagattatctcccactcttcaaaggtgctgcacttcccaaatccagaagataagaagctcgaagaaattattcatcaaattacaaacgttgaggccctcatcgcacgggcacggtctctgaaggcgaaatttgggaccgaaaagtgcgaacaggaggaggagaaggaagacctggagcggttcgtgtcatgtctcttagagcaacccgaggtgctggtcactggagccggtcggggacacgcaggcagaattatacataaactttttgtcaatgcccagcgggcagcggctatgacaccaccagaggaggagctaaagcgtatgggcagtcctgaggagagaaggcagaactctgtttcggatttccctcccccagctggtcgggagtttatactgcgcaccaccgttccccgtccggcaccctattccaaggctcttccccaacgcatgtattcggtgctgacaaaggaggactttcggctggctgtgaagattatagacggggacgtgtag

SEQ ID NO: 299749 - DNA, 3717 bp, Artificial Sequence
  derived and/or modified sequence
ggcgctcctcaagatggctgccgacagtgagcccgaatccgaggtatttgagatcacggacttcaccactgcctcggaatgggaaaggtttatttccaaagttgaagaagtcttgaatgactggaaactgattggaaactctttgggaaagccactcgaaaagaacaacttttaacagttccatgtgtgcacattataccttgaaaaaaagtgttcacaacagcgaagacttgaaaccaacccaaatgtccatcaatgacagactggattaagaaaatgtggcacatataaaccatggaatactatgcagccataaaaaaggatgagttcatgtcctttgtagggacatggatgaagctggaaaccatcattctcagcactcttaacacgggaacagaaaaccaaatgctgcatgttctcactcataagtggtatatttacttctggcacatgggaagagaaatcagatgaaatttcctttgctgacttcaagttctcagtcactcatcattatcttgtacaagagtccactgataaagaaggaaaggatgagttattagaggatgttgttccacaatctatgcaagatttgctgggtatgaataatgactttcctccaagagcacattgcctggtaagatggtatgggctacgtgagttcgtggtgattgcccctgctgcacacagtgacgctgttctcagcgaatctaagtgcaaccttcttctgagttctgtttctattgccttgggaaacactggctgtcaggtgccactctttgtgcaaattcaccacaaatggcgaagaatgtatgtaggagaatgtcaaggtcctggtgtacgaactgatttcgaaatggttcatcttagaaaagtgccaaatcagtacactcacttatcaggtctgctggatatcttcaaatcaaagattggatgtcctttaactccattgcctccagttagtattgctattcgatttacctatgtacttcaagattggcagcagtatttttggcctcagcaacctccagacatagatgcccttgtaggaggagaagttggaggcttggagtttggcaagttaccatttggtgcctgcgaagatcctattagtgaactccatttagctactacatggcctcatctgaccgaagggatcattgtggataatgatgtttattctgatttggatcctattcaagctccacattggtctgttagagttcgaaaagctgagaatcctcagtgtttgctaggtgattttgtcactgaattttttaaaatttgccgtcgaaaggagtcaactgatgagattcttggacgatctgcatttgaggaagaaggcaaagaaactgctgatataactcatgctttgtcaaaattgacagagccggcatcagttccaattcataaattatcagtttcaaatatggtacacactgcaaagaagaaaatccgaaaacacagaggtgtagaggagtcaccgctaaataatgatgttcttaatactattctcctgttcttattccctgatgctgtttctgagaaaccattagatggaactacttcaacagataataataatcctccatcagagagtgaagactataatctctacaatcagttcaagtctgcaccatctgacagtttaacatacaaactggctttgtgtctctgtatgatcaatttttaccatggagggttgaaaggagtggcacacctctggcaggaatttgttcttgaaatgcgtttccgatgggaaaacaactttctgattccaggattagcaagtggacccccagatctgaggtgttgtttactgcatcagaaactacagatgttaaattgttgtattgaaagaaagaaggcacgtgatgaggggaaaaagacaagtgcttcagatgtcactaatatatatccaggggatgctggaaaagcaggagaccagttggtgccagataatctaaaagaaacagataaggaaaagggagaggtaggaaaatcttgggattcctggagtgacagcgaagaagaattttttgaatgcctaagtgatactgaagaacttaaaggaaatggacaagagagtggcaagaaaggaggacctaaggagatggcaaatttaaggccggaaggacggctctatcagcatgggaaacttacactgctgcataatggagaacctctctacattccagtaacccaggaaccagcacctatgacagaagatctgctagaagagcagtctgaagttttagctaaattaggtacatcggcagagggggctcaccttcgagcacgcatgcagagtgcctgtctgctctcagatatggagtcttttaaggcagctaatccaggttgctccctggaagattttgtgaggtggtattcaccccgggattatattgaagaggaggtgattgatgaaaagggcaatgtggtgctgaaaggagaactgagtgcccggatgaagattccaagcaatatgtgggtagaagcctgggaaacagctaagccaattcctgctagaaggcaaaggagactctttgatgatacacgggaagcagaaaaggtgctgcactatctggcaatccagaaacctgcagaccttgctcggcacctgttaccttgtgtgattcatgcagctgtactcaaggtaaaggaagaagaaagtctcgaaaacatttcttcagttaagaagatcataaagcagataatatcccattccagtaaagttttgcacttccccaatccagaagacaagaaattggaagaaatcattcaccagattactaatgtggaagctctcattgccagagctcggtcactaaaagccaagtttggaactgagaaatgtgaacaggaggaggaaaaggaagatcttgaaaggtttgtgagttgcctgctggagcagcctgaagtgttagtcaccggtgcaggaagaggacatgctggcaggatcattcacaagctgtttgtgaatgcccagagggctgcagctatgactccaccagaggaggaattgaagagaatgggctccccagaggaaagaaggcagaactccgtgtcagacttcccaccccctgctggccgggaattcattttgcgcaccactgtgccgcgccctgctccctactccaaagctctgcctcagcggatgtacagtgttctcaccaaagaggactttagacttgcagttaaaataatcgatggggatgtgtagcccccccgtgtgaggatgacatcaccacatttctagtttcatggagctcaagatgtcttgtgtctgtgtggctagatggcctctgcttgctccccaggtgtgtcctggtagacaactgctcccaggagctggcatagaagcaaacctgcaggaaaagccaacccactccaggtgtgtggaagctgctggcaggaacccagcaaggatccagctgggttgtaatggaaacaatgcaaccaacaatccttgagcgagccgggatagatgtggcctcatcactgaagatttcatctgagacctctgcaaatatccaaattgtatatgctcttagagcagatcattttctcacaggttgtctaaccaaaggaaaggaaatcagcatatcaaagagatatctgcactcccatgttgattgcagcactgttcacaacagccaagatgtggaatcaaccagagtgtccattggcagatgaatggattaaaaatgtggtgcatgg

SEQ ID NO: 299750 - DNA, 2808 bp, Artificial Sequence
  derived and/or modified sequence
atgttcagcctgatcagcggcatcttcaccagcggcacctgggaggagaagagcgacgagatcagcttcgccgacttcaagttcagcgtgacccaccactacctggtgcaggagagcaccgacaaggagggcaaggacgagctgctggaggacgtggtgccccagagcatgcaggacctgctgggcatgaacaacgacttcccccccagagcccactgcctggtgagatggtacggcctgagagagttcgtggtgatcgcccccgccgcccacagcgacgccgtgctgagcgagagcaagtgcaacctgctgctgagcagcgtgagcatcgccctgggcaacaccggctgccaggtgcccctgttcgtgcagatccaccacaagtggagaagaatgtacgtgggcgagtgccagggccccggcgtgagaaccgacttcgagatggtgcacctgagaaaggtgcccaaccagtacacccacctgagcggcctgctggacatcttcaagagcaagatcggctgccccctgacccccctgccccccgtgagcatcgccatcagattcacctacgtgctgcaggactggcagcagtacttctggccccagcagccccccgacatcgacgccctggtgggcggcgaggtgggcggcctggagttcggcaagctgcccttcggcgcctgcgaggaccccatcagcgagctgcacctggccaccacctggccccacctgaccgagggcatcatcgtggacaacgacgtgtacagcgacctggaccccatccaggccccccactggagcgtgagagtgagaaaggccgagaacccccagtgcctgctgggcgacttcgtgaccgagttcttcaagatctgcagaagaaaggagagcaccgacgagatcctgggcagaagcgccttcgaggaggagggcaaggagaccgccgacatcacccacgccctgagcaagctgaccgagcccgccagcgtgcccatccacaagctgagcgtgagcaacatggtgcacaccgccaagaagaagatcagaaagcacagaggcgtggaggagagccccctgaacaacgacgtgctgaacaccatcctgctgttcctgttccccgacgccgtgagcgagaagcccctggacggcaccaccagcaccgacaacaacaacccccccagcgagagcgaggactacaacctgtacaaccagttcaagagcgcccccagcgacagcctgacctacaagctggccctgtgcctgtgcatgatcaacttctaccacggcggcctgaagggcgtggcccacctgtggcaggagttcgtgctggagatgagattcagatgggagaacaacttcctgatccccggcctggccagcggcccccccgacctgagatgctgcctgctgcaccagaagctgcagatgctgaactgctgcatcgagagaaagaaggccagagacgagggcaagaagaccagcgccagcgacgtgaccaacatctaccccggcgacgccggcaaggccggcgaccagctggtgcccgacaacctgaaggagaccgacaaggagaagggcgaggtgggcaagagctgggacagctggagcgacagcgaggaggagttcttcgagtgcctgagcgacaccgaggagctgaagggcaacggccaggagagcggcaagaagggcggccccaaggagatggccaacctgagacccgagggcagactgtaccagcacggcaagctgaccctgctgcacaacggcgagcccctgtacatccccgtgacccaggagcccgcccccatgaccgaggacctgctggaggagcagagcgaggtgctggccaagctgggcaccagcgccgagggcgcccacctgagagccagaatgcagagcgcctgcctgctgagcgacatggagagcttcaaggccgccaaccccggctgcagcctggaggacttcgtgagatggtacagccccagagactacatcgaggaggaggtgatcgacgagaagggcaacgtggtgctgaagggcgagctgagcgccagaatgaagatccccagcaacatgtgggtggaggcctgggagaccgccaagcccatccccgccagaagacagagaagactgttcgacgacaccagagaggccgagaaggtgctgcactacctggccatccagaagcccgccgacctggccagacacctgctgccctgcgtgatccacgccgccgtgctgaaggtgaaggaggaggagagcctggagaacatcagcagcgtgaagaagatcatcaagcagatcatcagccacagcagcaaggtgctgcacttccccaaccccgaggacaagaagctggaggagatcatccaccagatcaccaacgtggaggccctgatcgccagagccagaagcctgaaggccaagttcggcaccgagaagtgcgagcaggaggaggagaaggaggacctggagagattcgtgagctgcctgctggagcagcccgaggtgctggtgaccggcgccggcagaggccacgccggcagaatcatccacaagctgttcgtgaacgcccagagagccgccgccatgaccccccccgaggaggagctgaagagaatgggcagccccgaggagagaagacagaacagcgtgagcgacttccccccccccgccggcagagagttcatcctgagaaccaccgtgcccagacccgccccctacagcaaggccctgccccagagaatgtacagcgtgctgaccaaggaggacttcagactggccgtgaagatcatcgacggcgacgtgtag

SEQ ID NO: 299751 - DNA, 4326 bp, Artificial Sequence
  derived and/or modified sequence
gcgtgaccctcgcctgatccagttgttagagttggaagcttggcagttggcctcccttcttcccatggaggacgggggcttaacagcctttgaagaggaccagagatgcctttcccagagcctccccttgccagtgtcagcagagggcccagctgcacagaccactgctgagcccagcaggtcgttttcctcagcccacagacacctgagcagaaggaatgggctttccagactctgccagagcaggacagcgctctctgaagacagatggagctcctattgtctatcatcactggctgcccagaatatttgtacaagtaaactgcactgccctgctgcccctgagcacacggacccgtccgaaccgcggggcagtgtgtcctgctgctccctgctgcggggactgtcctcagggtggtcctcacctctgcttccggcccctgtgtgcaaccctaacaaggccatcttcacggtggatgccaagaccacagagatcctggttgctaacgacaaagcttgcgggctcctggggtacagcagccaggacctgattggccagaagctcacgcagttctttctgaggtcagattctgatgtggtggaggccctcagcgaggagcacatggaggccgacggccacgctgcggtggtgtttggcacggtggtggacatcatcagccgtagtggggagaagattccagtgtctgtgtggatgaagaggatgcggcaggagcgccgcctatgctgcgtggtggtcctggagcccgtggagagggtctcgacctgggtcgctttccagagcgatggcaccgtcacgtcatgtgacagtctctttgctcatcttcacgggtacgtgtctggggaggacgtggctgggcagcatatcacagacctgatcccttctgtgcagctccctccttctggccagcacatcccaaagaatctcaagattcagaggtctgttggaagagccagggacggtaccaccttccctctgagcttaaagctgaaatcccaacccagcagcgaggaggcgaccaccggtgaggcggcccctgtgagcggctaccgggcatctgtctgggtgttctgcaccatcagtggcctcatcaccctcctgccggatgggaccatccacggcatcaaccacagcttcgcgctgacactgtttggttacggaaagacggagctcctgggcaagaatatcactttcctgattcctggtttctacagctacatggaccttgcgtacaacagctcattacagctcccagacctggccagctgcctggacgtcggcaatgagagtgggtgtggggagagaaccttggacccgtggcagggccaggacccagctgaggggggccaggatccaaggattaatgtcgtgcttgctggtggccacgttgtgccccgagatgagatccggaagctgatggaaagccaagacatcttcaccgggactcagactgagctgattgctggaggccagctcctttcctgcctctcacctcagcctgctccaggggtggacaatgtcccagaaggaagcctgccagtgcacggtgaacaggcgctgcccaaggaccagcaaatcactgccttggggagagaggaacctgtggcaatagagagccccggacaggatcttctgggagaaagcaggtctgaaccagtggatgtgaagccatttgcttcctgcgaagattctgaagctccagtcccagctgaggatgggggcagtgatgctggcatgtgtggcctgtgtcagaaggcccagctagagcggatgggagtcagtggtcccagcggttcagacctttgggctggggctgccgtggccaagccccaggccaagggtcagctggcggggggcagcctcctgatgcactgcccttgctatgggagtgaatggggcttgtggtggcgaagccaggacttggcccccagcccctctgggatggcaggcctctcgtttgggacacctactctagatgagccgtggctgggagtggaaaacgaccgagaagagctgcagacctgcttgattaaggagcagctgtcccagttgagccttgcaggagccctggatgtcccccacgccgaactcgttccgacagagtgccaggctgtcaccgctcctgtgtcgtcctgcgatctgggaggcagagacctgtgcggtggctgcacgggcagctcctcagcctgctatgccttggccacggacctccctgggggcctggaagcagtggaggcccaggaggttgatgtgaattcgttttcctggaacctcaaggaactctttttcagtgaccagacagaccaaacgtcatcaaattgttcctgtgctacgtctgaactcagagagacaccctcttccttggcagtgggctccgatccagatgtaggcagtctccaggaacaggggtcgtgtgtcctggatgacagggagctgttactactgaccggcacctgtgttgaccttggccaaggccgacggttccgggagagctgtgtgggacatgatccaacagaaccgcttgaggtttgtttggtgtcctctgagcattatgcagcaagcgacagagaaagcccaggacacgttccttccacgttggatgctggccctgaggacacgtgcccatcagcagaggagccaaggctgaacgtccaggtcacctccacgcccgtgatcgtgatgcgcggggctgctggcctgcagcgggagatccaggagggtgcctactccgggagctgctaccatcgagatggcttacggctgagtatacagtttgaggtgaggcgggtggagctccagggccccacacctctgttctgctgctggctggtgaaagacctcctccacagccaacgcgactcagccgccaggacccgcctgttccttgccagcctgcccggctccacccactctaccgctgctgagctcaccggacccagcctggtggaagtgctcagagccagaccctggtttgaggagccccccaaggctgtggaactggaggggttggcggcctgtgagggcgagtactcccaaaagtacagtaccatgagcccgctgggcagtggggccttcggcttcgtgtggactgctgtggacaaggaaaaaaacaaggaggtggtggtgaagtttattaagaaggagaaggtcttggaggattgttggattgaggatcccaaacttgggaaagttactttagagatcgcaattctatccagggtggagcacgccaatatcatcaaggtattggatatatttgaaaaccaagggttcttccagcttgtgatggagaagcacggctccggcctagacctcttcgctttcatcgaccgccaccccaggctggatgagcccctggcgagctacatcttccgacaagtgagagcaggccagagccgtctagtgtcagcagtgggatacctgcgcttgaaggacatcatccaccgtgacatcaaggatgagaacatcgtgatcgccgaggacttcacaatcaagctgatagactttggctcggccgcctacttggaaaggggaaaattattttatactttttgtgggaccatcgagtactgtgcaccggaagttctcatggggaatccctacagagggccggagctggagatgtggtctctgggagtcactctgtacacgctggtctttgaggagaaccccttctgtgagctggaggagaccgtggaggctgccatacacccgccatacctggtgtccaaagaactcatgagccttgtgtctgggctgctgcagccagtccctgagagacgcaccaccttggagaagctggtgacagacccgtgggtaacacagcctgtgaatcttgctgactatacatgggaagaggtgtttcgagtaaacaagccagaaagtggagttctgtccgctgcgagcctggagatggggaacaggagcctgagtgatgtggcccaggctcaggagctttgtgggggccccgttccaggcgaggctcctaatggccaaggctgtttgcatcccggggatccccgtctgctgaccagctaaacaccaatttcttcctgcttttctccacttggtttggaaaatcacacagttttcaggctccatctgtttggagaaaatacattctgaagcatccccaattcaccttctaaaaactcatgtgcaggtttgataaacaccagaacagaagacagtgatgctgtattattttagatttattacatagatttggaattcacttttttcatgacctagaaaaaaacattccagtgttcaactgttttatattattaaagggcttttaatttgtg

SEQ ID NO: 299752 - protein, 1107 aa, Artificial Sequence
  derived and/or modified sequence
MKRMRQERRLCCVVVLEPVERVSTWVAFQSDGTVTSCDSLFAHLHGYVSGEDVAGQHITDLIPSVQLPPSGQHIPKNLKIQRSVGRARDGTTFPLSLKLKSQPSSEEATTGEAAPVSGYRASVWVFCTISGLITLLPDGTIHGINHSFALTLFGYGKTELLGKNITFLIPGFYSYMDLAYNSSLQLPDLASCLDVGNESGCGERTLDPWQGQDPAEGGQDPRINVVLAGGHVVPRDEIRKLMESQDIFTGTQTELIAGGQLLSCLSPQPAPGVDNVPEGSLPVHGEQALPKDQQITALGREEPVAIESPGQDLLGESRSEPVDVKPFASCEDSEAPVPAEDGGSDAGMCGLCQKAQLERMGVSGPSGSDLWAGAAVAKPQAKGQLAGGSLLMHCPCYGSEWGLWWRSQDLAPSPSGMAGLSFGTPTLDEPWLGVENDREELQTCLIKEQLSQLSLAGALDVPHAELVPTECQAVTAPVSSCDLGGRDLCGGCTGSSSACYALATDLPGGLEAVEAQEVDVNSFSWNLKELFFSDQTDQTSSNCSCATSELRETPSSLAVGSDPDVGSLQEQGSCVLDDRELLLLTGTCVDLGQGRRFRESCVGHDPTEPLEVCLVSSEHYAASDRESPGHVPSTLDAGPEDTCPSAEEPRLNVQVTSTPVIVMRGAAGLQREIQEGAYSGSCYHRDGLRLSIQFEVRRVELQGPTPLFCCWLVKDLLHSQRDSAARTRLFLASLPGSTHSTAAELTGPSLVEVLRARPWFEEPPKAVELEGLAACEGEYSQKYSTMSPLGSGAFGFVWTAVDKEKNKEVVVKFIKKEKVLEDCWIEDPKLGKVTLEIAILSRVEHANIIKVLDIFENQGFFQLVMEKHGSGLDLFAFIDRHPRLDEPLASYIFRQLVSAVGYLRLKDIIHRDIKDENIVIAEDFTIKLIDFGSAAYLERGKLFYTFCGTIEYCAPEVLMGNPYRGPELEMWSLGVTLYTLVFEENPFCELEETVEAAIHPPYLVSKELMSLVSGLLQPVPERRTTLEKLVTDPWVTQPVNLADYTWEEVFRVNKPESGVLSAASLEMGNRSLSDVAQAQELCGGPVPGEAPNGQGCLHPGDPRLLTS

SEQ ID NO: 299753 - DNA, 4572 bp, Artificial Sequence
  derived and/or modified sequence
gtcgctgtgcgattggtcggtgggataaaagcgcggaagggctcctttccgtggtgtgtagccggcttggcgtgaccctcgcctgatccagttgttagagttggaagcttggcagttggcctcccttcttcccatggaggacgggggcttaacagcctttgaagaggaccagagatgcctttcccagagcctccccttgccagtgtcagcagagggcccagctgcacagaccactgctgagcccagcaggtcgttttcctcagcccacagacacctgagcagaaggaatgggctttccagactctgccagagcaggacagcgctctctgaagacagatggagctcctattgtctatcatcactggctgcccagaatatttgtacaagtaaactgcactgccctgctgcccctgagcacacggacccgtccgaaccgcggggcagtgtgtcctgctgctccctgctgcggggactgtcctcagggtggtcctcacctctgcttccggcccctgtgtgcaaccctaacaaggccatcttcacggtggatgccaagaccacagagatcctggttgctaacgacaaagcttgcgggctcctggggtacagcagccaggacctgattggccagaagctcacgcagttctttctgaggtcagattctgatgtggtggaggccctcagcgaggagcacatggaggccgacggccacgctgcggtggtgtttggcacggtggtggacatcatcagccgtagtggggagaagattccagtgtctgtgtggatgaagaggatgcggcaggagcgccgcctatgctgcgtggtggtcctggagcccgtggagagggtctcgacctgggtcgctttccagagcgatggcaccgtcacgtcatgtgacagtctctttgctcatcttcacgggtacgtgtctggggaggacgtggctgggcagcatatcacagacctgatcccttctgtgcagctccctccttctggccagcacatcccaaagaatctcaagattcagaggtctgttggaagagccagggacggtaccaccttccctctgagcttaaagctgaaatcccaacccagcagcgaggaggcgaccaccggtgaggcggcccctgtgagcggctaccgggcatctgtctgggtgttctgcaccatcagtggcctcatcaccctcctgccggatgggaccatccacggcatcaaccacagcttcgcgctgacactgtttggttacggaaagacggagctcctgggcaagaatatcactttcctgattcctggtttctacagctacatggaccttgcgtacaacagctcattacagctcccagacctggccagctgcctggacgtcggcaatgagagtgggtgtggggagagaaccttggacccgtggcagggccaggacccagctgaggggggccaggatccaaggattaatgtcgtgcttgctggtggccacgttgtgccccgagatgagatccggaagctgatggaaagccaagacatcttcaccgggactcagactgagctgattgctggaggccagctcctttcctgcctctcacctcagcctgctccaggggtggacaatgtcccagaaggaagcctgccagtgcacggtgaacaggcgctgcccaaggaccagcaaatcactgccttggggagagaggaacctgtggcaatagagagccccggacaggatcttctgggagaaagcaggtctgaaccagtggatgtgaagccatttgcttcctgcgaagattctgaagctccagtcccagctgaggatgggggcagtgatgctggcatgtgtggcctgtgtcagaaggcccagctagagcggatgggagtcagtggtcccagcggttcagacctttgggctggggctgccgtggccaagccccaggccaagggtcagctggcggggggcagcctcctgatgcactgcccttgctatgggagtgaatggggcttgtggtggcgaagccaggacttggcccccagcccctctgggatggcaggcctctcgtttgggacacctactctagatgagccgtggctgggagtggaaaacgaccgagaagagctgcagacctgcttgattaaggagcagctgtcccagttgagccttgcaggagccctggatgtcccccacgccgaactcgttccgacagagtgccaggctgtcaccgctcctgtgtcgtcctgcgatctgggaggcagagacctgtgcggtggctgcacgggcagctcctcagcctgctatgccttggccacggacctccctgggggcctggaagcagtggaggcccaggaggttgatgtgaattcgttttcctggaacctcaaggaactctttttcagtgaccagacagaccaaacgtcatcaaattgttcctgtgctacgtctgaactcagagagacaccctcttccttggcagtgggctccgatccagatgtaggcagtctccaggaacaggggtcgtgtgtcctggatgacagggagctgttactactgaccggcacctgtgttgaccttggccaaggccgacggttccgggagagctgtgtgggacatgatccaacagaaccgcttgaggtttgtttggtgtcctctgagcattatgcagcaagcgacagagaaagcccaggacacgttccttccacgttggatgctggccctgaggacacgtgcccatcagcagaggagccaaggctgaacgtccaggtcacctccacgcccgtgatcgtgatgcgcggggctgctggcctgcagcgggagatccaggagggtgcctactccgggagctgctaccatcgagatggcttacggctgagtatacagtttgaggtgaggcgggtggagctccagggccccacacctctgttctgctgctggctggtgaaagacctcctccacagccaacgcgactcagccgccaggacccgcctgttccttgccagcctgcccggctccacccactctaccgctgctgagctcaccggacccagcctggtggaagtgctcagagccagaccctggtttgaggagccccccaaggctgtggaactggaggggttggcggcctgtgagggcgagtactcccaaaagtacagtaccatgagcccgctgggcagtggggccttcggcttcgtgtggactgctgtggacaaggaaaaaaacaaggaggtggtggtgaagtttattaagaaggagaaggtcttggaggattgttggattgaggatcccaaacttgggaaagttactttagagatcgcaattctatccagggtggagcacgccaatatcatcaaggtattggatatatttgaaaaccaagggttcttccagcttgtgatggagaagcacggctccggcctagacctcttcgctttcatcgaccgccaccccaggctggatgagcccctggcgagctacatcttccgacaactagtgtcagcagtgggatacctgcgcttgaaggacatcatccaccgtgacatcaaggatgagaacatcgtgatcgccgaggacttcacaatcaagctgatagactttggctcggccgcctacttggaaaggggaaaattattttatactttttgtgggaccatcgagtactgtgcaccggaagttctcatggggaatccctacagagggccggagctggagatgtggtctctgggagtcactctgtacacgctggtctttgaggagaaccccttctgtgagctggaggagaccgtggaggctgccatacacccgccatacctggtgtccaaagaactcatgagccttgtgtctgggctgctgcagccagtccctgagagacgcaccaccttggagaagctggtgacagacccgtgggtaacacagcctgtgaatcttgctgactatacatgggaagaggtgtttcgagtaaacaagccagaaagtggagttctgtccgctgcgagcctggagatggggaacaggagcctgagtgatgtggcccaggctcaggagctttgtgggggccccgttccaggcgaggctcctaatggccaaggctgtttgcatcccggggatccccgtctgctgaccagctaaacaccaatttcttcctgcttttctccacttggtttggaaaatcacacagttttcaggctccatctgtttggagaaaatacattctgaagcatccccaattcaccttctaaaaactcatgtgcaggtttgataaacaccagaacagaagacagtgatgctgtattattttagatttattacatagatttggaattcacttttttcatgacctagaaaaaaacattccagtgttcaactgttttatattattaaagggcttttaatttgtgaacttctgaaggcatgagtgttttctctttctacttttgtatatgtgcatgttttgtttcctctgacttggtatatgctcatctgagtgacggatatgtgaaatttgtagaactggttagtcaaatggccagactatttcattaatttatttcctcaaatgcttttcaaattaaagcacctttgttagtaaacagtta

SEQ ID NO: 299754 - DNA, 4942 bp, Artificial Sequence
  derived and/or modified sequence
gagaagctgggaaggaaagcagagggagtcgaagcgggacgcacagagccgtagctgcaggcagacggagtggacgtctaggcagagtggagagacgccctgggcttgagagttgacttatgtcactgtctcgacctcggaggcgtggaggggccgcgggccaggcggatctttccgtggctgcaaggtgcgggccagtcctacgtgcatccctgacctctgcgagcctcgctggctgcgtctgtacaatgggccgaacggcaagagcaacaacattctcccggcgtccccgcgcggattttacccatgcgaaatgccgccttctcttgacgctcggagcaggcgggcaggtgcggggcacttgcgctggtggggccgctagccagctggctggctccggggcgccagctgggctccccttgcaagtcgttcccagcccagtgcggacgctgcagccttcgtctaccctgcggagccacccggcccatgaacgagccgccccgcgtcctccgccttcagaaagaggcctccaagaggcgagctctgcgctactcacccattttgatcgcgagtcgggaggaaaccgcatctgcccggcccgggggcggaggcgcccattattcctttggctcctccgaagcgccgtaggggtgtttgttgttagagttggaagcttggcagttggcctcccttcttcccatggaggacgggggcttaacagcctttgaagaggaccagagatgcctttcccagagcctccccttgccagtgtcagcagagggcccagctgcacagaccactgctgagcccagcaggtcgttttcctcagcccacagacacctgagcagaaggaatgggctttccagactctgccagagcaggacagcgctctctgaagacagatggagctcctattgtctatcatcactggctgcccagaatatttgtacaagtaaactgcactgccctgctgcccctgagcacacggacccgtccgaaccgcggggcagtgtgtcctgctgctccctgctgcggggactgtcctcagggtggtcctcacctctgcttccggcccctgtgtgcaaccctaacaaggccatcttcacggtggatgccaagaccacagagatcctggttgctaacgacaaagcttgcgggctcctggggtacagcagccaggacctgattggccagaagctcacgcagttctttctgaggtcagattctgatgtggtggaggccctcagcgaggagcacatggaggccgacggccacgctgcggtggtgtttggcacggtggtggacatcatcagccgtagtggggagaagattccagtgtctgtgtggatgaagaggatgcggcaggagcgccgcctatgctgcgtggtggtcctggagcccgtggagagggtctcgacctgggtcgctttccagagcgatggcaccgtcacgtcatgtgacagtctctttgctcatcttcacgggtacgtgtctggggaggacgtggctgggcagcatatcacagacctgatcccttctgtgcagctccctccttctggccagcacatcccaaagaatctcaagattcagaggtctgttggaagagccagggacggtaccaccttccctctgagcttaaagctgaaatcccaacccagcagcgaggaggcgaccaccggtgaggcggcccctgtgagcggctaccgggcatctgtctgggtgttctgcaccatcagtggcctcatcaccctcctgccggatgggaccatccacggcatcaaccacagcttcgcgctgacactgtttggttacggaaagacggagctcctgggcaagaatatcactttcctgattcctggtttctacagctacatggaccttgcgtacaacagctcattacagctcccagacctggccagctgcctggacgtcggcaatgagagtgggtgtggggagagaaccttggacccgtggcagggccaggacccagctgaggggggccaggatccaaggattaatgtcgtgcttgctggtggccacgttgtgccccgagatgagatccggaagctgatggaaagccaagacatcttcaccgggactcagactgagctgattgctggaggccagctcctttcctgcctctcacctcagcctgctccaggggtggacaatgtcccagaaggaagcctgccagtgcacggtgaacaggcgctgcccaaggaccagcaaatcactgccttggggagagaggaacctgtggcaatagagagccccggacaggatcttctgggagaaagcaggtctgaaccagtggatgtgaagccatttgcttcctgcgaagattctgaagctccagtcccagctgaggatgggggcagtgatgctggcatgtgtggcctgtgtcagaaggcccagctagagcggatgggagtcagtggtcccagcggttcagacctttgggctggggctgccgtggccaagccccaggccaagggtcagctggcggggggcagcctcctgatgcactgcccttgctatgggagtgaatggggcttgtggtggcgaagccaggacttggcccccagcccctctgggatggcaggcctctcgtttgggacacctactctagatgagccgtggctgggagtggaaaacgaccgagaagagctgcagacctgcttgattaaggagcagctgtcccagttgagccttgcaggagccctggatgtcccccacgccgaactcgttccgacagagtgccaggctgtcaccgctcctgtgtcgtcctgcgatctgggaggcagagacctgtgcggtggctgcacgggcagctcctcagcctgctatgccttggccacggacctccctgggggcctggaagcagtggaggcccaggaggttgatgtgaattcgttttcctggaacctcaaggaactctttttcagtgaccagacagaccaaacgtcatcaaattgttcctgtgctacgtctgaactcagagagacaccctcttccttggcagtgggctccgatccagatgtaggcagtctccaggaacaggggtcgtgtgtcctggatgacagggagctgttactactgaccggcacctgtgttgaccttggccaaggccgacggttccgggagagctgtgtgggacatgatccaacagaaccgcttgaggtttgtttggtgtcctctgagcattatgcagcaagcgacagagaaagcccaggacacgttccttccacgttggatgctggccctgaggacacgtgcccatcagcagaggagccaaggctgaacgtccaggtcacctccacgcccgtgatcgtgatgcgcggggctgctggcctgcagcgggagatccaggagggtgcctactccgggagctgctaccatcgagatggcttacggctgagtatacagtttgaggtgaggcgggtggagctccagggccccacacctctgttctgctgctggctggtgaaagacctcctccacagccaacgcgactcagccgccaggacccgcctgttccttgccagcctgcccggctccacccactctaccgctgctgagctcaccggacccagcctggtggaagtgctcagagccagaccctggtttgaggagccccccaaggctgtggaactggaggggttggcggcctgtgagggcgagtactcccaaaagtacagtaccatgagcccgctgggcagtggggccttcggcttcgtgtggactgctgtggacaaggaaaaaaacaaggaggtggtggtgaagtttattaagaaggagaaggtcttggaggattgttggattgaggatcccaaacttgggaaagttactttagagatcgcaattctatccagggtggagcacgccaatatcatcaaggtattggatatatttgaaaaccaagggttcttccagcttgtgatggagaagcacggctccggcctagacctcttcgctttcatcgaccgccaccccaggctggatgagcccctggcgagctacatcttccgacaactagtgtcagcagtgggatacctgcgcttgaaggacatcatccaccgtgacatcaaggatgagaacatcgtgatcgccgaggacttcacaatcaagctgatagactttggctcggccgcctacttggaaaggggaaaattattttatactttttgtgggaccatcgagtactgtgcaccggaagttctcatggggaatccctacagagggccggagctggagatgtggtctctgggagtcactctgtacacgctggtctttgaggagaaccccttctgtgagctggaggagaccgtggaggctgccatacacccgccatacctggtgtccaaagaactcatgagccttgtgtctgggctgctgcagccagtccctgagagacgcaccaccttggagaagctggtgacagacccgtgggtaacacagcctgtgaatcttgctgactatacatgggaagaggtgtttcgagtaaacaagccagaaagtggagttctgtccgctgcgagcctggagatggggaacaggagcctgagtgatgtggcccaggctcaggagctttgtgggggccccgttccaggcgaggctcctaatggccaaggctgtttgcatcccggggatccccgtctgctgaccagctaaacaccaatttcttcctgcttttctccacttggtttggaaaatcacacagttttcaggctccatctgtttggagaaaatacattctgaagcatccccaattcaccttctaaaaactcatgtgcaggtttgataaacaccagaacagaagacagtgatgctgtattattttagatttattacatagatttggaattcacttttttcatgacctagaaaaaaacattccagtgttcaactgttttatattattaaagggcttttaatttgtgaa

SEQ ID NO: 299755 - DNA, 565 bp, Artificial Sequence
  derived and/or modified sequence
gtgtagccggcttggcgtgaccctcgcctgatccaggttgtgtcgccaggctggagggcagtggtgtcatctcggctcattacaacctccacctcccaggttcaagcgattctcctgcctctgcctccagagtagctgggaatacagttgttagagttggaagcttggcagttggcctcccttcttcccatggaggacgggggcttaacagcctttgaagaggaccagagatgcctttcccagagcctccccttgccagtgtcagcagagggcccagctgcacagaccactgctgagcccagcaggtcgttttcctcagcccacagacacctgagcagaaggaatgggctttccagactctgccagagcaggacagcgctctctgaagacagatggagctcctattgtctatcatcactggctgcccagaatatttgtacaagtaaactgcactgccctgctgcccctgagcacacggacccgtccgaaccgcggggcagtgtgtcctgctgctccctgctgcggggactgtcctcagggtggtcctcacctctgcttccggccc

SEQ ID NO: 299756 - protein, 1137 aa, Artificial Sequence
  derived and/or modified sequence
MGFPDSARAGQRSLVDIISRSGEKIPVSVWMKRMRQERRLCCVVVLEPVERVSTWVAFQSDGTVTSCDSLFAHLHGYVSGEDVAGQHITDLIPSVQLPPSGQHIPKNLKIQRSVGRARDGTTFPLSLKLKSQPSSEEATTGEAAPVSGYRASVWVFCTISGLITLLPDGTIHGINHSFALTLFGYGKTELLGKNITFLIPGFYSYMDLAYNSSLQLPDLASCLDVGNESGCGERTLDPWQGQDPAEGGQDPRINVVLAGGHVVPRDEIRKLMESQDIFTGTQTELIAGGQLLSCLSPQPAPGVDNVPEGSLPVHGEQALPKDQQITALGREEPVAIESPGQDLLGESRSEPVDVKPFASCEDSEAPVPAEDGGSDAGMCGLCQKAQLERMGVSGPSGSDLWAGAAVAKPQAKGQLAGGSLLMHCPCYGSEWGLWWRSQDLAPSPSGMAGLSFGTPTLDEPWLGVENDREELQTCLIKEQLSQLSLAGALDVPHAELVPTECQAVTAPVSSCDLGGRDLCGGCTGSSSACYALATDLPGGLEAVEAQEVDVNSFSWNLKELFFSDQTDQTSSNCSCATSELRETPSSLAVGSDPDVGSLQEQGSCVLDDRELLLLTGTCVDLGQGRRFRESCVGHDPTEPLEVCLVSSEHYAASDRESPGHVPSTLDAGPEDTCPSAEEPRLNVQVTSTPVIVMRGAAGLQREIQEGAYSGSCYHRDGLRLSIQFEVRRVELQGPTPLFCCWLVKDLLHSQRDSAARTRLFLASLPGSTHSTAAELTGPSLVEVLRARPWFEEPPKAVELEGLAACEGEYSQKYSTMSPLGSGAFGFVWTAVDKEKNKEVVVKFIKKEKVLEDCWIEDPKLGKVTLEIAILSRVEHANIIKVLDIFENQGFFQLVMEKHGSGLDLFAFIDRHPRLDEPLASYIFRQLVSAVGYLRLKDIIHRDIKDENIVIAEDFTIKLIDFGSAAYLERGKLFYTFCGTIEYCAPEVLMGNPYRGPELEMWSLGVTLYTLVFEENPFCELEETVEAAIHPPYLVSKELMSLVSGLLQPVPERRTTLEKLVTDPWVTQPVNLADYTWEEVFRVNKPESGVLSAASLEMGNRSLSDVAQAQELCGGPVPGEAPNGQGCLHPGDPRLLTS

SEQ ID NO: 299757 - DNA, 3414 bp, Artificial Sequence
  derived and/or modified sequence
atgggattccccgactccgctcgagccggacaaaggtctttggtggatatcatatcaaggtcaggcgagaagatcccggtgtcggtatggatgaaaaggatgagacaggagcggaggttatgctgcgtggtcgtacttgaacctgtggaaagggtgtccacatgggtggctttccagtctgatggaactgttacaagctgtgatagcctgttcgcacacctgcacggctacgtgtccggtgaagatgtggcaggtcaacatatcactgatttgataccttctgttcagctgccacccagcggccagcatattcctaagaatttgaagatacaaaggagcgtgggccgagctcgtgatggaaccactttccctctttccctgaagctcaagagtcagccctcctcggaagaggccacaacaggcgaggctgccccagtgagcgggtatagggccagcgtatgggtcttttgcacaatctcaggcctgatcaccctgctacctgacggcaccatccacggaatcaatcacagcttcgcgttaacccttttcggatatggtaaaacggaacttcttggaaaaaatataaccttcctgattcctggtttctactcctatatggacttagcttataacagcagcctgcagttgccagatctagccagttgtctggatgtagggaacgagtctggctgcggggaacgcaccttggacccatggcaagggcaagacccggccgaggggggccaggaccccaggattaacgttgtactcgcgggtggtcacgtagtcccacgcgatgaaatccggaaattaatggagtcccaagacatctttaccggcactcaaacagaactcattgccgggggacagctgctcagctgtcttagtccccagccagcacccggagtcgacaatgtgcccgaaggatcccttcccgttcatggagagcaggcactccccaaggaccagcagataacagcactcggaagagaagagccggtggccatcgagtcacccggacaagatctactgggcgagtccagatccgaacccgtggacgtgaagccctttgctagctgcgaagactccgaagctccggtacccgccgaagacggagggagcgatgcgggaatgtgtgggctgtgccagaaggctcagctggagagaatgggtgtgtcaggacccagcggcagtgacctctgggccggtgcagctgtggccaagccccaggccaaggggcaattggctggtggctccctgctgatgcattgtccctgctatggatcagaatgggggttgtggtggcgctcccaggatctcgccccctcaccaagtgggatggcaggactttctttcggcacccccaccttggatgaaccgtggctcggcgtggaaaatgacagagaagaactgcagacgtgtttaattaaagagcaattatcacagttatcactggctggggctctcgatgtaccccacgcagaattagttcctacagagtgccaggccgtgaccgctcccgtgagcagctgcgacctcgggggacgtgacctgtgcggcggttgcactggatcaagctcggcgtgctatgccctggccaccgatctgccgggcggattggaggcagtggaagctcaagaggtggatgtgaatagtttttcttggaatctgaaggagctattcttttctgaccagacagaccagactagttccaactgttcatgcgccacaagcgagctgcgggagactccgagttccttagcagtggggagcgatccagacgtgggtagcctgcaggagcagggatcttgcgtgcttgatgacagggagctgttgcttttaaccggaacttgtgttgatctgggtcagggccggcgattccgagaatcttgcgtgggacatgatcctaccgagccccttgaagtttgtctggtgtcctctgagcattacgctgcctctgaccgcgagtctcctggccatgtccctagcacgttggacgccggaccagaggacacttgccccagtgctgaggaacctcgacttaacgtccaagtcacatcgactcccgtcatcgttatgcggggggccgccgggctgcagagagagattcaagaaggtgcatattccggctcctgctaccacagggatggactgaggctaagcatccaatttgaggtgagacgcgtcgagttgcaagggcctacccctctgttttgctgctggctggtcaaggatttgctacacagccagagagatagtgctgctagaacaagactttttcttgcctcccttccagggtccacacactccaccgctgccgagcttaccgggcccagcctggtggaagtcctgagagcccgcccgtggtttgaggaaccacccaaggccgtcgagttggagggcctcgctgcctgcgagggcgagtacagtcaaaagtactctacgatgagcccactgggaagcggagcttttggctttgtgtggaccgcagtagacaaagagaagaataaggaggttgttgttaaattcatcaagaaggagaaagtcctggaggactgttggatagaagaccccaagttggggaaggtaaccttggagatcgcaatcctcagtagagttgagcatgctaatatcatcaaagtgctggatatctttgagaaccaggggttttttcagctggtcatggagaaacatggctccggccttgacctattcgcctttattgatagacatccacgcttagatgaacccctcgccagttatatttttaggcagctcgtcagcgccgtagggtatctgcggctcaaggatatcatacatagggatatcaaggatgagaacatcgttatcgcagaggactttactattaagttgatcgattttggttctgccgcctacctcgaaagggggaaactattttacactttctgtggcacgatcgaatattgcgcccctgaggtcctgatgggcaacccttatcgcgggccggagttggaaatgtggagtttgggtgtcaccctgtatactctggtcttcgaggagaacccattctgcgagctcgaggagaccgtagaggcagccatccacccaccctacctcgtgtccaaggagctgatgtcgcttgtctccggcctgctacaacccgtaccggagaggaggacaactctggagaagcttgtcacagacccttgggtcactcaacctgttaatctggccgattatacgtgggaggaggtgtttcgagttaacaaacccgaaagtggagtgctgtccgccgcgtccctggaaatggggaacaggtctctcagcgatgttgcccaggcgcaggaactgtgcgggggcccagtgccgggcgaggcacctaacgggcagggttgtctgcaccccggggaccctcgcctcctgacctcctag

SEQ ID NO: 299758 - DNA, 3414 bp, Artificial Sequence
  derived and/or modified sequence
atgggcttcccagacagcgcccgggccggccagaggagcctggtggacatcatcagccgctctggagagaagatccctgtgtctgtgtggatgaagaggatgaggcaggagcggcggctgtgctgcgtggtggtgctggagcctgtggagcgggtgtccacctgggtggccttccagagtgatggcaccgtgaccagctgtgacagcctgtttgcccacctgcacggctacgtgtctggagaagatgtggccggccagcacatcacagacctgatccccagcgtgcagctgccccccagcggccagcacatccccaagaacctgaagatccagaggtctgtgggccgggccagagatggcaccaccttccccctgagcctgaagctgaagagccagcccagcagcgaggaggccaccaccggggaggccgcccctgtgtctggctaccgggcctctgtgtgggtgttctgcaccatcagcggcctcatcaccctgctgcctgatggcaccatccacggcatcaaccacagctttgccctgaccctgtttggctacggcaagacagagctgctgggcaagaacatcaccttcctgatccctggcttctacagctacatggacctggcctacaacagcagcctgcagctgcctgacctggccagctgcctggatgtgggcaatgaaagtggctgtggggagaggaccctggacccctggcagggccaggaccctgctgagggcggccaggacccccgcatcaacgtggtgctggccggcggccacgtggtgcccagagatgagatcaggaagctgatggagagccaggacatcttcaccggcacccagacagagctgattgctgggggccagctgctgagctgcctgagcccccagcctgcccctggggtggacaacgtgcctgagggcagcctgcctgtgcacggggagcaggccctgcccaaggaccagcagatcacagccctgggccgggaggagcctgtggccatcgagagccctggccaggacctgctgggggagagccgctctgagcctgtggatgtgaagccctttgccagctgtgaagattctgaggcccctgtgcctgcagaagatggcggcagtgatgctggcatgtgtggcctgtgccagaaggcccagctggagaggatgggcgtgtctggccccagcggcagtgacctgtgggccggggctgctgtggccaagccccaggccaagggccagctggccggcggcagcctgctgatgcactgcccctgctacggcagcgagtggggcctgtggtggaggagccaggacctggcccccagccccagcggcatggccggcctgagctttggcacccccaccctggatgagccctggctgggcgtggagaatgaccgggaggagctgcagacctgcctgatcaaggagcagctgagccagctgagcctggccggggccctggatgtgccccacgccgagctggtgcccacagagtgccaggccgtgacagcccctgtgagcagctgtgacctgggcggccgggacctgtgtggcggctgcaccggcagcagcagcgcctgctacgccctggccacagacctgcccggcggcctggaggccgtggaggcccaggaggtggatgtgaacagcttctcctggaacctgaaggagctgttcttcagtgaccagacagaccagaccagcagcaactgcagctgtgccaccagcgagctgcgggagacccccagcagcctggccgtgggcagtgaccctgatgtgggcagcctgcaggagcagggcagctgtgtgctggatgaccgggagctgctgctgctgaccggcacctgtgtggacctgggccagggccgccgcttccgggagagctgtgtgggccatgaccccacagagcccctggaggtgtgcctggtgtcctctgagcactatgctgccagtgaccgggagagccctggccacgtgcccagcaccctggatgctggccctgaggacacctgccccagcgctgaggagccccggctgaatgtgcaggtgaccagcacccctgtgattgtgatgagaggagctgctggcctgcagcgggagatccaggagggcgcctacagcggcagctgctaccacagagatggcctgcggctgagcatccagtttgaggtgagaagagtggagctgcagggccccacccccctcttctgctgctggctggtgaaggacctgctgcacagccagagggacagcgctgcccggaccaggctcttcctggccagcctgcccggcagcacccacagcacagctgctgagctgaccggccccagcctggtggaggtgctgcgggcccggccctggtttgaggagccccccaaggctgtggagctggagggcctggccgcctgtgagggggagtacagccagaagtacagcaccatgagccccctgggcagcggggccttcggctttgtgtggacagctgtggacaaggagaagaacaaggaggtggtggtgaagttcatcaagaaggagaaggtgctggaggactgctggattgaggaccccaagctgggcaaggtgaccctggagatcgccatcctgagccgggtggagcacgccaacatcatcaaggtgctggacatctttgagaaccagggcttcttccagctggtgatggagaagcacggcagcggcctggacctgtttgccttcatcgacagacacccccggctggatgagcccctggccagctacatcttccggcagctggtgtctgctgtgggctacctgcggctgaaggacatcatccaccgggacatcaaggatgagaacatcgtgattgctgaggacttcaccatcaagctgattgactttggatctgctgcctacctggagcggggcaagctgttctacaccttctgtggcaccatcgagtactgtgcccctgaggtgctgatgggcaacccctaccggggccctgagctggagatgtggagcctgggcgtgaccctgtacaccctggtgtttgaggagaaccccttctgtgagctggaggagaccgtggaggccgccatccaccccccctacctggtgtccaaggagctgatgagcctggtgtctggcctgctgcagcctgtgcctgagaggaggaccaccctggagaagctggtgacagacccctgggtgacccagcctgtgaacctggccgactacacctgggaggaggtgttccgggtgaacaagccagagagcggcgtgctgtctgctgccagcctggagatgggcaacagaagcctgagtgatgtggcccaggcccaggagctgtgtggcggccctgtgcctggagaggcccccaacggccagggctgcctgcaccctggggacccccggctgctgaccagctag

SEQ ID NO: 299759 - DNA, 3414 bp, Artificial Sequence
  derived and/or modified sequence
atgggcttccccgacagcgcccgggccggccagcggagcctggtggatattatctctcgcagtggcgaaaaaatcccggtctctgtgtggatgaaacggatgcgtcaggagaggcgactttgctgtgtggtcgtgctggaaccagtcgaacgcgtcagcacctgggtggcgttccagtccgacgggactgtgaccagctgtgattcactttttgcgcacctccacggctatgtgtcaggggaggatgtggctggccagcacatcactgatctgataccatctgtacagcttccacccagcggtcagcatattccaaagaatctgaagattcaaaggtccgtaggccgcgctagggatggcaccacattccctctgtcacttaaattgaaatcccaacctagttctgaggaagccaccactggcgaggctgccccagtgagcggctaccgggctagcgtgtgggtgttctgcactataagcggtcttatcaccttgctgcctgatggaacaatccacggaataaatcattcttttgctcttacactattcggatacggcaagaccgagctccttgggaagaatatcaccttcctgataccaggcttttactcttacatggatctggcttacaatagctcgctccagcttcctgatcttgccagctgtcttgatgtggggaatgaaagcggatgcggcgaaagaacactggatccatggcaaggccaagatcctgctgaaggcggccaggatccaaggattaacgtcgtgctggctggcggacatgttgtgcctcgggacgagatccgcaaattaatggaatcacaggacatctttacggggacacaaactgaacttattgcggggggccagcttctgtcatgtcttagtccgcagccagctcctggagtggataacgttccggaaggctccctgcctgtgcatggtgaacaggcactgcccaaagaccaacagatcactgctctcggccgggaagaaccggtcgctatcgagtctcccggccaagatctgctgggagagagccgtagcgagcccgtcgacgtaaagccattcgccagctgcgaggatagcgaagcccccgtgcctgccgaggacgggggctcggatgctggtatgtgcggcctgtgtcagaaagcacagctggagcggatgggtgtgagcggaccctctggatctgacctatgggcgggcgcagcagtggctaagcctcaggcaaaaggccagctggcggggggttccctgctgatgcattgtccatgttacgggagcgaatggggtctgtggtggagatcgcaggacctcgcaccaagcccaagcggtatggcggggttgtcgttcggtaccccaacactcgatgaaccctggctaggcgttgaaaatgatagagaggagctacaaacctgtttgattaaagagcagctctcccagcttagcctggccggagctctcgatgtgccccacgccgaactcgttccgactgaatgccaggccgtgactgcacccgtttcctcgtgtgatctagggggtcgtgatctgtgcggcggttgtactggaagcagttcagcctgctatgccctggctacagatctacctggcggacttgaggctgtcgaagcccaagaagtggacgtaaattcgttcagctggaatctaaaagaactgttctttagtgaccaaacagaccaaacgtcaagtaattgctcatgcgcaacaagtgaactccgcgaaaccccgtcctcgctcgccgtggggagcgacccagatgtggggagcctccaggagcaaggttcctgcgtgctcgacgatagagaattattgctgctgacgggaacctgtgtagatttaggccaaggccgacggttcagagaatcctgtgtcggccatgaccccacagaaccacttgaggtgtgcctggtgtcttctgaacattatgccgcctcggatcgcgaatcccctgggcatgtgcctagtacactggatgccggccccgaggatacttgtccgagtgccgaggagcctcgccttaacgtgcaagtgacctccaccccagtgattgttatgagaggagctgccggcctccagcgtgagatccaagagggtgcctattccgggtcatgctaccatagggatggactgaggttgtcaatccagtttgaagtgaggagggtggagctccagggcccgacccctctgttctgctgttggctcgtaaaggatctgctccatagccagcgggattctgcagcgagaaccagactgtttctcgcttctctgccaggcagcacacattccacagctgctgagctcactggaccatccctggtagaagttcttcgagccaggccgtggtttgaagagccccctaaagccgtagagcttgagggcttagcagcatgtgagggagaatactcccaaaaatactcaactatgagccccctgggttctggcgcctttggttttgtctggaccgctgtggataaagagaaaaacaaagaggtggtggtcaagtttataaagaaggagaaagtcctggaagattgttggattgaggatcccaaactgggcaaagtcacattggagatcgctatcctgtctcgcgtggaacacgctaatatcatcaaggtgctggacatctttgaaaatcagggctttttccagctagtgatggagaaacacgggtccggactggacctgttcgcctttatagatcgccatccacggctcgatgaacccctggcatcctatatcttccgccaactggtgagtgccgtcgggtatttgcggcttaaagatattatccatcgagatattaaagatgagaatatcgtcattgctgaagatttcaccattaaactaatagacttcggatccgcagcctatctcgaaagagggaagctcttctacactttttgtggaaccatcgagtattgcgccccagaagtgctaatgggaaatccctaccgagggccagaactggaaatgtggtcgcttggcgtgacactgtatactcttgtatttgaggagaaccccttctgcgagctggaagagacggttgaagcagccatacacccgccatatctcgttagtaaggagctgatgtcactcgtgtccggactgcttcagcccgtgcccgaacgtagaaccacccttgagaaattagtcacagacccttgggtgacgcagcccgtcaacctagccgattacacttgggaagaggtctttagggtcaataaacctgagagcggcgtgctgtcagcagcctctctggagatggggaatcggtcattaagcgacgtggcccaggctcaggagctttgcggcggccctgtgcccggggaggccccaaacgggcaggggtgccttcatccaggtgacccacggctgctaacctcttag

SEQ ID NO: 299760 - DNA, 4000 bp, Artificial Sequence
  derived and/or modified sequence
tgttagagttggaagcttggcagttggcctcccttcttcccatggaggacgggggcttaacagcctttgaagaggaccagagatgcctttcccagagcctccccttgccagtgtcagcagagggcccagctgcacagaccactgctgagcccagcaggtcgttttcctcagcccacagacacctgagcagaaggaatgggctttccagactctgccagagcaggacagcgctctctggtggacatcatcagccgtagtggggagaagattccagtgtctgtgtggatgaagaggatgcggcaggagcgccgcctatgctgcgtggtggtcctggagcccgtggagagggtctcgacctgggtcgctttccagagcgatggcaccgtcacgtcatgtgacagtctctttgctcatcttcacgggtacgtgtctggggaggacgtggctgggcagcatatcacagacctgatcccttctgtgcagctccctccttctggccagcacatcccaaagaatctcaagattcagaggtctgttggaagagccagggacggtaccaccttccctctgagcttaaagctgaaatcccaacccagcagcgaggaggcgaccaccggtgaggcggcccctgtgagcggctaccgggcatctgtctgggtgttctgcaccatcagtggcctcatcaccctcctgccggatgggaccatccacggcatcaaccacagcttcgcgctgacactgtttggttacggaaagacggagctcctgggcaagaatatcactttcctgattcctggtttctacagctacatggaccttgcgtacaacagctcattacagctcccagacctggccagctgcctggacgtcggcaatgagagtgggtgtggggagagaaccttggacccgtggcagggccaggacccagctgaggggggccaggatccaaggattaatgtcgtgcttgctggtggccacgttgtgccccgagatgagatccggaagctgatggaaagccaagacatcttcaccgggactcagactgagctgattgctggaggccagctcctttcctgcctctcacctcagcctgctccaggggtggacaatgtcccagaaggaagcctgccagtgcacggtgaacaggcgctgcccaaggaccagcaaatcactgccttggggagagaggaacctgtggcaatagagagccccggacaggatcttctgggagaaagcaggtctgaaccagtggatgtgaagccatttgcttcctgcgaagattctgaagctccagtcccagctgaggatgggggcagtgatgctggcatgtgtggcctgtgtcagaaggcccagctagagcggatgggagtcagtggtcccagcggttcagacctttgggctggggctgccgtggccaagccccaggccaagggtcagctggcggggggcagcctcctgatgcactgcccttgctatgggagtgaatggggcttgtggtggcgaagccaggacttggcccccagcccctctgggatggcaggcctctcgtttgggacacctactctagatgagccgtggctgggagtggaaaacgaccgagaagagctgcagacctgcttgattaaggagcagctgtcccagttgagccttgcaggagccctggatgtcccccacgccgaactcgttccgacagagtgccaggctgtcaccgctcctgtgtcgtcctgcgatctgggaggcagagacctgtgcggtggctgcacgggcagctcctcagcctgctatgccttggccacggacctccctgggggcctggaagcagtggaggcccaggaggttgatgtgaattcgttttcctggaacctcaaggaactctttttcagtgaccagacagaccaaacgtcatcaaattgttcctgtgctacgtctgaactcagagagacaccctcttccttggcagtgggctccgatccagatgtaggcagtctccaggaacaggggtcgtgtgtcctggatgacagggagctgttactactgaccggcacctgtgttgaccttggccaaggccgacggttccgggagagctgtgtgggacatgatccaacagaaccgcttgaggtttgtttggtgtcctctgagcattatgcagcaagcgacagagaaagcccaggacacgttccttccacgttggatgctggccctgaggacacgtgcccatcagcagaggagccaaggctgaacgtccaggtcacctccacgcccgtgatcgtgatgcgcggggctgctggcctgcagcgggagatccaggagggtgcctactccgggagctgctaccatcgagatggcttacggctgagtatacagtttgaggtgaggcgggtggagctccagggccccacacctctgttctgctgctggctggtgaaagacctcctccacagccaacgcgactcagccgccaggacccgcctgttccttgccagcctgcccggctccacccactctaccgctgctgagctcaccggacccagcctggtggaagtgctcagagccagaccctggtttgaggagccccccaaggctgtggaactggaggggttggcggcctgtgagggcgagtactcccaaaagtacagtaccatgagcccgctgggcagtggggccttcggcttcgtgtggactgctgtggacaaggaaaaaaacaaggaggtggtggtgaagtttattaagaaggagaaggtcttggaggattgttggattgaggatcccaaacttgggaaagttactttagagatcgcaattctatccagggtggagcacgccaatatcatcaaggtattggatatatttgaaaaccaagggttcttccagcttgtgatggagaagcacggctccggcctagacctcttcgctttcatcgaccgccaccccaggctggatgagcccctggcgagctacatcttccgacaactagtgtcagcagtgggatacctgcgcttgaaggacatcatccaccgtgacatcaaggatgagaacatcgtgatcgccgaggacttcacaatcaagctgatagactttggctcggccgcctacttggaaaggggaaaattattttatactttttgtgggaccatcgagtactgtgcaccggaagttctcatggggaatccctacagagggccggagctggagatgtggtctctgggagtcactctgtacacgctggtctttgaggagaaccccttctgtgagctggaggagaccgtggaggctgccatacacccgccatacctggtgtccaaagaactcatgagccttgtgtctgggctgctgcagccagtccctgagagacgcaccaccttggagaagctggtgacagacccgtgggtaacacagcctgtgaatcttgctgactatacatgggaagaggtgtttcgagtaaacaagccagaaagtggagttctgtccgctgcgagcctggagatggggaacaggagcctgagtgatgtggcccaggctcaggagctttgtgggggccccgttccaggcgaggctcctaatggccaaggctgtttgcatcccggggatccccgtctgctgaccagctaaacaccaatttcttcctgcttttctccacttggtttggaaaatcacacagttttcaggctccatctgtttggagaaaatacattctgaagcatccccaattcaccttctaaaaactcatgtgcaggtttgataaacaccagaacagaagacagtgatgctgtattattttagatttattacatagatttggaattcacttttttcatgacctagaaaaaaacattccagtgttcaactgttttatattattaaagggcttttaatttgtgaacttctgaaggcatgagtgttttctctttctacttttgtatatgtgcatgttttgtttcctctgacttggtatatgctcatctgagtgacggatatgtgaaatttgtagaactggttagtc

SEQ ID NO: 299761 - DNA, 3414 bp, Artificial Sequence
  derived and/or modified sequence
atggggtttcctgactctgcgcgagcgggtcaacgcagtctggtcgacatcatttccagaagcggggagaagatccccgtcagtgtgtggatgaagcgcatgaggcaagagaggcgactatgttgtgtcgtcgtgctggagccagtggaacgagtgagcacatgggttgcatttcaatccgacggcacagtgacctcatgtgactctttgttcgctcatctgcacggctatgtctccggggaagacgtggctggacaacacattaccgatctgatacctagcgtgcagctgccacccagtggacaacatatcccgaaaaacctcaagatccagcggtctgtcggtagagcacgagacgggacgacattccctctgtcattgaaactaaaatcccaaccaagctcagaggaggcgaccaccggcgaggccgctcctgtatcgggctacagagcttcagtttgggtattttgtactattagtggtttgatcacgctgctgccagatggtacaatacacggcatcaaccactcgtttgccttaactctgttcggctacggcaaaaccgagcttttaggcaagaacattacttttctcatcccaggattttactcatacatggacctcgcatacaatagctccctgcagttgccagatttagcctcttgtctggatgttgggaatgagagcgggtgtggtgagaggactctggatccttggcaggggcaggaccctgcagagggaggacaggatccccgtattaatgtcgtactcgccggaggacatgtcgtcccccgtgatgaaatcaggaagctcatggagagtcaggatatcttcaccggtactcagactgagttgatcgcgggaggccagctgctgtcctgcctttccccccagccagcccctggcgttgacaatgtacccgaaggcagtcttcccgtgcacggagagcaggccctgcccaaagaccaacagatcaccgctctgggaagagaagaaccagtagctattgagtcgcccggacaggatttactgggcgagagcagaagtgagccggtggatgtgaagcccttcgcctcgtgtgaagattcggaggcacctgtacccgcagaagatggcggttcagacgccggaatgtgtggcttgtgccagaaggctcaactcgagaggatgggtgtgtcaggtccctctgggagcgacctgtgggccggtgcagcagtcgcaaagccgcaagctaaggggcaacttgcaggcggatcacttctcatgcattgcccctgttatggatcagagtggggcctgtggtggcggtcccaagatctggcccctagccctagtggaatggcgggactctccttcggaacacctaccctggatgagccttggttgggagtggaaaatgaccgtgaagaattgcagacatgcttaattaaggaacagctgtctcagctttcacttgccggtgccctcgatgttccacatgcagagttggtacccaccgagtgccaggccgtgacggccccagttagctcttgcgacctgggtggcagggacctgtgtggaggatgcaccggctcatctagtgcctgttatgccctggccaccgacctccctggcggacttgaggctgtggaagctcaggaggttgacgtgaattccttctcatggaacctgaaggagctcttcttcagcgatcaaacggatcagacttccagtaactgctcatgtgcgaccagcgaactgagggaaacaccttcttccctagctgttgggtctgacccagacgtgggttctctgcaggagcagggcagctgcgtacttgatgaccgcgagctactgctgctgactgggacgtgcgtagatctgggtcaagggcgacggttcagagagtcctgcgtaggccacgatccaacagagcccctggaggtctgcctcgtgtcctccgagcattacgccgcttccgatcgcgaaagtccaggtcatgtaccttcaacgctggacgcaggtccagaggatacatgcccctcagctgaggaacctcgcttaaatgtgcaggtcaccagcacgccagttatagtgatgcggggagcagccggtttacagcgcgagatccaggaaggtgcttacagcggatcctgttaccacagggacggcttgagactatcaatacagttcgaggtgcgcagagtggaactgcagggccctacgcctctgttttgctgttggctggtgaaggatctactgcattctcagagggactcagccgctaggactagactgtttcttgcatcgctccccggatctacccatagcacagcggctgaattgacggggccaagtctggtcgaagttcttagagcaagaccatggtttgaggaaccccctaaagccgtggagctggaagggctggccgcttgtgaaggcgagtatagccagaagtacagtacaatgagtcccctgggctcaggagcttttggattcgtttggactgccgtggacaaagaaaaaaataaggaagttgtcgtgaagttcattaaaaaggaaaaggtgctcgaggactgttggatagaggatcccaaactggggaaggtgaccttagaaattgcgattctgtctcgggtggaacacgcgaacatcatcaaagtgctcgatatcttcgagaatcagggcttttttcaactggtgatggaaaaacacggatccggccttgatctgttcgccttcatagatagacaccctcggctcgatgagcccttagctagctatattttcagacagctggtttcagctgtcgggtatctacgcttgaaagacatcattcacagagacatcaaagacgagaatattgtgatcgccgaggatttcacaattaagctcatcgattttggatccgcagcatatttggagcggggaaaactcttctataccttttgtggaaccattgagtactgtgcgccagaggttttgatgggaaacccctatcgcggtccagagttagaaatgtggagcctcggcgtgacactgtacaccctggtgtttgaggagaatccattttgtgagttagaggagaccgtggaggccgctattcatcccccataccttgtttcgaaagaactgatgtctttggtttcaggtctgctgcagcccgttccagaacgtagaaccacgctagaaaaactggtgacagacccatgggtgacccagccagttaatctcgctgactacacttgggaagaagtattccgagtcaataagccagagtccggggtcctttctgccgcatccttagaaatggggaacaggtccctgagtgacgtggcccaggcgcaagaactttgtggtggtcccgtgcctggagaggctcctaatgggcagggctgtctgcatcctggtgatcccagactcctaacaagctag

SEQ ID NO: 299762 - DNA, 3414 bp, Artificial Sequence
  derived and/or modified sequence
atgggcttccccgacagcgccagagccggccagagaagcctggtggacatcatcagcagaagcggcgagaagatccccgtgagcgtgtggatgaagagaatgagacaggagagaagactgtgctgcgtggtggtgctggagcccgtggagagagtgagcacctgggtggccttccagagcgacggcaccgtgaccagctgcgacagcctgttcgcccacctgcacggctacgtgagcggcgaggacgtggccggccagcacatcaccgacctgatccccagcgtgcagctgccccccagcggccagcacatccccaagaacctgaagatccagagaagcgtgggcagagccagagacggcaccaccttccccctgagcctgaagctgaagagccagcccagcagcgaggaggccaccaccggcgaggccgcccccgtgagcggctacagagccagcgtgtgggtgttctgcaccatcagcggcctgatcaccctgctgcccgacggcaccatccacggcatcaaccacagcttcgccctgaccctgttcggctacggcaagaccgagctgctgggcaagaacatcaccttcctgatccccggcttctacagctacatggacctggcctacaacagcagcctgcagctgcccgacctggccagctgcctggacgtgggcaacgagagcggctgcggcgagagaaccctggacccctggcagggccaggaccccgccgagggcggccaggaccccagaatcaacgtggtgctggccggcggccacgtggtgcccagagacgagatcagaaagctgatggagagccaggacatcttcaccggcacccagaccgagctgatcgccggcggccagctgctgagctgcctgagcccccagcccgcccccggcgtggacaacgtgcccgagggcagcctgcccgtgcacggcgagcaggccctgcccaaggaccagcagatcaccgccctgggcagagaggagcccgtggccatcgagagccccggccaggacctgctgggcgagagcagaagcgagcccgtggacgtgaagcccttcgccagctgcgaggacagcgaggcccccgtgcccgccgaggacggcggcagcgacgccggcatgtgcggcctgtgccagaaggcccagctggagagaatgggcgtgagcggccccagcggcagcgacctgtgggccggcgccgccgtggccaagccccaggccaagggccagctggccggcggcagcctgctgatgcactgcccctgctacggcagcgagtggggcctgtggtggagaagccaggacctggcccccagccccagcggcatggccggcctgagcttcggcacccccaccctggacgagccctggctgggcgtggagaacgacagagaggagctgcagacctgcctgatcaaggagcagctgagccagctgagcctggccggcgccctggacgtgccccacgccgagctggtgcccaccgagtgccaggccgtgaccgcccccgtgagcagctgcgacctgggcggcagagacctgtgcggcggctgcaccggcagcagcagcgcctgctacgccctggccaccgacctgcccggcggcctggaggccgtggaggcccaggaggtggacgtgaacagcttcagctggaacctgaaggagctgttcttcagcgaccagaccgaccagaccagcagcaactgcagctgcgccaccagcgagctgagagagacccccagcagcctggccgtgggcagcgaccccgacgtgggcagcctgcaggagcagggcagctgcgtgctggacgacagagagctgctgctgctgaccggcacctgcgtggacctgggccagggcagaagattcagagagagctgcgtgggccacgaccccaccgagcccctggaggtgtgcctggtgagcagcgagcactacgccgccagcgacagagagagccccggccacgtgcccagcaccctggacgccggccccgaggacacctgccccagcgccgaggagcccagactgaacgtgcaggtgaccagcacccccgtgatcgtgatgagaggcgccgccggcctgcagagagagatccaggagggcgcctacagcggcagctgctaccacagagacggcctgagactgagcatccagttcgaggtgagaagagtggagctgcagggccccacccccctgttctgctgctggctggtgaaggacctgctgcacagccagagagacagcgccgccagaaccagactgttcctggccagcctgcccggcagcacccacagcaccgccgccgagctgaccggccccagcctggtggaggtgctgagagccagaccctggttcgaggagccccccaaggccgtggagctggagggcctggccgcctgcgagggcgagtacagccagaagtacagcaccatgagccccctgggcagcggcgccttcggcttcgtgtggaccgccgtggacaaggagaagaacaaggaggtggtggtgaagttcatcaagaaggagaaggtgctggaggactgctggatcgaggaccccaagctgggcaaggtgaccctggagatcgccatcctgagcagagtggagcacgccaacatcatcaaggtgctggacatcttcgagaaccagggcttcttccagctggtgatggagaagcacggcagcggcctggacctgttcgccttcatcgacagacaccccagactggacgagcccctggccagctacatcttcagacagctggtgagcgccgtgggctacctgagactgaaggacatcatccacagagacatcaaggacgagaacatcgtgatcgccgaggacttcaccatcaagctgatcgacttcggcagcgccgcctacctggagagaggcaagctgttctacaccttctgcggcaccatcgagtactgcgcccccgaggtgctgatgggcaacccctacagaggccccgagctggagatgtggagcctgggcgtgaccctgtacaccctggtgttcgaggagaaccccttctgcgagctggaggagaccgtggaggccgccatccaccccccctacctggtgagcaaggagctgatgagcctggtgagcggcctgctgcagcccgtgcccgagagaagaaccaccctggagaagctggtgaccgacccctgggtgacccagcccgtgaacctggccgactacacctgggaggaggtgttcagagtgaacaagcccgagagcggcgtgctgagcgccgccagcctggagatgggcaacagaagcctgagcgacgtggcccaggcccaggagctgtgcggcggccccgtgcccggcgaggcccccaacggccagggctgcctgcaccccggcgaccccagactgctgaccagctag

SEQ ID NO: 299763 - protein, 733 aa, Artificial Sequence
  derived and/or modified sequence
MERRSESPCLRDSPDRRSGSPDVKGPPPVKVARLEQNGSPMGARGRPNGAVAKAVGGLMIPVFCVVEQLDGSLEYDNREEHAEFVLVRKDVLFSQLVETALLALGYSHSSAAQAQGIIKLGRWNPLPLSYVTDAPDATVADMLQDVYHVVTLKIQLQSCSKLEDLPAEQWNHATVRNALKELLKEMNQSTLAKECPLSQSMISSIVNSTYYANVSATKCQEFGRWYKKYKKIKVERVERENLSDYCVLGQRPMHLPNMNQLASLGKTNEQSPHSQIHHSTPIRNQVPALQPIMSPGLLSPQLSPQLVRQQIAMAHLINQQIAVSRLLAHQHPQAINQQFLNHPPIPRAVKPEPTNSSVEVSPDIYQQVRDELKRASVSQAVFARVAFNRTQGLLSEILRKEEDPRTASQSLLVNLRAMQNFLNLPEVERDRIYQDERERSMNPNVSMVSSASSSPSSSRTPQAKTSTPTTDLPIKVDGANINITAAIYDEIQQEMKRAKVSQALFAKVAANKSQGWLCELLRWKENPSPENRTLWENLCTIRRFLNLPQHERDVIYEEESRHHHSERMQHVVQLPPEPVQVLHRQQSQPAKESSPPREEAPPPPPPTEDSCAKKPRSRTKISLEALGILQSFIHDVGLYPDQEAIHTLSAQLDLPKHTIIKFFQNQRYHVKHHGKLKEHLGSAVDVAEYKDEELLTESEENDSEEGSEEMYKVEAEEENADKSKAAPAEIDQR

SEQ ID NO: 299764 - DNA, 5306 bp, Artificial Sequence
  derived and/or modified sequence
agaggcgcttaagttaccaagggattagggctgatctcaggagaggtaaacgaccatccttggaacacggagcccttcttccctgcccggtatctgcgcgtgccttgggtagtccgcacaaccctccccagctccggatgccctgggatacccggacccaggagagagcgcgtcagcggggcgcagctactttgcactcgccgattctgacacaacagatagttaattggggccttcgaaatcaaggactaagaagtactgaactcctaatatcaccaattcttctaagttcctggacattgatccggaggaggattcgcagttcaacatcaaggtccctgtgcgttttattgcgacctgccggtgggaactttgtctccgagtcggagcagcatggagcggcggagcgagagcccgtgtctgcgggacagccccgaccggcggagcggcagcccggacgtcaaggggcctcccccagtgaaggtggcccggctggagcagaacggcagccccatgggagcccgcgggaggcccaacggcgccgtggccaaggccgtgggaggtttgatgattcctgtcttttgtgtcgtggagcagttggacggctctcttgaatatgacaacagagaagaacacgccgagtttgtcctggtgcggaaagatgtgctttttagccagctggtggagactgcgctcctggccctggggtattctcacagctctgcggcccaggcccaaggaataatcaagctgggaaggtggaaccctctccccctcagttatgtgacagatgcacccgacgcgacagtggccgacatgctacaagatgtctatcatgttgtgacgttgaaaatccaattacaaagttgttcaaagttggaagacttgcctgcggagcagtggaaccatgccacagtccgcaatgccttaaaggaactgctcaaagagatgaaccagagcacattagccaaagaatgccctctctcccagagtatgatttcatccattgtaaatagcacatattatgccaatgtgtcagcaaccaagtgccaggagtttgggagatggtataaaaagtacaagaagattaaagtggaaagagtggaacgagaaaacctttcagactattgtgttctgggccagcgtccaatgcatttaccaaatatgaaccagctggcatccctggggaaaaccaacgaacagtctcctcacagccaaattcaccacagtactccaatccgaaaccaagtgcccgcattacagcccatcatgagccctggtcttctttctccccagcttagtccacaacttgtaaggcaacaaatagccatggcccatctgataaaccaacagattgccgttagccggctcctggctcaccagcatcctcaagccatcaaccagcagttcctgaaccatccacccatccccagagcagttaagccagagccaaccaactcttccgtggaagtctctccagatatctaccagcaagtcagagatgagctgaagagggccagtgtgtcccaagctgtctttgcaagagtggcattcaaccgcacacagggattgttgtctgagattctgcgtaaggaagaagaccctcggacagcctctcagtctcttctagtaaacctgagggccatgcagaatttcctcaatctgccagaagtggagcgagatcgcatctaccaggatgagagggagcggagcatgaatcccaatgtgagcatggtctcctcggcctccagcagtcccagctcctcccgaacccctcaggccaaaacctcgacaccgacaacagacctccctattaaggtggacggcgccaacatcaacatcacagctgccatttatgacgagatccaacaggagatgaaaagggccaaggtgtctcaagccctgtttgccaaagtggctgcaaataaaagtcagggctggctgtgtgaactgctccgctggaaggagaacccaagcccagaaaaccgcaccctctgggaaaacctctgtaccatccgtcgcttcctgaaccttccccagcatgagagggatgtcatctatgaggaggagtcaaggcatcaccacagcgaacgcatgcaacacgtggtccagcttccccctgagccggtgcaggtacttcatagacagcagtctcagccagccaaggagagttcccctcccagagaagaagcgcctcccccacctcctccgactgaagacagttgtgccaaaaagccccggtctcgcacaaagatctccttagaagccctggggatcctccaaagctttattcatgatgtaggcctgtacccagaccaggaagccatccacactctttcggctcagctggatctccccaaacacaccatcatcaagttcttccagaaccagcggtaccacgtgaagcaccacgggaagctgaaagagcacctgggctccgcggtggacgtggctgaatataaggacgaggagctgctgaccgagtcagaggagaacgacagcgaggaaggctccgaggagatgtacaaagtggaggctgaggaggaaaatgctgacaaaagcaaggcagcacctgccgaaattgaccagagataatgtgaacttctactaggcaaagcaatacatcggtccaaggattttctgctttcatttctttaaaagttttttgttagtttgttttttgtttttgtttttgggtttttttggctttatttttgtctttttatgtctgttttgtttttcttacccttttggacatttctttgttgcacaggatacacctatagactgaataagttcagtatttccgaatcagacatcgccttggcaaagacactaaagcgttacactttatcccgtctctatgactggatcatagtcattataatcacaggagactctgccttcattatccttgcacttaacggaagttacatcaggcaagtaccaggatgaaaagaactatgaaataaatgaaggaagctacaagtgtgtgtgtatatgtatatgtatatatctctatatttacatatatatattaaaattgcatgggacagagactttgcaatccgaaagaatagactgtgaaatgagttcttaaagaaaagacttgtttatgtattaaaaaaaccacttcacagtgagtcgctttggctttttgataaactgcggcctgctctcagggtggggtgactatttttgaattcctatttattttttgtgtttgtccctgattttttttttttaattctatggcttcctatctggcagcttaatgggtaatttttgaggtatgtatttaacaaaataaacgacactgccgaaaaaaaaaaaagtgaagtgaaaacaatcagggcacattaaaatgatacaagtcaaataaatcttaaagacacaatgcacacttaaaatgactcaataaaatgacttgctacgttccgttattcaatttgtcattactgtagtgaacagatgcatttctgtggaattccaaataagtaaaactgaaattcagtgcagagaaaactttgtccactagtgcaagtcttgatcaaatgacattttgacattggacatatggaattcatagtatgagccacattttgttgtgaaatttatttacctgcttgtggcttcaaatctgaaaattaataagcctgctcgtttaaaagttgtttgttgttgctgtttttttgtctttttgttttttactagaaaatagttcagtgtaatattaagttagaaaagaagttgctgcccagttaaaggggctccctctcaaataaatctccatccttccctctcccaaaagacatttctgatttctgcttcactttgggcttcctcttcttcgtacacattccatctacctaatcaaacattttcagtccctgatctctcctgtcccttttcctgggatgacagccctaacaagaactgtttttgaatcgttgtgcagctccaggcaatagagtatgtgaagcgatttcagtagaatcacttactcatcctaaaagaaaacattatcccagttacctacatcgcaattaccttatgtaaagcagaactaatgctgactggatgtttaatgggatgagcattaaagctgcaatctactatagtactccagatctctttcggcttcctatgagaaacaccagaagcattactttccacttctacttacagtaattgcaagaggagacctcacattcaggactggcctagtgaacgtaatccatgctttaaactggccattaaacagtcccacatggttggattttttttttttttttgagttgtgctttcacaaaaccttgtcaaagacctcatgcaatatcactttgaaagttattttctgtttactacacaaacattgtaatataactgttaatactatttatatatttgaaaggtataaaaggtaggagttaaaaaaaaaacctctatgtgtagatattaactcagaacttacaatatacagggagaagacatgttgcaatacaagctaattctagctgctcagtaacctctggagtttttaaagggacattttcctgtactttttcaaataatgatgtttaaaaattatcttgacataagcgtcatatacctttgcaaaaggatggttgtttgcagttagccctggccccatccttcctatttctgtagtatgctgcagctttaatcagaaagtccatggttgctgcttcctgatctccgagttactctttccaaattgtcttcttacactgttgctgaaggtcactctgtacacgtaatggaaactgattttgccaagctcttacaaggtggttcatctatcgatggcatccgcatttggtatcttttacacttcaaccaaaaatttattaggtatttttcaatgctaagtcttgccttttattttttaatttcactgccaagtttgcagtggttctaagtgaatctgtgggcattttagcctgtggtcttgccagatctttgcgaattacaatgcatatatgtctatttattcaatatctgtcatataatatctatttggaagaagaaactttctcttgtagtgcctcttgacaaagcacaatttcccgcctttttttttttttgtgaaatgaaaaaaacaaattgtgttttattgcggtatcaacaatgtgaataaggattaacatattgtaaatgttcttttttccatgtaaatcaactatctttgttatcactaagtgataattaatttttaacttatgtgcattgttaggctgttagaattttttggttgttaaaataaacgcattcaataaatatga

SEQ ID NO: 299765 - DNA, 2202 bp, Artificial Sequence
  derived and/or modified sequence
atggaacgacggagtgaatcaccatgtctgcgagattctcccgatagacgttctggatcaccagatgtcaaggggcctccccccgtgaaagtggctaggttggaacaaaacgggagccctatgggtgcacggggccgtcccaacggcgctgtggcaaaagccgtgggcggcctgatgattcctgtgttttgtgttgtggaacagttggacggtagcctggaatacgataatagagaagagcacgctgagtttgtgctcgttcggaaggacgtcctatttagccagctggtcgagactgctctgctggccctcggatactcccactcctccgccgcacaggctcagggcatcattaagttgggccgctggaaccctttgcctttatcttatgtgaccgacgccccggatgccaccgtggctgatatgttgcaagatgtctaccatgtggtcaccttaaagatacaacttcaatcctgcagtaagctggaggatcttcccgctgagcagtggaaccacgccacggtgcgcaacgctctgaaagagctattgaaagagatgaatcagtcgaccctcgcgaaggagtgcccgttgagtcagtcaatgattagctccattgttaattcgacctactatgccaatgtttccgccacaaaatgccaggagtttggtcgctggtacaagaaatacaaaaaaataaaggttgagcgcgttgagcgcgaaaatttatcagactactgtgtcctaggacagcgcccaatgcatcttccaaacatgaaccagttggcgtccctcggtaagactaatgaacagtcaccccactcacagattcaccactccacgcccatcagaaatcaggtcccggcgctacagcctatcatgagcccggggttactttctccccaattgtctccacagttagttaggcagcagatcgccatggcacatctgatcaaccagcagattgcggtgagtagattgcttgcacaccagcaccctcaagccataaaccagcagttcttgaatcaccctccaatcccgagagctgttaagccagaacctaccaattcatccgtagaagtgtctcccgatatctatcagcaagtccgggacgagcttaagcgtgcctctgtttcacaggctgtttttgcccgggtggcatttaatcggacgcagggactcctgagtgagatactgcgcaaggaagaagatccacgcacggcctctcagtcccttctggtgaacctgcgggccatgcagaattttctcaatctgccagaagtcgagcgcgacagaatctaccaagacgagagggagcggtccatgaacccaaatgtgtctatggtttcttctgcctcatccagtccaagttcctcgcggaccccacaagccaaaactagcacccccacaacagatctgcctattaaagtcgacggtgctaacattaacatcacagccgcgatttacgacgagatccagcaagaaatgaagcgggcgaaggtaagccaggctttgtttgccaaggtcgcagctaacaaatcccagggatggctgtgtgagctgctgcgctggaaagagaaccctagtccagaaaacagaactttgtgggagaacctatgcaccatcagaaggtttctcaacttaccacagcacgagcgggatgttatctacgaggaggaatctcggcaccatcacagtgagagaatgcagcacgtggtccagctacctcccgagccggtccaggttcttcatcgtcagcagtcccagcctgctaaagagtcgagtccgcctagggaggaagccccgcctccccctccccctacagaggactcatgtgcaaaaaagcctagaagtaggactaaaatttccttggaagctctcggaatactgcagagttttatacatgatgtgggcctctaccccgatcaagaggccatccataccttgtccgcccagttggacctgccaaaacacacgattatcaaattcttccagaatcaacgctaccacgtgaaacaccacggtaaactgaaagaacacctcggctccgcagtcgacgtggcagaatacaaagacgaggagctgctcactgaatctgaggagaacgattcagaagaagggtccgaagagatgtacaaggtggaagccgaggaagagaatgcagacaaatctaaggctgcaccagcggagatagaccagcgctag

SEQ ID NO: 299766 - DNA, 2202 bp, Artificial Sequence
  derived and/or modified sequence
atggagagacgcagcgagtctccgtgtctgagggacagccccgatcggaggtcagggagccctgacgttaaggggcccccaccggtcaaggtggcacggctggaacaaaatggttcccctatgggagccagaggcaggcccaacggtgccgttgccaaggccgtgggcggcctgatgattccggttttttgtgttgtggaacagttagacggcagtctggagtacgacaatcgggaggagcatgctgagttcgtccttgtcagaaaggacgtgctgttctcacagctcgtggagaccgctctgctggccctgggttactcgcatagctccgccgctcaagctcagggtatcattaagctcgggaggtggaatccactgccactgagctatgtgacagatgcacccgacgctaccgttgctgatatgctccaggacgtctaccacgttgtaacactcaagatccagctccagtcgtgtagcaagctggaggacctgcccgccgaacaatggaaccatgccacagtgcgcaatgccttaaaagagctgcttaaggagatgaaccagtccactctcgccaaggaatgtccattgtcccagtccatgatttcaagtattgtgaactctacctattacgctaacgtttcggccacaaagtgtcaggaatttgggcgttggtataaaaaatacaaaaagattaaggtcgagcgagtggagagagagaatcttagtgactattgcgtgcttggacagcgcccaatgcacctacccaatatgaatcagttggcatcccttggcaaaacaaacgagcagagcccgcattcacagatccatcactctacacccatccggaaccaagtgccagctctgcagcccattatgtccccaggtctgctgagcccccagttaagccctcagctggtgcgccagcagattgccatggcacaccttattaaccagcagattgccgtgtcccgcctgctggcccaccagcacccccaggccattaatcagcagttccttaaccaccctccaatccctcgcgcagtcaaaccagagccaacaaattcctctgtggaggtgagccccgatatttatcaacaggtacgagatgaactcaaacgcgcaagcgtgagtcaggccgtgttcgcaagagtggcctttaatagaacacaggggttactctccgaaatcctgcgcaaggaggaagaccctaggaccgcgtcccagagcctcttagtgaatctgagagctatgcaaaacttcctgaatctgcccgaggtcgaacgagatagaatttaccaagatgagcgcgagagaagtatgaatcccaatgtgagtatggtcagcagtgcctcttcgtccccatccagttccagaacacctcaggcaaagacatcaacccccaccaccgacctgcccattaaggtggatggtgccaatatcaacattacagccgcaatatatgacgaaatccagcaggagatgaaacgggcaaaggttagtcaggcacttttcgctaaggtcgcagccaacaaatcccagggctggctttgcgaacttctgcgctggaaggagaatccgtctccggagaacagaaccctgtgggagaacctgtgcactatccggagatttctcaatctgcctcagcacgaaagggacgtgatctatgaggaggaatcccgccatcaccactccgagcgaatgcaacacgtggtacaattaccacctgaacccgtgcaagtgctgcaccgccagcaatcacagcctgccaaggagtcctctcccccacgggaggaggctccacccccacctcctcctacagaggacagttgtgcgaaaaaacccagatctaggactaagatttcgctagaagccctcggtatactccaatcctttatacacgacgttgggctctatcccgaccaggaagccatccacactttaagtgcccagctggacttgcctaagcacactattattaaattttttcagaaccagaggtaccatgtcaaacaccatggcaagctgaaggagcacttgggatccgccgtggacgtggccgagtacaaggacgaggagctcctgacggagagtgaagagaacgattccgaagaggggtctgaggaaatgtataaggtggaggcagaagaggagaacgcggataaatccaaggccgcccccgccgaaatcgaccagcggtag

SEQ ID NO: 299767 - DNA, 2202 bp, Artificial Sequence
  derived and/or modified sequence
atggaaagaagatctgaaagcccttgtctgagggactcaccagatagaaggtcgggtagtccggacgttaagggtcctccaccggtcaaagtagcccgacttgaacagaacggaagcccgatgggcgctaggggaaggccaaatggggccgtggccaaagcagtgggcgggctcatgatccccgtgttttgcgtagtggagcaacttgacggcagcctcgaatacgacaatcgcgaggagcacgccgagttcgttctggtgagaaaggatgttctgttcagtcagttagtagagacggctcttttagccttaggctattcccacagttccgcagcccaggcccagggaatcattaaactgggcaggtggaatccactgccccttagttacgtgactgatgcaccggacgccaccgtagccgacatgctccaggatgtctaccacgtggttaccctgaagatccagctccagtcatgttccaaactcgaagacctccctgccgagcagtggaatcacgcaaccgttcggaatgctttgaaggagctcctgaaggaaatgaaccagagcaccttggctaaggagtgtccattgtcccagagcatgatcagctccatcgtgaacagcacctattatgccaacgtgagcgcaacaaagtgccaggaattcggtagatggtataagaagtacaagaaaattaaggtggaacgcgtggagagagagaatctgtccgattattgcgtgttggggcaacggcctatgcatctgccgaatatgaaccaattggcgtcactaggcaaaactaatgagcagtccccacatagccagatacatcacagtaccccgatcagaaatcaagtgccagcactccagcccattatgtcgcctggactactgtctcctcagttaagtccacagctggtcaggcagcagatcgccatggcgcatcttatcaaccagcaaattgcagtgagccggttgctggcccatcaacacccccaggccatcaaccagcagtttctcaaccacccccccatcccacgtgcagtgaagcccgaacctaccaacagcagcgtcgaagtctccccggacatctatcagcaggttagagacgagctaaagcgggcttcagtaagccaggcggtttttgccagagtagccttcaacaggacacaggggctcctgagtgaaatcttacggaaggaggaggatccgcgcacagccagccagagcctgctggtcaatctcagagcaatgcagaatttccttaatctgcccgaagtcgaaagagacaggatttatcaagacgaaagggaacggtccatgaatccaaacgttagcatggtcagctccgcctcctcaagtccgagctcatcacggactccacaagcaaaaacatccacacctacaacagatctgccgatcaaagtggatggagcaaacatcaatatcaccgccgccatctacgacgagatccagcaggagatgaagcgcgctaaggtctcccaggctctgttcgccaaggttgctgcgaacaagagccaaggttggctgtgtgagctgctccggtggaaggaaaaccccagtccagagaacagaaccctctgggagaatctgtgtaccattcggcgctttctgaacctaccccaacacgagcgggacgtcatctatgaggaagagagccgccaccatcatagcgaaagaatgcagcatgttgttcagttgcccccagagcctgttcaggtgctacataggcagcagtctcaaccagcaaaagagtcctccccccctagggaggaagctccgccccccccccccccaaccgaggacagctgcgcgaaaaagccccgttcaaggacaaaaatcagcctggaagctcttggcatcctgcaatccttcattcacgatgtgggattgtaccctgaccaggaagccatccatacactgtcagcccaactggatctgcccaaacatactatcatcaaatttttccagaatcaaagataccatgtgaaacaccacggaaagcttaaagaacaccttgggagcgccgtcgatgttgcggagtataaggatgaggaactgcttactgaaagtgaagagaatgatagcgaagagggctccgaggagatgtacaaagttgaggcagaggaggagaatgctgacaagagtaaagcagcccccgctgaaatcgaccagaggtag

SEQ ID NO: 299768 - DNA, 2202 bp, Artificial Sequence
  derived and/or modified sequence
atggagaggagaagtgagagcccctgcctgcgggacagcccagaccggcgcagcggcagcccagatgtgaagggccccccacctgtgaaggtggcccggctggagcagaatggcagccccatgggcgcccggggccggcccaacggggctgtggccaaggctgtgggcggcctgatgatccctgtgttctgtgtggtggagcagctggatggcagcctggagtatgacaaccgggaggagcacgccgagtttgtgctggtgaggaaggatgtgctcttcagccagctggtggagacagccctgctggccctgggctacagccacagcagcgctgcccaggcccagggcatcatcaagctgggccgctggaaccccctgcccctgtcctatgtgacagatgccccagatgccaccgtggccgacatgctgcaggatgtgtaccacgtggtgaccctgaagatccagctgcagagctgcagcaagctggaggacctgcctgctgagcagtggaaccacgccaccgtgagaaatgccctgaaggagctgctgaaggagatgaaccagagcaccctggccaaggagtgccccctgagccagagcatgatcagcagcatcgtgaacagcacctactatgccaacgtgtctgccaccaagtgccaggagtttggccgctggtacaagaagtacaagaagatcaaggtggagcgggtggagcgggagaacctgagtgactactgtgtgctgggccagaggcccatgcacctgcccaacatgaaccagctggccagcctgggcaagaccaatgagcagagcccccacagccagatccaccacagcacccccatccggaaccaggtgcctgccctgcagcccatcatgagccctggcctgctgagcccccagctgagcccccagctggtgcggcagcagatcgccatggcccacctgatcaaccagcagattgctgtgtcccggctgctggcccaccagcacccccaggccatcaaccagcagttcctgaaccacccccccatccccagggctgtgaagccagagcccaccaacagctctgtggaggtgtccccagacatctaccagcaggtgagagatgagctgaagagggcctctgtgtcccaggccgtgtttgcccgggtggccttcaacagaacccagggcctgctgtctgagatcctgaggaaggaggaggaccccaggacagccagccagagcctgctggtgaacctgcgggccatgcagaacttcctgaacctgcctgaggtggagcgggaccgcatctaccaggatgagcgggagaggtccatgaaccccaacgtgtccatggtgagcagcgccagcagcagccccagcagcagcaggaccccccaggccaagaccagcacccccaccacagacctgcccatcaaggtggatggagccaacatcaacatcacagctgccatctatgatgagatccagcaggagatgaagagggccaaggtgtcccaggccctgtttgccaaggtggccgccaacaagagccagggctggctgtgtgagctgctgcgctggaaggagaaccccagccctgagaacagaaccctgtgggagaacctgtgcaccatccgccgcttcctgaacctgccccagcacgagagagatgtgatctatgaggaggagagccgccaccaccacagcgagaggatgcagcacgtggtgcagctgcccccagagcctgtgcaggtgctgcaccggcagcagagccagcctgccaaggagagcagccccccccgggaggaggcccctcctcctcctccacccacagaggacagctgtgccaagaagcccaggagcaggaccaagatcagcctggaggccctgggcatcctgcagagcttcatccatgatgtgggcctgtacccagaccaggaggccatccacaccctgagcgcccagctggacctgcccaagcacaccatcatcaagttcttccagaaccagcgctaccacgtgaagcaccacggcaagctgaaggagcacctgggcagcgctgtggatgtggccgagtacaaggatgaggagctgctgacagagagcgaggagaatgattctgaggagggcagcgaggagatgtacaaggtggaggccgaggaggagaatgctgacaagagcaaggccgccccagctgagattgaccagaggtag

SEQ ID NO: 299769 - DNA, 2202 bp, Artificial Sequence
  derived and/or modified sequence
atggagcggcggagcgagagcccctgcctgcgggacagccccgaccggaggtccggctccccagatgttaaaggcccccccccagtgaaagtggctcgactcgaacagaacgggtcccctatgggtgctcggggccgcccaaacggggccgtcgcgaaggccgtcggaggcctgatgatcccggtgttttgcgtcgtcgagcaactcgacggctcattggagtatgacaatagggaagaacatgccgaattcgtgctagtcagaaaagacgtgctgtttagccagctcgtcgagacagcattacttgccttggggtattcccactcgagcgccgcccaggcgcaaggcatcatcaaactaggccggtggaacccgctgccattgtcgtacgtgacagatgcgcccgatgctacagttgccgatatgcttcaggacgtctatcacgtggttactctgaagatccagctgcaaagttgttccaaactggaggatttgcctgctgagcagtggaatcacgctactgtccggaatgctctgaaggagcttctcaaggaaatgaaccaaagtactctcgcaaaggagtgcccactgtcccaaagcatgatttcttccattgtgaactctacctattacgccaacgtatctgctacaaaatgtcaggagtttgggcgctggtataagaaatataagaaaatcaaggtggagagggtggaacgcgagaatctgtcagactattgcgtgctcggccaaagacccatgcacctacccaatatgaatcagttggcctcattgggtaaaactaacgagcagtctccacactctcagatccaccacagcacgcctattcgcaaccaggtgcccgctttgcaacccattatgagccctggtctgcttagcccgcagctgagccctcagctcgttagacagcaaattgcgatggcccatcttataaaccagcagatcgcggtgagtcgactgttagcacatcagcaccctcaggctatcaatcaacagttcctgaatcacccgcctatacctcgtgcagtgaagccagagcccaccaactcatctgtggaggtgtcccctgacatctaccagcaggttagggacgaactgaaaagggctagtgtgtcacaagccgtgtttgccagagttgcgttcaataggactcaggggcttctatcggaaatacttagaaaagaagaagatccgcggactgcatcccaatcgctgctagtaaacttgcgagccatgcaaaacttcctgaacctgccggaggtggagagagatagaatctatcaggatgaacgggaacgctccatgaaccccaatgtgtctatggtcagttccgcctcttcatcccccagttcttctaggacgccacaggccaagaccagcacccctacaacagatctgcctataaaagttgacggcgctaatattaacattaccgccgccatttatgatgagattcagcaggagatgaagagggccaaggtgagtcaggcgcttttcgcgaaggtcgccgccaataagtcccagggctggttgtgcgagctgcttaggtggaaagagaatccttccccagagaaccgtaccctgtgggaaaatttgtgtactattcgtaggtttcttaacttgcctcagcacgaaagggacgtcatctacgaagaagagtcaaggcatcaccacagcgaacgcatgcagcacgtcgtgcaactgcctccggagccagtacaagtgctgcaccgtcagcaaagtcagcccgctaaagaaagtagcccacccagggaggaagcgcctcctcctccaccacctactgaagactcctgcgcaaaaaagcccagatcccgaaccaaaatttccctcgaagcactgggcattttgcagtccttcattcatgacgtgggtctgtatcctgatcaggaggccatccacaccctgagcgctcagctcgatctgcctaagcacaccatcataaaatttttccagaatcaacgctaccacgtcaagcaccatggcaaactgaaagaacacttgggttccgcagtagacgttgctgagtataaggacgaggaacttctcaccgagagtgaggagaacgattctgaagaggggtctgaggagatgtataaggtcgaggcggaagaggaaaacgcggacaagagtaaggccgcccctgctgagatcgaccagagatag

SEQ ID NO: 299770 - DNA, 2202 bp, Artificial Sequence
  derived and/or modified sequence
atggagcggcggagcgagagcccctgcctgcgggacagccccgacaggcgctcagggagcccagacgtgaagggcccaccccctgtgaaagttgcgagattagaacaaaacggcagtcctatgggcgccaggggccggcccaatggggctgtagctaaggccgtgggcggcctgatgatacctgtattttgtgtcgtggaacagctggacggatctctggagtacgacaatagagaggagcatgccgaattcgtactggtacggaaagacgtgctcttcagccagctggtggaaactgcactgctggcgctcggttatagccacagcagtgccgcccaggcccaaggtataataaaactcggtagatggaatcctcttcccttaagctacgtgactgatgccccagatgctactgtggctgatatgttgcaagacgtgtatcacgtggtcactcttaagatccagctgcaatcctgcagtaaactagaggatctccccgccgagcagtggaaccacgctacggtgcggaacgctcttaaagagctcttgaaagaaatgaaccaatctaccttagccaaggagtgcccactgtcgcaatctatgatctcttctatagtgaattcaacatattatgctaatgtgtctgccactaagtgccaggagttcgggaggtggtataagaaatacaaaaagatcaaggtggaaagggtagaacgagagaacctcagcgattattgtgtgctgggccaacgaccaatgcacttacctaacatgaatcagcttgcttctctgggaaagacaaatgaacagagcccacactcacagatccatcactccacccccattcggaaccaggtcccagcactccagccaataatgtctcctggactgttatcccctcagctgagtccacagctggtgaggcagcaaattgctatggcacacctgattaatcagcagatcgccgtgtctaggctcctggctcaccagcacccacaggccattaaccaacagtttctgaaccaccctcccataccccgggccgttaagcctgagcccaccaatagttcggtggaggtttcgcctgatatctatcagcaggtccgggatgaactaaagcgagcttctgtgtcacaggcagtgttcgcacgggtagctttcaacagaacacaggggctcctctctgagattctgcgtaaagaagaggatccccggaccgcctcgcagagcttgctcgtcaacctgcgggccatgcagaattttctgaatctgccggaagtggagcgagaccggatctaccaggacgagagggagcggagcatgaaccctaatgtcagtatggtctcctcagccagctcgtcccctagcagctcccggacacctcaggctaagacgagcaccccaacaaccgacttgcccataaaggtggatggcgcaaatataaatatcacggccgccatttatgacgaaattcaacaagagatgaaaagggccaaggtatcccaggctttgtttgccaaggtcgcagcaaataagtctcagggctggttatgcgaacttctcaggtggaaggagaacccaagcccagagaatcgtactttgtgggagaatctgtgcacgattaggcgattcctgaacctgccccagcacgaacgggatgtaatttacgaagaagagagcaggcaccaccacagtgaacggatgcagcacgtggtgcagctgcccccggagcccgtgcaggtcctacaccggcagcagtcccagcccgctaaggaaagcagcccacccagggaggaggcacccccaccccctcctccgacggaggatagctgcgcaaaaaagcctcgcagtcgaacgaagatctctcttgaggcactgggcatcttacagagcttcattcatgatgtgggtctttaccccgaccaggaggccatccacaccttgagcgctcaactggatctcccaaagcacactataatcaaatttttccagaatcaacggtaccatgtcaagcaccatggtaagttgaaagagcaccttgggtccgcagtggacgtggctgagtataaggatgaggagctgcttacagaaagcgaagagaacgacagcgaagaaggatcagaggagatgtataaggtggaggccgaggaggagaacgccgacaaatcaaaagcagctccagccgaaatagaccagcggtag

SEQ ID NO: 299771 - DNA, 2202 bp, Artificial Sequence
  derived and/or modified sequence
atggagcggcggagcgagagcccctgcctgcgggacagccccgacagacggtccggtagccctgacgtgaaaggcccgcccccagtcaaggtggctagactggagcagaacggctcccccatgggggcacgcggcagaccaaacggtgcagtggctaaagcggtgggcggcctgatgatccctgtgttctgtgttgtggaacaattggatggaagcctcgaatacgacaatcgcgaggaacacgctgagtttgtcttggtcagaaaggatgtgctgttctctcagctcgtcgagacggccctccttgcacttggctattcccacagctctgccgcacaagcccagggaattatcaagttaggccgctggaaccctcttcccctatcttacgtgaccgacgcaccggacgccacagtcgccgatatgctgcaggacgtctaccacgtcgtgacactgaaaatacagctacaatcatgcagtaagcttgaggacctgcccgctgagcagtggaaccatgcaacagttcggaacgcgctcaaggaactgctgaaggagatgaaccagagtaccttagccaaagagtgccctctgtcacagtcaatgatttcgtctattgtaaactctacatactacgcgaacgtctctgccacgaagtgccaggagtttggccgatggtataagaagtataaaaaaatcaaggtcgaaagggttgaacgggaaaatttgtcagattactgcgtgttggggcagcgccccatgcatctgcctaacatgaatcagctggctagcttgggaaaaactaacgagcagagcccccactcacaaatccaccatagtactcctattaggaaccaggtccctgccttacagcccataatgtcgcccggtctgctgtctccacaattgtcaccccaacttgtccggcagcaaatcgccatggcccatctaattaatcagcaaatagctgtaagcaggctgctggctcaccagcacccgcaagctatcaaccagcagttcctgaaccaccccccaattccacgggcagtgaagcctgaaccaaccaactcaagcgtggaggtgagccccgatatctatcaacaggtgcgcgatgagctcaaacgtgcaagcgtgagtcaggccgtcttcgcacgagtagcttttaatcggactcaaggcttactatcagagatcctcagaaaagaagaagatccccggaccgcttcgcagtctctgctggtgaacttacgcgcaatgcagaactttttgaacctgccagaggtggaacgagaccgtatctatcaggatgaacgcgagagatcaatgaacccgaacgtctctatggtctctagtgcttccagtagcccatcatccagccggaccccccaggctaagaccagcaccccaaccactgacttgccaataaaagtagacggtgctaacatcaacatcaccgctgccatctacgatgaaatccagcaggagatgaaacgagctaaggtgagtcaggccctctttgcaaaagtggcagctaataagagtcaggggtggctctgcgaactgctaaggtggaaagagaatcctagccccgaaaatcggacactttgggaaaatctgtgtacaattcgtcgatttctgaacctcccccagcacgagagagacgtgatatacgaggaggaaagccgacaccatcattccgagagaatgcagcacgtcgtgcagctgcctcccgaaccggtgcaagtcttacacaggcagcagagccagcccgccaaggaaagttctcctccccgagaggaggcaccccccccaccccccccaaccgaggactcctgtgctaaaaagccgagaagtcgcacaaaaatttcactggaagccctagggatactccaaagttttatccacgatgttgggctgtaccccgaccaggaggccatccatactctgagcgcgcagctcgacttacctaagcacaccattatcaaattttttcaaaaccagaggtatcacgtaaaacaccacggaaagctcaaggagcacctcggcagtgcagtcgacgttgcagagtacaaagatgaggaactgcttaccgagtccgaggagaacgactcagaggagggcagcgaggagatgtacaaagtggaggccgaagaggaaaacgctgacaagtcaaaggccgcccctgccgagattgatcaacgatag

SEQ ID NO: 299772 - DNA, 2202 bp, Artificial Sequence
  derived and/or modified sequence
atggagcgcaggagcgaatctccctgtctgagggatagtcccgatcgtcgctctgggtcgcccgacgtcaaaggaccgccacctgtcaaagtcgctagattggagcaaaatggaagtcccatgggggctcgaggcagaccaaacggggctgttgccaaagctgttggaggtctcatgattcccgtgttttgcgtggtggagcagttagatgggagtctggaatacgacaatcgagaggaacacgccgagtttgttctggtacgtaaggacgtcctcttttcgcagctcgtagagacggccttacttgcacttggatactcccactcgtctgcagctcaagcccaaggtattatcaaattggggaggtggaacccactgccactgagctatgtgaccgatgcacctgacgccactgttgcagacatgttgcaggatgtctaccatgtggtgacactgaagatccagctgcagagctgcagcaaactcgaggaccttcctgctgagcaatggaaccatgcaacagtcagaaatgcactgaaggaacttttgaaagaaatgaatcaatccaccctggcaaaagagtgccctctctcgcagagcatgatatcaagcatcgtgaactccacctattacgcaaatgtcagcgcaacaaaatgccaggaattcgggcgttggtataaaaaatacaagaagatcaaggtagagagggtggaacgcgagaacctgagcgactattgtgtgctgggccaaaggcctatgcatcttcccaatatgaatcagttggcaagcctgggaaaaaccaatgagcagtccccccacagtcagattcaccacagtacacctataaggaatcaggtgcctgcactccaacctatcatgtccccaggcctcctcagcccccaactgtccccgcagctggtgcgccagcagattgccatggcccacctcattaaccaacagattgccgtgtcccgcctgcttgcacaccagcatcctcaggcaatcaaccagcagttcctcaatcacccccctatccctagggccgttaagccggagcccaccaatagctctgtagaagtttcgcccgacatataccagcaagtgagggacgagctcaagcgcgcttcagtttcacaggctgtttttgctagagtcgccttcaacagaacgcagggtctgctctccgaaattctccgcaaagaagaggaccctaggacagcctctcaatccctgctcgtgaatctccgcgcaatgcagaacttcctgaatctaccagaggtagagcgtgatagaatctatcaagatgaacgcgaaaggagcatgaatccgaacgtttcaatggtcagctccgcatcctcctccccatccagctctcggacacctcaggcgaaaacatctacccccactacagacctccccataaaggtggatggggctaatatcaacattacggcagctatttacgatgaaatacagcaggaaatgaagagggccaaggtgtcacaggctctctttgcgaaagtcgcagccaacaaaagccaaggttggctctgcgagctgcttaggtggaaagagaacccctctccagagaataggactctttgggaaaatctctgtacaataagacggttcctgaacttgccccagcatgaacgggatgtcatctacgaggaggaatcccgccatcaccattcagagagaatgcagcacgtggtgcagctgccccctgagccggtgcaagtgctgcacagacaacagtcacagcctgccaaggaatcaagccctccacgcgaggaagcgccacctccccctcctcccaccgaggacagctgcgctaaaaagcccaggagcaggactaagataagccttgaagcgttgggcattctgcaatcctttatccatgacgttggactctaccctgatcaggaagcaatccatacactatctgcccagctcgacctgccgaagcatacgatcataaagttctttcagaaccagaggtaccatgtgaaacatcacggcaaactcaaggagcacctcgggtccgccgtggacgtggcagagtacaaagacgaagaactgcttacggagtcagaggaaaacgactcagaggaaggcagcgaggaaatgtataaggtagaagcagaggaagaaaacgcggacaagagtaaggcagctccggctgagatagaccagcggtag

SEQ ID NO: 299773 - DNA, 2202 bp, Artificial Sequence
  derived and/or modified sequence
atggagcggaggtccgagagtccttgcttgcgagattcccctgatcgcagatcaggttcacccgatgtgaaggggcctcccccagtaaaggtcgcccgtctggaacagaacggctccccgatgggcgcaagaggtaggcccaatggggctgttgcgaaggcagtaggaggactgatgattccagtattctgcgtggtggagcagttagacgggagtctggagtatgataaccgcgaggaacacgctgagttcgtgctcgtgcgtaaagacgtactcttctcccagctggtcgaaactgccctcctagcactgggatactctcattccagcgccgctcaagcccaaggtatcatcaaacttggcaggtggaatccactcccattatcatacgtgacagatgcccctgatgctacagtcgcggatatgttacaggatgtgtatcatgtcgtcaccctgaagatccaattgcaatcttgttctaaactcgaggatctcccggcagagcagtggaatcatgctactgtcagaaatgccctaaaagaactgttgaaggagatgaatcagtcaacactcgccaaggagtgccccctttcacagtcaatgatcagctcaattgtaaactcgacttactacgcaaatgtgtctgccacaaaatgtcaggaattcggcaggtggtacaaaaagtacaaaaagataaaggttgaacgtgtagaacgtgaaaatctgtctgactactgtgtgctgggtcagcggcctatgcacctgcccaatatgaaccagttagcatctttaggcaaaaccaatgaacagtctccacatagtcaaatccatcattccacacccataaggaaccaggtgcctgcccttcagcctatcatgtctcccggtcttctctctccacagctaagtccccagctggtcagacagcagatcgctatggctcacctgataaatcagcaaattgcagtgtctcgtctgctggcccatcagcatccacaagcgataaatcagcagttcttgaatcaccctcccattccaagagctgttaagccagaaccaaccaattcctctgtggaggtcagtccagatatataccaacaggtccgcgacgagctgaagcgtgccagcgtgagccaggcagtatttgccagagtggcctttaaccggactcaaggcttgctttctgaaatcctcagaaaagaggaggacccacgaaccgccagccagtctctcctggtcaacttacgcgctatgcagaattttttaaacctgcctgaggttgaaagagacagaatttatcaggatgagcgggagaggtctatgaatcctaatgtcagcatggtgtcctctgcttcctcttcacccagcagcagccggaccccccaagcaaaaaccagcacccctactacggacctgccaattaaggtggatggtgccaatatcaacatcactgctgctatatatgatgaaattcagcaggagatgaagagagcaaaggtgagtcaggcccttttcgcaaaggtggccgctaataagtcgcagggatggctgtgcgagcttcttagatggaaagagaatccatcccccgagaaccgcacactctgggaaaatctttgcacaatccgtcgctttcttaatctccctcagcatgagcgcgatgtcatatatgaggaggagtcccgacatcaccattcggagcggatgcagcatgtcgtgcagttaccccctgaacccgtgcaggtattgcacaggcagcagagccaaccagcaaaggaaagtagtcctcccagggaggaggcaccacccccaccaccaccgactgaagactcatgtgcgaaaaaacctagaagtcgcactaaaattagtttagaagccctgggcatccttcagtcttttatccatgatgtgggtctctaccccgaccaggaggcaattcacaccttaagcgcacagttggacctgccgaagcacacaatcatcaaatttttccagaaccagaggtaccacgttaaacaccacggaaaactgaaagagcatctgggtagcgccgtggacgtggctgagtataaagacgaagagctgctaactgaaagcgaagaaaatgatagcgaagagggctccgaagagatgtacaaagtcgaagctgaggaggagaatgccgacaaaagcaaggctgcccctgccgagattgaccaaagatag

SEQ ID NO: 299774 - DNA, 2202 bp, Artificial Sequence
  derived and/or modified sequence
atggagcgccgaagcgagtcaccgtgcctgcgcgatagtcccgaccgcagatcagggagccccgatgtaaaaggacccccacccgtcaaggtagccaggcttgagcaaaatggctcccccatgggggctcgagggaggcctaatggggctgttgccaaggctgtggggggtctcatgataccagttttttgtgttgtggagcagcttgacggctccctggagtacgacaaccgtgaggagcatgccgagttcgttctcgtgcgcaaggacgtgttgtttagtcagttggtagagactgccctgctggcattggggtactcccattcatctgcagctcaagcccaggggattatcaagctgggacgctggaatcctcttcctcttagctatgtcaccgacgctcctgacgctacagtagcagacatgcttcaggatgtgtaccacgtggttactctgaagattcaattacaatcatgtagcaaactggaggatcttcccgcagagcagtggaatcacgccaccgtgcggaacgcccttaaggagctcctgaaagagatgaaccagagcacgctcgccaaggaatgccccctgtcacagtcaatgatttcttcgatagtgaactctacttactatgccaacgtaagtgctacgaaatgccaggagtttggtaggtggtacaaaaaatacaagaagatcaaagtggagagggttgaacgcgagaacctgtcagactactgcgtgctgggccagcggccaatgcatttgccaaacatgaatcagctggcgagccttggtaagaccaacgaacagagcccccatagtcaaattcatcactcaacgcctattcgcaaccaggttcccgctctgcaacctatcatgagccccggattgctaagccctcaactcagccctcagctggtccggcagcaaatcgcgatggcgcacctgatcaaccagcagatcgcggttagtcgtctcctcgcgcatcagcacccccaggccataaatcagcagtttctgaatcacccgcctatccccagggcagtaaaaccagaacctacgaacagttctgttgaagtcagcccagacatttatcaacaggtgcgcgatgagctaaaaagagcttccgtctcacaggctgtgtttgccagagtggcatttaacagaacacagggcttgctaagcgagatcctgagaaaagaggaggatccacgaacggcctcccaatccctcctggtgaatcttagggcaatgcaaaatttcctgaatcttccagaggtggagagggatcgaatatatcaggacgagcgtgagagatcgatgaaccccaacgtcagcatggtgtcgtctgcaagctcctctccctccagcagcagaacgccacaggctaaaacatcaacgcctaccaccgacttacccatcaaagtggatggcgcaaacatcaacattaccgccgctatatacgacgagatccagcaagagatgaaaagagctaaagtctctcaagctctcttcgctaaagttgccgcaaacaaatcccagggttggctttgcgagctgttgcgctggaaagagaatccatccccagagaacaggacactctgggagaacctgtgtacgatcagacggttcttgaaccttccccagcacgagcgcgatgtgatctacgaagaggagtcacggcatcatcacagtgaacgcatgcagcacgtcgtccagctgccacccgagccagttcaggtcctccatagacagcagtctcagcctgcgaaggagtctagccctcctagagaggaagccccaccaccacctcctccaactgaagactcctgcgctaagaagccaagatctcggacaaaaatctccctggaggccctcggaatactacagtcctttattcacgacgtggggctgtatcccgaccaggaggcaattcataccttgtctgcccagctagatctccctaagcacacaatcattaagttcttccaaaatcagcgttaccatgtgaaacaccacggcaaactcaaggagcacctcgggtccgcagtggacgtggccgagtacaaagatgaagagctgcttactgagtctgaggaaaatgattcagaagaagggagtgaagagatgtataaggtcgaagctgaggaagagaatgcagacaaatccaaggctgcaccagccgagattgaccagagatag

SEQ ID NO: 299775 - DNA, 5318 bp, Artificial Sequence
  derived and/or modified sequence
gagagagagagagagagactgagaaagtcgaactcgagcttaggtaaccaacaaacccaattactaggctttattgatactaaaaggaaaagttcccctcgtaaaatttctctgagcttattagttatttaaatcagccccagggttggacgcgtgacgccgaaggcaccttctgtcggctcctggaggtgagcagccagcgtccctgcgccgacccacagcccctcgctccgtcctgggcacttggggcgaaggcgggcgcagcgagccgagaagtactgaactcctaatatcaccaattcttctaagttcctggacattgatccggaggaggattcgcagttcaacatcaaggtccctgtgcgttttattgcgacctgccggtgggaactttgtctccgagtcggagcagcatggagcggcggagcgagagcccgtgtctgcgggacagccccgaccggcggagcggcagcccggacgtcaaggggcctcccccagtgaaggtggcccggctggagcagaacggcagccccatgggagcccgcgggaggcccaacggcgccgtggccaaggccgtgggaggtttgatgattcctgtcttttgtgtcgtggagcagttggacggctctcttgaatatgacaacagagaagaacacgccgagtttgtcctggtgcggaaagatgtgctttttagccagctggtggagactgcgctcctggccctggggtattctcacagctctgcggcccaggcccaaggaataatcaagctgggaaggtggaaccctctccccctcagttatgtgacagatgcacccgacgcgacagtggccgacatgctacaagatgtctatcatgttgtgacgttgaaaatccaattacaaagttgttcaaagttggaagacttgcctgcggagcagtggaaccatgccacagtccgcaatgccttaaaggaactgctcaaagagatgaaccagagcacattagccaaagaatgccctctctcccagagtatgatttcatccattgtaaatagcacatattatgccaatgtgtcagcaaccaagtgccaggagtttgggagatggtataaaaagtacaagaagattaaagtggaaagagtggaacgagaaaacctttcagactattgtgttctgggccagcgtccaatgcatttaccaaatatgaaccagctggcatccctggggaaaaccaacgaacagtctcctcacagccaaattcaccacagtactccaatccgaaaccaagtgcccgcattacagcccatcatgagccctggtcttctttctccccagcttagtccacaacttgtaaggcaacaaatagccatggcccatctgataaaccaacagattgccgttagccggctcctggctcaccagcatcctcaagccatcaaccagcagttcctgaaccatccacccatccccagagcagttaagccagagccaaccaactcttccgtggaagtctctccagatatctaccagcaagtcagagatgagctgaagagggccagtgtgtcccaagctgtctttgcaagagtggcattcaaccgcacacagggattgttgtctgagattctgcgtaaggaagaagaccctcggacagcctctcagtctcttctagtaaacctgagggccatgcagaatttcctcaatctgccagaagtggagcgagatcgcatctaccaggatgagagggagcggagcatgaatcccaatgtgagcatggtctcctcggcctccagcagtcccagctcctcccgaacccctcaggccaaaacctcgacaccgacaacagacctccctattaaggtggacggcgccaacatcaacatcacagctgccatttatgacgagatccaacaggagatgaaaagggccaaggtgtctcaagccctgtttgccaaagtggctgcaaataaaagtcagggctggctgtgtgaactgctccgctggaaggagaacccaagcccagaaaaccgcaccctctgggaaaacctctgtaccatccgtcgcttcctgaaccttccccagcatgagagggatgtcatctatgaggaggagtcaaggcatcaccacagcgaacgcatgcaacacgtggtccagcttccccctgagccggtgcaggtacttcatagacagcagtctcagccagccaaggagagttcccctcccagagaagaagcgcctcccccacctcctccgactgaagacagttgtgccaaaaagccccggtctcgcacaaagatctccttagaagccctggggatcctccaaagctttattcatgatgtaggcctgtacccagaccaggaagccatccacactctttcggctcagctggatctccccaaacacaccatcatcaagttcttccagaaccagcggtaccacgtgaagcaccacgggaagctgaaagagcacctgggctccgcggtggacgtggctgaatataaggacgaggagctgctgaccgagtcagaggagaacgacagcgaggaaggctccgaggagatgtacaaagtggaggctgaggaggaaaatgctgacaaaagcaaggcagcacctgccgaaattgaccagagataatgtgaacttctactaggcaaagcaatacatcggtccaaggattttctgctttcatttctttaaaagttttttgttagtttgttttttgtttttgtttttgggtttttttggctttatttttgtctttttatgtctgttttgtttttcttacccttttggacatttctttgttgcacaggatacacctatagactgaataagttcagtatttccgaatcagacatcgccttggcaaagacactaaagcgttacactttatcccgtctctatgactggatcatagtcattataatcacaggagactctgccttcattatccttgcacttaacggaagttacatcaggcaagtaccaggatgaaaagaactatgaaataaatgaaggaagctacaagtgtgtgtgtatatgtatatgtatatatctctatatttacatatatatattaaaattgcatgggacagagactttgcaatccgaaagaatagactgtgaaatgagttcttaaagaaaagacttgtttatgtattaaaaaaaccacttcacagtgagtcgctttggctttttgataaactgcggcctgctctcagggtggggtgactatttttgaattcctatttattttttgtgtttgtccctgattttttttttttaattctatggcttcctatctggcagcttaatgggtaatttttgaggtatgtatttaacaaaataaacgacactgccgaaaaaaaaaaaagtgaagtgaaaacaatcagggcacattaaaatgatacaagtcaaataaatcttaaagacacaatgcacacttaaaatgactcaataaaatgacttgctacgttccgttattcaatttgtcattactgtagtgaacagatgcatttctgtggaattccaaataagtaaaactgaaattcagtgcagagaaaactttgtccactagtgcaagtcttgatcaaatgacattttgacattggacatatggaattcatagtatgagccacattttgttgtgaaatttatttacctgcttgtggcttcaaatctgaaaattaataagcctgctcgtttaaaagttgtttgttgttgctgtttttttgtctttttgttttttactagaaaatagttcagtgtaatattaagttagaaaagaagttgctgcccagttaaaggggctccctctcaaataaatctccatccttccctctcccaaaagacatttctgatttctgcttcactttgggcttcctcttcttcgtacacattccatctacctaatcaaacattttcagtccctgatctctcctgtcccttttcctgggatgacagccctaacaagaactgtttttgaatcgttgtgcagctccaggcaatagagtatgtgaagcgatttcagtagaatcacttactcatcctaaaagaaaacattatcccagttacctacatcgcaattaccttatgtaaagcagaactaatgctgactggatgtttaatgggatgagcattaaagctgcaatctactatagtactccagatctctttcggcttcctatgagaaacaccagaagcattactttccacttctacttacagtaattgcaagaggagacctcacattcaggactggcctagtgaacgtaatccatgctttaaactggccattaaacagtcccacatggttggattttttttttttttttgagttgtgctttcacaaaaccttgtcaaagacctcatgcaatatcactttgaaagttattttctgtttactacacaaacattgtaatataactgttaatactatttatatatttgaaaggtataaaaggtaggagttaaaaaaaaaacctctatgtgtagatattaactcagaacttacaatatacagggagaagacatgttgcaatacaagctaattctagctgctcagtaacctctggagtttttaaagggacattttcctgtactttttcaaataatgatgtttaaaaattatcttgacataagcgtcatatacctttgcaaaaggatggttgtttgcagttagccctggccccatccttcctatttctgtagtatgctgcagctttaatcagaaagtccatggttgctgcttcctgatctccgagttactctttccaaattgtcttcttacactgttgctgaaggtcactctgtacacgtaatggaaactgattttgccaagctcttacaaggtggttcatctatcgatggcatccgcatttggtatcttttacacttcaaccaaaaatttattaggtatttttcaatgctaagtcttgccttttattttttaatttcactgccaagtttgcagtggttctaagtgaatctgtgggcattttagcctgtggtcttgccagatctttgcgaattacaatgcatatatgtctatttattcaatatctgtcatataatatctatttggaagaagaaactttctcttgtagtgcctcttgacaaagcacaatttcccgcctttttttttttttgtgaaatgaaaaaaacaaattgtgttttattgcggtatcaacaatgtgaataaggattaacatattgtaaatgttcttttttccatgtaaatcaactatctttgttatcactaagtgataattaatttttaacttatgtgcattgttaggctgttagaattttttggttgttaaaataaacgcattcaat

SEQ ID NO: 299776 - DNA, 5730 bp, Artificial Sequence
  derived and/or modified sequence
aaattattattttgaaggcgctagatctggggaccgaaagggggagggggagaaatcggaaaccgaggacaacccaaaaggactcactttgcctgatgactcaacgcaactaataatcatctccctctcagtgtgtctctctctgcggcttgtcagtgagtccggctctggctgctggcagaggcggccgagaggggagaggctggaggtgacagcttgggcggccgccgcgtttcctcccgcgcgcggtcccgggtccctgcgtcttctcggctcttggtgttaccggtcccaccgctctggccgcgcctcctcgcgagctagccgccctgcgaaccagcagccccggctcgccgccgccgccgccgcctccgggttctcagccctttctctccagaacgggtctccttcccgaaggtgtgaaaaggctctttcagcctccttctcttcccccctcctccgccgtcccctcccccgctcgctcgggtgtccctttggaggagtcctttccctctcctcctcctccccctcctccctccccccatcatcatcataacaaccatctccgcaccagaagaagacaccctgacccaggaccttaaacattaggacctggggaagagggaaggggaaggagtaaagaggaagactaggagaacactgcaaagccaagcaccagaaactttccaccctggattctctacttttgctccatggacagagccccagtcagccaagtttcagacagaccgtgagcagtccctgtgcgttttattgcgacctgccggtgggaactttgtctccgagtcggagcagcatggagcggcggagcgagagcccgtgtctgcgggacagccccgaccggcggagcggcagcccggacgtcaaggggcctcccccagtgaaggtggcccggctggagcagaacggcagccccatgggagcccgcgggaggcccaacggcgccgtggccaaggccgtgggaggtttgatgattcctgtcttttgtgtcgtggagcagttggacggctctcttgaatatgacaacagagaagaacacgccgagtttgtcctggtgcggaaagatgtgctttttagccagctggtggagactgcgctcctggccctggggtattctcacagctctgcggcccaggcccaaggaataatcaagctgggaaggtggaaccctctccccctcagttatgtgacagatgcacccgacgcgacagtggccgacatgctacaagatgtctatcatgttgtgacgttgaaaatccaattacaaagttgttcaaagttggaagacttgcctgcggagcagtggaaccatgccacagtccgcaatgccttaaaggaactgctcaaagagatgaaccagagcacattagccaaagaatgccctctctcccagagtatgatttcatccattgtaaatagcacatattatgccaatgtgtcagcaaccaagtgccaggagtttgggagatggtataaaaagtacaagaagattaaagtggaaagagtggaacgagaaaacctttcagactattgtgttctgggccagcgtccaatgcatttaccaaatatgaaccagctggcatccctggggaaaaccaacgaacagtctcctcacagccaaattcaccacagtactccaatccgaaaccaagtgcccgcattacagcccatcatgagccctggtcttctttctccccagcttagtccacaacttgtaaggcaacaaatagccatggcccatctgataaaccaacagattgccgttagccggctcctggctcaccagcatcctcaagccatcaaccagcagttcctgaaccatccacccatccccagagcagttaagccagagccaaccaactcttccgtggaagtctctccagatatctaccagcaagtcagagatgagctgaagagggccagtgtgtcccaagctgtctttgcaagagtggcattcaaccgcacacagggattgttgtctgagattctgcgtaaggaagaagaccctcggacagcctctcagtctcttctagtaaacctgagggccatgcagaatttcctcaatctgccagaagtggagcgagatcgcatctaccaggatgagagggagcggagcatgaatcccaatgtgagcatggtctcctcggcctccagcagtcccagctcctcccgaacccctcaggccaaaacctcgacaccgacaacagacctccctattaaggtggacggcgccaacatcaacatcacagctgccatttatgacgagatccaacaggagatgaaaagggccaaggtgtctcaagccctgtttgccaaagtggctgcaaataaaagtcagggctggctgtgtgaactgctccgctggaaggagaacccaagcccagaaaaccgcaccctctgggaaaacctctgtaccatccgtcgcttcctgaaccttccccagcatgagagggatgtcatctatgaggaggagtcaaggcatcaccacagcgaacgcatgcaacacgtggtccagcttccccctgagccggtgcaggtacttcatagacagcagtctcagccagccaaggagagttcccctcccagagaagaagcgcctcccccacctcctccgactgaagacagttgtgccaaaaagccccggtctcgcacaaagatctccttagaagccctggggatcctccaaagctttattcatgatgtaggcctgtacccagaccaggaagccatccacactctttcggctcagctggatctccccaaacacaccatcatcaagttcttccagaaccagcggtaccacgtgaagcaccacgggaagctgaaagagcacctgggctccgcggtggacgtggctgaatataaggacgaggagctgctgaccgagtcagaggagaacgacagcgaggaaggctccgaggagatgtacaaagtggaggctgaggaggaaaatgctgacaaaagcaaggcagcacctgccgaaattgaccagagataatgtgaacttctactaggcaaagcaatacatcggtccaaggattttctgctttcatttctttaaaagttttttgttagtttgttttttgtttttgtttttgggtttttttggctttatttttgtctttttatgtctgttttgtttttcttacccttttggacatttctttgttgcacaggatacacctatagactgaataagttcagtatttccgaatcagacatcgccttggcaaagacactaaagcgttacactttatcccgtctctatgactggatcatagtcattataatcacaggagactctgccttcattatccttgcacttaacggaagttacatcaggcaagtaccaggatgaaaagaactatgaaataaatgaaggaagctacaagtgtgtgtgtatatgtatatgtatatatctctatatttacatatatatattaaaattgcatgggacagagactttgcaatccgaaagaatagactgtgaaatgagttcttaaagaaaagacttgtttatgtattaaaaaaaccacttcacagtgagtcgctttggctttttgataaactgcggcctgctctcagggtggggtgactatttttgaattcctatttattttttgtgtttgtccctgattttttttttttaattctatggcttcctatctggcagcttaatgggtaatttttgaggtatgtatttaacaaaataaacgacactgccgaaaaaaaaaaaagtgaagtgaaaacaatcagggcacattaaaatgatacaagtcaaataaatcttaaagacacaatgcacacttaaaatgactcaataaaatgacttgctacgttccgttattcaatttgtcattactgtagtgaacagatgcatttctgtggaattccaaataagtaaaactgaaattcagtgcagagaaaactttgtccactagtgcaagtcttgatcaaatgacattttgacattggacatatggaattcatagtatgagccacattttgttgtgaaatttatttacctgcttgtggcttcaaatctgaaaattaataagcctgctcgtttaaaagttgtttgttgttgctgtttttttgtctttttgttttttactagaaaatagttcagtgtaatattaagttagaaaagaagttgctgcccagttaaaggggctccctctcaaataaatctccatccttccctctcccaaaagacatttctgatttctgcttcactttgggcttcctcttcttcgtacacattccatctacctaatcaaacattttcagtccctgatctctcctgtcccttttcctgggatgacagccctaacaagaactgtttttgaatcgttgtgcagctccaggcaatagagtatgtgaagcgatttcagtagaatcacttactcatcctaaaagaaaacattatcccagttacctacatcgcaattaccttatgtaaagcagaactaatgctgactggatgtttaatgggatgagcattaaagctgcaatctactatagtactccagatctctttcggcttcctatgagaaacaccagaagcattactttccacttctacttacagtaattgcaagaggagacctcacattcaggactggcctagtgaacgtaatccatgctttaaactggccattaaacagtcccacatggttggattttttttttttttttgagttgtgctttcacaaaaccttgtcaaagacctcatgcaatatcactttgaaagttattttctgtttactacacaaacattgtaatataactgttaatactatttatatatttgaaaggtataaaaggtaggagttaaaaaaaaaacctctatgtgtagatattaactcagaacttacaatatacagggagaagacatgttgcaatacaagctaattctagctgctcagtaacctctggagtttttaaagggacattttcctgtactttttcaaataatgatgtttaaaaattatcttgacataagcgtcatatacctttgcaaaaggatggttgtttgcagttagccctggccccatccttcctatttctgtagtatgctgcagctttaatcagaaagtccatggttgctgcttcctgatctccgagttactctttccaaattgtcttcttacactgttgctgaaggtcactctgtacacgtaatggaaactgattttgccaagctcttacaaggtggttcatctatcgatggcatccgcatttggtatcttttacacttcaaccaaaaatttattaggtatttttcaatgctaagtcttgccttttattttttaatttcactgccaagtttgcagtggttctaagtgaatctgtgggcattttagcctgtggtcttgccagatctttgcgaattacaatgcatatatgtctatttattcaatatctgtcatataatatctatttggaagaagaaactttctcttgtagtgcctcttgacaaagcacaatttcccgcctttttttttttttgtgaaatgaaaaaaacaaattgtgttttattgcggtatcaacaatgtgaataaggattaacatattgtaaatgttcttttttccatgtaaatcaactatctttgttatcactaagtgataattaatttttaacttatgtgcattgttaggctgttagaattttttggttgttaaaataaacgcattcaataaatatga

SEQ ID NO: 299777 - DNA, 2656 bp, Artificial Sequence
  derived and/or modified sequence
agaggcgcttaagttaccaagggattagggctgatctcaggagaggtaaacgaccatccttggaacacggagcccttcttccctgcccggtatctgcgcgtgccttgggtagtccgcacaaccctccccagctccggatgccctgggatacccggacccaggagagagcgcgtcagcggggcgcagctactttgcactcgccgattctgacacaacagatagttaattggggccttcgaaatcaaggactaagaagtactgaactcctaatatcaccaattcttctaagttcctggacattgatccggaggaggattcgcagttcaacatcaaggtccctgtgcgttttattgcgacctgccggtgggaactttgtctccgagtcggagcagcatggagcggcggagcgagagcccgtgtctgcgggacagccccgaccggcggagcggcagcccggacgtcaaggggcctcccccagtgaaggtggcccggctggagcagaacggcagccccatgggagcccgcgggaggcccaacggcgccgtggccaaggccgtgggaggtttgatgattcctgtcttttgtgtcgtggagcagttggacggctctcttgaatatgacaacagagaagaacacgccgagtttgtcctggtgcggaaagatgtgctttttagccagctggtggagactgcgctcctggccctggggtattctcacagctctgcggcccaggcccaaggaataatcaagctgggaaggtggaaccctctccccctcagttatgtgacagatgcacccgacgcgacagtggccgacatgctacaagatgtctatcatgttgtgacgttgaaaatccaattacaaagttgttcaaagttggaagacttgcctgcggagcagtggaaccatgccacagtccgcaatgccttaaaggaactgctcaaagagatgaaccagagcacattagccaaagaatgccctctctcccagagtatgatttcatccattgtaaatagcacatattatgccaatgtgtcagcaaccaagtgccaggagtttgggagatggtataaaaagtacaagaagattaaagtggaaagagtggaacgagaaaacctttcagactattgtgttctgggccagcgtccaatgcatttaccaaatatgaaccagctggcatccctggggaaaaccaacgaacagtctcctcacagccaaattcaccacagtactccaatccgaaaccaagtgcccgcattacagcccatcatgagccctggtcttctttctccccagcttagtccacaacttgtaaggcaacaaatagccatggcccatctgataaaccaacagattgccgttagccggctcctggctcaccagcatcctcaagccatcaaccagcagttcctgaaccatccacccatccccagagcagttaagccagagccaaccaactcttccgtggaagtctctccagatatctaccagcaagtcagagatgagctgaagagggccagtgtgtcccaagctgtctttgcaagagtggcattcaaccgcacacagggattgttgtctgagattctgcgtaaggaagaagaccctcggacagcctctcagtctcttctagtaaacctgagggccatgcagaatttcctcaatctgccagaagtggagcgagatcgcatctaccaggatgagagggagcggagcatgaatcccaatgtgagcatggtctcctcggcctccagcagtcccagctcctcccgaacccctcaggccaaaacctcgacaccgacaacagacctccctattaaggtggacggcgccaacatcaacatcacagctgccatttatgacgagatccaacaggagatgaaaagggccaaggtgtctcaagccctgtttgccaaagtggctgcaaataaaagtcagggctggctgtgtgaactgctccgctggaaggagaacccaagcccagaaaaccgcaccctctgggaaaacctctgtaccatccgtcgcttcctgaaccttccccagcatgagagggatgtcatctatgaggaggagtcaaggcatcaccacagcgaacgcatgcaacacgtggtccagcttccccctgagccggtgcaggtacttcatagacagcagtctcagccagccaaggagagttcccctcccagagaagaagcgcctcccccacctcctccgactgaagacagttgtgccaaaaagccccggtctcgcacaaagatctccttagaagccctggggatcctccaaagctttattcatgatgtaggcctgtacccagaccaggaagccatccacactctttcggctcagctggatctccccaaacacaccatcatcaagttcttccagaaccagcggtaccacgtgaagcaccacgggaagctgaaagagcacctgggctccgcggtggacgtggctgaatataaggacgaggagctgctgaccgagtcagaggagaacgacagcgaggaaggctccgaggagatgtacaaagtggaggctgaggaggaaaatgctgacaaaagcaaggcagcacctgccgaaattgaccagagataatgtgaacttctactaggcaaagcaatacatcggtccaaggattttctgctttcatttcttt

SEQ ID NO: 299778 - DNA, 2202 bp, Artificial Sequence
  derived and/or modified sequence
atggagagaagaagcgagagcccctgcctgagagacagccccgacagaagaagcggcagccccgacgtgaagggccccccccccgtgaaggtggccagactggagcagaacggcagccccatgggcgccagaggcagacccaacggcgccgtggccaaggccgtgggcggcctgatgatccccgtgttctgcgtggtggagcagctggacggcagcctggagtacgacaacagagaggagcacgccgagttcgtgctggtgagaaaggacgtgctgttcagccagctggtggagaccgccctgctggccctgggctacagccacagcagcgccgcccaggcccagggcatcatcaagctgggcagatggaaccccctgcccctgagctacgtgaccgacgcccccgacgccaccgtggccgacatgctgcaggacgtgtaccacgtggtgaccctgaagatccagctgcagagctgcagcaagctggaggacctgcccgccgagcagtggaaccacgccaccgtgagaaacgccctgaaggagctgctgaaggagatgaaccagagcaccctggccaaggagtgccccctgagccagagcatgatcagcagcatcgtgaacagcacctactacgccaacgtgagcgccaccaagtgccaggagttcggcagatggtacaagaagtacaagaagatcaaggtggagagagtggagagagagaacctgagcgactactgcgtgctgggccagagacccatgcacctgcccaacatgaaccagctggccagcctgggcaagaccaacgagcagagcccccacagccagatccaccacagcacccccatcagaaaccaggtgcccgccctgcagcccatcatgagccccggcctgctgagcccccagctgagcccccagctggtgagacagcagatcgccatggcccacctgatcaaccagcagatcgccgtgagcagactgctggcccaccagcacccccaggccatcaaccagcagttcctgaaccacccccccatccccagagccgtgaagcccgagcccaccaacagcagcgtggaggtgagccccgacatctaccagcaggtgagagacgagctgaagagagccagcgtgagccaggccgtgttcgccagagtggccttcaacagaacccagggcctgctgagcgagatcctgagaaaggaggaggaccccagaaccgccagccagagcctgctggtgaacctgagagccatgcagaacttcctgaacctgcccgaggtggagagagacagaatctaccaggacgagagagagagaagcatgaaccccaacgtgagcatggtgagcagcgccagcagcagccccagcagcagcagaaccccccaggccaagaccagcacccccaccaccgacctgcccatcaaggtggacggcgccaacatcaacatcaccgccgccatctacgacgagatccagcaggagatgaagagagccaaggtgagccaggccctgttcgccaaggtggccgccaacaagagccagggctggctgtgcgagctgctgagatggaaggagaaccccagccccgagaacagaaccctgtgggagaacctgtgcaccatcagaagattcctgaacctgccccagcacgagagagacgtgatctacgaggaggagagcagacaccaccacagcgagagaatgcagcacgtggtgcagctgccccccgagcccgtgcaggtgctgcacagacagcagagccagcccgccaaggagagcagcccccccagagaggaggccccccccccccccccccccaccgaggacagctgcgccaagaagcccagaagcagaaccaagatcagcctggaggccctgggcatcctgcagagcttcatccacgacgtgggcctgtaccccgaccaggaggccatccacaccctgagcgcccagctggacctgcccaagcacaccatcatcaagttcttccagaaccagagataccacgtgaagcaccacggcaagctgaaggagcacctgggcagcgccgtggacgtggccgagtacaaggacgaggagctgctgaccgagagcgaggagaacgacagcgaggagggcagcgaggagatgtacaaggtggaggccgaggaggagaacgccgacaagagcaaggccgcccccgccgagatcgaccagagatag

SEQ ID NO: 299779 - protein, 704 aa, Artificial Sequence
  derived and/or modified sequence
  misc_feature (1)..(1): Xaa can be any naturally occurring amino acid
XTKFDEVQKSGNMIQSANDKNFDDEDSVDGNRPSSASSTSSKAPPSSRRNVGMGTTRRLGSSTLGSKSSAAKEGAGAVDEEDFIKAFDDVPVVQIYSSRDLEESINKIREILSDDKHDWEQRVNALKKIRSLLLAGAAEYDNFFQHLRLLDGAFKLSAKDLRSQVVREACITLGHLSSVLGNKFDHGAEAIMPTIFNLIPNSAKIMATSGVVAVRLIIRHTHIPRLIPVITSNCTSKSVAVRRRCFEFLDLLLQEWQTHSLERHISVLAETIKKGIHDADSEARIEARKCYWGFHSHFSREAEHLYHTLESSYQKALQSHLKNSDSIVSLPQSDRSSSSSQESLNRPLSAKRSPTGSTTSRASTVSTKSVSTTGSLQRSRSDIDVNAAASAKSKVSSSSGTTPFSSAAALPPGSYASLGRIRTRRQSSGSATNVASTPDNRGRSRAKVVSQSQRSRSANPAGAGSRSSSPGKLLGSGYGGLTGGSSRGPPVTPSSEKRSKIPRSQGCSRETSPNRIGLDRFGLGQPGRIPGSVNAMRVLSTSTDLEAAVADALLLGDSRSKKKPVRRRYEPYGMYSDDDANSDASSVCSERSYGSRNGGIPHYLRQTEDVAEVLNHCASSNWSERKEGLLGLQNLLKSQRTLSRVELKRLCEIFTRMFADPHSKIADSEAECEDKEGNLFPSEVSCTVSFQYVFGDSCGFYNNS

SEQ ID NO: 299780 - protein, 1494 aa, Artificial Sequence
  derived and/or modified sequence
MEPRMESCLAQVLQKDVGKRLQVGQELIDYFSDKQKSADLEHDQTMLDKLVDGLATSWVNSSNYKVVLLGMDILSALVTRLQDRFKAQIGTVLPSLIDRLGDAKDSVREQDQTLLLKIMDQAANPQYVWDRMLGGFKHKNFRTREGICLCLIATLNASGAQTLTLSKIVPHICNLLGDPNSQVRDAAINSLVEIYRHVGERVRADLSKKGLPQSRLNVIFTKFDEVQKSGNMIQSANDKNFDDEDSVDGNRPSSASSTSSKAPPSSRRNVGMGTTRRLGSSTLGSKSSAAKEGAGAVDEEDFIKAFDDVPVVQIYSSRDLEESINKIREILSDDKHDWEQRVNALKKIRSLLLAGAAEYDNFFQHLRLLDGAFKLSAKDLRSQVVREACITLGHLSSVLGNKFDHGAEAIMPTIFNLIPNSAKIMATSGVVAVRLIIRHTHIPRLIPVITSNCTSKSVAVRRRCFEFLDLLLQEWQTHSLERHISVLAETIKKGIHDADSEARIEARKCYWGFHSHFSREAEHLYHTLESSYQKALQSHLKNSDSIVSLPQSDRSSSSSQESLNRPLSAKRSPTGSTTSRASTVSTKSVSTTGSLQRSRSDIDVNAAASAKSKVSSSSGTTPFSSAAALPPGSYASLGRIRTRRQSSGSATNVASTPDNRGRSRAKVVSQSQRSRSANPAGAGSRSSSPGKLLGSGYGGLTGGSSRGPPVTPSSEKRSKIPRSQGCSRETSPNRIGLDRFGLGQPGRIPGSVNAMRVLSTSTDLEAAVADALVRGTSTGKKKPVRRRYEPYGMYSDDDANSDASSVCSERSYGSRNGGIPHYLRQTEDVAEVLNHCASSNWSERKEGLLGLQNLLKSQRTLSRVELKRLCEIFTRMFADPHSKIADSEAECEDKEGNLFPSEVSCTRVFSMFLETLVDFIIIHKDDLQDWLFVLLTQLLKKMGADLLGSVQAKVQKALDVTRDSFPFDQQFNILMRFIVDQTQTPNLKVKVAILKYIESLARQMDPTDFVNSSETRLAVSRIITWTTEPKSSDVRKAAQIVLISLFELNTPEFTMLLGALPKTFQDGATKLLHNHLKNSSNTSVGSPSNTIGRTPSRHTSSRTSPLTSPTNCSHGGLSPSMLDYDTENLNSEEIYSSLRGVTEAIEKFSFRSQEDLNEPIKRDGKKECDIVSRDGGAASPATEGRGGSEVEGGRTALDNKTSLLNTQPPRAFPGPRARDYNPYPYSDAINTYDKTALKEAVFDDDMEQLRDVPIDHSDLVADLLKELSNHNERVEERKGALLELLKITREDSLGVWEEHFKTILLLLLETLGDKDHSIRALALRVLREILRNQPARFKNYAELTIMKTLEAHKDSHKEVVRAAEEAASTLASSIHPEQCIKVLCPIIQTADYPINLAAIKMQTKVVERIAKESLLQLLVDIIPGLLQGYDNTESSVRKASVFCLVAIYSVIGEDLKPHLAQLTGSKMKLLNLYIKRAQTTNSNSSSSSDVSTHS

SEQ ID NO: 299781 - DNA, 2115 bp, Artificial Sequence
  derived and/or modified sequence
taaacgaagttcgacgaagtccagaaatctggtaacatgattcaaagcgctaacgataaaaactttgacgacgaagatagcgtcgacggtaataggccttcatccgcaagttcaaccagttccaaggctcccccctctagccggaggaacgtggggatgggaacaacacgcagattgggttcatccactctcgggtctaagtcatctgccgccaaagagggcgccggagccgtggatgaagaggactttatcaaggcattcgacgatgttcctgtggtgcagatttattctagcagagacctggaagagagcattaataaaatccgcgagatcctcagtgacgataaacatgactgggagcagagggtaaatgcactgaaaaaaatcagatcccttctgctagccggcgccgccgagtacgataacttttttcagcatttaaggctcctggacggtgcattcaaactgagcgccaaggatctgcgatctcaagtggttcgcgaagcctgtatcactctgggtcatctctccagcgttctcgggaataaattcgaccacggggctgaggcaattatgcctaccatctttaatctgatcccgaactccgccaaaattatggcaacctcaggcgtggtggctgtgcggttgatcattaggcacacacacatcccgcgactgattcccgtgatcacatccaactgcacatccaagtctgtggccgtgcgccgtaggtgttttgaattcttggaccttctgctgcaggaatggcagacacacagcctggaaaggcacatatccgtgctggcggaaaccataaaaaagggcatccacgatgctgacagcgaagctagaatcgaagcacgaaaatgttactgggggtttcactcccatttctccagagaggccgagcatctataccacacgttagaatcatcctatcagaaagctttgcagtctcatttaaaaaactctgacagcatcgttagccttccacaaagcgacaggagctcaagttcttcccaagagtcgttgaacaggccactatctgccaagcggtctcccactggatcgacgacttcccgtgccagtactgtgtctaccaaatcagtctcgaccaccggcagcctgcagcgcagtcgtagtgacatcgacgtaaatgccgccgcgtccgctaagtcgaaagtctccagctcttccgggaccacaccgttcagtagcgccgctgccctgccacccggatcctatgcatccctggggcggataagaacccggcgacaaagcagcgggagcgctaccaacgtggctagtacaccagataacagaggcaggtctagagcaaaggtagtcagccagtctcaacgcagcaggtctgccaacccggccggggcaggctcaaggtcgtcctcgcccgggaagctgctcggaagcggatacggcggactcaccggagggagctcccgagggcctccggtgaccccaagcagcgaaaaacgctcaaaaatcccacgaagccagggctgctcccgcgagacgtcgccaaaccggatcgggctggaccgcttcggtctgggtcaaccgggcaggatccccggatccgtaaatgctatgcgagtgcttagcacatctactgacctagaagccgccgtggcggacgccctgttgctgggagattcccgttccaagaagaaacctgttcgaagacgttatgagccgtacggcatgtactccgatgacgatgcaaattccgatgcgtcctctgtgtgtagtgaacggtcttacggatcccgtaacggtgggatccctcattatctgagacagactgaggacgtggccgaggtccttaatcattgtgcgtcctcgaattggagcgagcgtaaagagggacttctcggcttgcagaacctgttaaaaagccaacgaacactttcacgcgtcgaattaaaaagactgtgcgagatattcaccagaatgtttgctgatccccactccaaaatcgctgattctgaggctgagtgtgaggataaagagggtaacctgttcccctccgaagtatcttgcaccgtctcgttccagtacgtgttcggagatagctgcggtttttacaataattcgtag

SEQ ID NO: 299782 - DNA, 4485 bp, Artificial Sequence
  derived and/or modified sequence
atggaacccaggatggaatcttgccttgcacaggtgctgcagaaagatgtggggaagaggcttcaggtgggacaagagttgatcgactacttcagcgacaaacaaaagagtgccgacctcgaacacgaccagaccatgttggacaagctggtcgacggattggctactagctgggtaaactcctccaattataaagtggtactgctcggaatggatattctgagcgctttagttaccaggttacaagatagattcaaggcccaaatcggaactgtgctgccaagccttattgacaggctgggagacgccaaggattctgtcagggagcaggatcagactctcttgttaaagattatggaccaagccgccaacccccagtatgtctgggaccgtatgttaggcggattcaaacacaaaaatttcagaactagggagggcatctgcctctgtttgatagctacgcttaatgcgtccggggctcaaacgttgacactcagcaagatcgttccccacatttgcaacctactcggtgatcctaacagtcaagtgcgcgacgccgcaattaactctctcgttgagatctaccgtcacgttggcgaacgggtgagagccgatctcagtaagaagggcctgccgcagtcacgccttaatgtaatcttcaccaagttcgacgaggtacaaaagagtggtaatatgattcaaagcgctaacgacaagaattttgacgatgaagactctgttgacggaaatcgaccctcctcggcttcttctaccagttccaaggccccaccgtctagccgacgtaatgtcggaatggggactacacgcaggctgggcagttccacgctcggctccaaatcctcagccgctaaagaaggtgctggtgcggtggatgaggaggattttatcaaagcgttcgacgacgtgcctgtggtccaaatctattcatcaagggatctcgaggagagtattaataaaatccgcgagatactgtccgacgacaagcacgactgggaacaacgggtgaatgctctgaaaaagatcagatctctgctgctcgcaggggctgcagaatatgataactttttccaacatctccgcctcctggatggcgccttcaagcttagcgccaaggatctgcgatcacaggtcgttagggaggcctgtattacactcgggcacctgtcttcagtgctgggcaacaagttcgaccatggggccgaggccatcatgcctacgatttttaacctgattccaaattccgctaagattatggcaactagcggcgtagtggccgtgcgcctcatcatccgccacacccatattcccagacttatacctgtgatcacaagcaactgtacaagcaagagtgtcgcggtaagaaggaggtgtttcgaattcctggacttactgctgcaagaatggcagacccattcactggaacgccacattagcgtcctggctgagacaattaagaagggcattcatgatgcagacagcgaagcgcgaatagaagctcgcaaatgctattggggattccactcccatttttctcgggaggccgaacatctctatcataccctcgaatccagctatcagaaggctttgcagagccacctaaagaacagtgactccatcgtgtcactgccccagagcgaccgaagctcgtctagttcccaggagtcactaaatcggccactgtcagcaaaacggtccccgacaggctctactaccagcagggcctccacagtatccaccaagtctgtctccacgactggctccctgcagcggtctaggagcgatatagacgtgaacgctgccgcaagtgccaagtctaaagtgtcctcttcatctggtacaactcctttctcctctgcagccgccttaccacctgggagttatgcctccctaggtagaattagaacgcgtagacaaagtagcggttctgcgacgaatgtggcctctactccagataatcgggggcggtctagggctaaggttgtcagccagtcacaacggtcacgatccgccaacccggccggagcgggaagtcgatcctctagccctggcaaattactgggcagcgggtacggtgggttgaccggtgggtcctcacgcgggcctccggttacaccgtcaagcgagaaaagatcaaagatacctagatcgcaggggtgtagtagggagaccagcccaaatcgtatcggcctggataggttcggcttgggccagcccggacgtatccccggatccgtgaacgcgatgagagtgctcagcacttcaacagacctggaggcagcagttgcagatgccttagttcgaggcacctctacaggtaaaaaaaagccagttaggcgtcgctacgagccttacgggatgtacagcgacgatgatgcaaattctgacgccagctccgtgtgttccgagcgctcctacggatcacgcaacggcggcatccctcactatcttcgccagaccgaggacgttgcagaagtgcttaatcattgtgcatcatccaattggagcgagcgtaaagaagggctcctcggtttacagaacctactgaagtctcagaggacactctcacgcgtcgaacttaaacgactgtgcgaaatttttacaaggatgtttgcagatccccattctaagattgccgattcagaggcggagtgcgaagataaagagggtaatctgttcccctccgaggtgtcttgtacccgcgttttttccatgtttttggaaactttggttgacttcatcattatccacaaggacgacctccaagactggttgtttgtgctgctgacccaactgctcaagaagatgggcgccgacctgttaggttcagtgcaggctaaagttcagaaggccctcgacgtgaccagagatagttttcctttcgaccaacagttcaacattctcatgcgtttcatagttgaccaaacccagacccctaacctgaaggtgaaggtggccattcttaagtacatagagagtctggcccgccagatggatccaacagattttgtaaacagctcagagacccgactcgccgtcagcagaatcatcacgtggaccaccgaacccaaaagctcagacgtacgcaaagctgcacagattgtgctgatcagcctgtttgagttaaatacgccggaattcaccatgttgctgggcgctctgccaaaaacatttcaggacggagctacaaaactgctgcacaatcacctcaagaacagcagtaatacttctgtaggcagcccaagcaataccattgggcgtacccccagtaggcacacgtctagccgaacctccccattgacctcgcctaccaattgctcacacggcggcctctccccgtccatgctcgactatgatacagaaaatctgaactctgaagagatttattcatccctgagaggggtgacagaagcaattgagaagttcagttttaggagccaggaagatctcaatgagcctataaagagggacggcaagaaggagtgtgacattgtttcccgagatggtggcgctgcttcccccgccactgagggcaggggaggatcagaagtggaggggggcagaaccgccctcgataataagacaagtcttctgaacacccagccccctcgggcctttcctgggccccgcgcccgcgactacaacccctatccatacagtgacgccatcaacacatacgacaaaactgcccttaaggaggccgtgtttgacgatgacatggaacagcttagggatgtgcctattgaccacagcgacctcgtagcggacttactgaaagagctgagcaatcataacgagagagtggaagagagaaaaggcgccttgttggagttgctgaaaattactcgggaggattcactgggagtttgggaagagcatttcaagacaatcttgcttcttctcctggagacactgggagataaagaccattcaataagggcgctcgccttacgggtcctgagggagatattgcgcaatcagccagcacgtttcaagaattatgcagagctgacaatcatgaagactttagaggcacacaaagactctcacaaggaggtcgtccgcgccgcagaggaggctgcaagcaccttggcatcatccatccacccagagcagtgtattaaagtactgtgtcctatcatacagacagcggattatcctatcaatttggcagctatcaaaatgcaaacgaaggtcgtggaaagaattgcaaaggaatctctcctccaactgttggtggatattatcccaggcttgcttcaggggtatgataatacagaatcaagtgtgcggaaagcatcagtgttctgtctggtggctatctatagcgtgatcggtgaggacctgaagccacacctcgctcagcttaccggtagcaaaatgaaattgctaaacctgtatattaaacgagctcagacgacaaactctaacagctcgagtagctccgatgtcagtactcatagctag

SEQ ID NO: 299783 - DNA, 2115 bp, Artificial Sequence
  derived and/or modified sequence
tgaaccaagtttgatgaggtgcagaagagcggcaacatgatccagagcgccaatgacaagaactttgatgatgaagattctgtggatggcaaccggcccagcagcgccagcagcaccagcagcaaggccccacccagcagcagaagaaatgtgggcatgggcaccacccggcggctgggcagcagcaccctgggcagcaagagcagcgctgccaaggagggcgctggagctgtggatgaggaggacttcatcaaggcctttgatgatgtgcctgtggtgcagatctacagcagccgggacctggaggagagcatcaacaagatccgggagatcctgagtgatgacaagcatgactgggagcagagggtgaatgccctgaagaagatccgcagcctgctgctggccggggctgctgaatatgacaacttcttccagcacctgcggctgctggatggagccttcaagctgagcgccaaggacctgcggagccaggtggtgcgggaggcctgcatcaccctgggccacctgagctctgtgctgggcaacaagtttgaccacggggctgaggccatcatgcccaccatcttcaacctgatccccaacagcgccaagatcatggccaccagcggcgtggtggccgtgcggctcatcatccgccacacccacatccccaggctcatccctgtgatcaccagcaactgcaccagcaagtctgtggccgtgagaagacgctgctttgagttcctggacctgctgctgcaggagtggcagacccacagcctggagcggcacatctctgtgctggccgagaccatcaagaagggcatccatgatgctgacagcgaggccagaattgaggccaggaagtgctactggggcttccacagccacttcagccgggaggccgagcacctgtaccacaccctggagagcagctaccagaaggccctgcagagccacctgaagaacagcgacagcatcgtgtccctgccccagagcgacaggagcagcagcagcagccaggagagcctgaaccggcccctgagcgccaagaggagccccaccggcagcaccaccagccgggccagcacagtgtccaccaagtctgtgtccaccaccggcagcctgcagaggagcagaagtgacattgatgtgaatgctgctgccagcgccaagagcaaggtgagcagcagcagcggcaccacccccttcagcagcgctgctgccctgcccccaggcagctatgccagcctgggccgcatccgcacccggcggcagagcagcggcagcgccaccaacgtggccagcaccccagacaacagaggccgcagccgggccaaggtggtgtcccagagccagaggagccgcagcgccaacccagctggagctggcagccgcagcagcagccctgggaagctgctgggcagcggctacggcggcctgaccggcggcagcagccggggcccccctgtgacccccagcagcgagaagaggagcaagatccccaggagccagggctgcagccgggagaccagccccaaccgcatcggcctggacagatttggcctgggccagcccggccgcatccctggctctgtgaatgccatgagggtgctgagcaccagcacagacctggaggccgctgtggctgatgccctgctgctgggggacagccgcagcaagaagaagcctgtgagaagaagatatgagccctacggcatgtacagtgatgatgatgccaacagtgatgccagctctgtgtgcagcgagaggagctatggcagcagaaatggaggcatcccccactacctgcggcagacagaagatgtggccgaggtgctgaaccactgtgccagcagcaactggagcgagaggaaggagggcctgctgggcctgcagaacctgctgaagagccagaggaccctgagccgggtggagctgaagaggctgtgtgagatcttcaccaggatgtttgctgacccccacagcaagattgctgacagcgaggctgaatgtgaggacaaggagggcaacctcttccccagcgaggtgtcctgcaccgtgtccttccagtatgtgtttggagacagctgtggcttctacaacaacagctag

SEQ ID NO: 299784 - DNA, 4485 bp, Artificial Sequence
  derived and/or modified sequence
atggagcccaggatggagagctgcctggcccaggtgctgcagaaggatgtgggcaagaggctgcaggtgggccaggagctgattgactacttcagtgacaagcagaagtctgctgacctggagcatgaccagaccatgctggacaagctggtggatggcctggccacctcctgggtgaacagcagcaactacaaggtggtgctgctgggcatggacatcctgagcgccctggtgacccggctgcaggaccgcttcaaggcccagattggaacagtgctgcccagcctgattgaccggctgggagatgccaaggacagcgtgcgggagcaggaccagaccctgctgctgaagatcatggaccaggccgccaacccccagtatgtgtgggacaggatgctgggcggcttcaagcacaagaacttccgcacccgggagggcatctgcctgtgcctgattgccaccctgaatgccagcggggcccagaccctgaccctgagcaagatcgtgccccacatctgcaacctgctgggggaccccaacagccaggtgagagatgctgccatcaacagcctggtggagatctacagacatgtgggggagcgggtgcgggctgacctgagcaagaagggcctgccccagagccggctgaatgtcatcttcaccaagtttgatgaggtgcagaagagcggcaacatgatccagagcgccaatgacaagaactttgatgatgaggacagcgtggatggcaaccggcccagcagcgccagcagcaccagcagcaaggccccacccagcagcagaagaaatgtgggcatgggcaccacccggcggctgggcagcagcaccctgggcagcaagagcagcgctgccaaggagggcgctggagctgtggatgaggaggacttcatcaaggcctttgatgatgtgcctgtggtgcagatctacagcagccgggacctggaggagagcatcaacaagatccgggagatcctgagtgatgacaagcatgactgggagcagagggtgaatgccctgaagaagatccgcagcctgctgctggccggggctgctgaatatgacaacttcttccagcacctgcggctgctggatggagccttcaagctgagcgccaaggacctgcggagccaggtggtgcgggaggcctgcatcaccctgggccacctgagctctgtgctgggcaacaagtttgaccatggagctgaggccatcatgcccaccatcttcaacctgatccccaacagcgccaagatcatggccaccagcggcgtggtggccgtgcggctcatcatccgccacacccacatccccaggctcatccctgtgatcaccagcaactgcaccagcaagtctgtggccgtgagaagacgctgctttgagttcctggacctgctgctgcaggagtggcagacccacagcctggagcggcacatctctgtgctggccgagaccatcaagaagggcatccatgatgctgacagcgaggcccgcatcgaggccaggaagtgctactggggcttccacagccacttcagccgggaggccgagcacctgtaccacaccctggagagcagctaccagaaggccctgcagagccacctgaagaacagcgacagcatcgtgtccctgccccagagcgacaggagcagcagcagcagccaggagagcctgaaccggcccctgagcgccaagaggagccccaccggcagcaccaccagccgggccagcacagtgtccaccaagtctgtgtccaccaccggcagcctgcagaggagcagaagtgacattgatgtgaatgctgctgccagcgccaagagcaaggtgagcagcagcagcggcaccacccccttcagcagcgctgctgccctgcccccaggcagctatgccagcctgggccgcatccgcacccggcggcagagcagcggcagcgccaccaacgtggccagcaccccagacaacagaggccgcagccgggccaaggtggtgtcccagagccagaggagccgcagcgccaacccagctggggccggcagccgcagcagcagccctgggaagctgctgggcagcggctatggaggcctgactggaggcagcagccggggcccccctgtgacccccagcagcgagaagaggagcaagatccccaggagccagggctgcagccgggagaccagccccaacagaattggcctggaccgcttcggcctgggccagcccggccgcatccctggctctgtgaatgccatgagggtgctgagcaccagcacagacctggaggccgctgtggctgatgccctggtgcggggcaccagcacaggcaagaagaagcctgtgagaagaagatatgagccctacggcatgtacagtgatgatgatgccaacagtgatgccagctctgtgtgcagcgagaggagctatggcagcagaaatggaggcatcccccactacctgcggcagacagaagatgtggccgaggtgctgaaccactgtgccagcagcaactggagcgagaggaaggagggcctgctgggcctgcagaacctgctgaagagccagaggaccctgagccgggtggagctgaagaggctgtgtgagatcttcaccaggatgtttgctgacccccacagcaagattgctgacagcgaggccgagtgtgaggacaaggagggcaacctcttccccagcgaggtgtcctgcaccagggtcttctccatgttcctggagaccctggtggacttcatcatcatccacaaggatgacctgcaggactggctgtttgtgctgctgacccagctgctgaagaagatgggcgctgacctgctgggctctgtgcaggccaaggtgcagaaggccctggatgtgacccgggacagcttcccctttgaccagcagttcaacatcctgatgaggttcatcgtggaccagacccagacccccaacctgaaggtgaaggtggccatcctgaagtacatcgagagcctggcccggcagatggaccccacagactttgtgaacagcagcgagacccggctggccgtgagccgcatcatcacctggaccacagagcccaagagcagtgatgtgaggaaggccgcccagatcgtgctgatcagcctgtttgagctgaacaccccagagttcaccatgctgctgggcgccctgcccaagaccttccaggatggagccaccaagctgctgcacaaccacctgaagaacagcagcaacacctctgtgggcagccccagcaacaccatcggccgcacccccagccgccacaccagcagcaggaccagccccctgaccagccccaccaactgcagccacggcggcctgagccccagcatgctggactatgacacagagaacctgaacagcgaggagatctacagcagcctgcggggcgtgacagaggccatcgagaagttctccttccgcagccaggaggacctgaatgagcccatcaagagagatggcaagaaggaatgtgacatcgtgtccagagatggaggagctgccagccctgccacagagggccggggcggcagcgaggtggagggcggccgcacagccctggacaacaagaccagcctgctgaacacccagcccccccgggccttccctggcccccgggcccgggactacaacccctacccctacagtgatgccatcaacacctatgacaagacagccctgaaggaggccgtgtttgatgatgacatggagcagctgagagatgtgcccatcgaccacagcgacctggtggccgacctgctgaaggagctgagcaaccacaatgaaagagtggaggagaggaagggggccctgctggagctgctgaagatcacccgggaggacagcctgggcgtgtgggaggagcacttcaagaccatcctgctgctgctgctggagaccctgggggacaaggaccacagcatccgggccctggccctgcgggtgctgcgggagatcctgaggaaccagcctgcccgcttcaagaactatgcagagctgaccatcatgaagaccctggaggcccacaaggacagccacaaggaggtggtgcgggctgctgaggaggccgccagcaccctggccagcagcatccaccctgagcagtgcatcaaggtgctgtgccccatcatccagacagctgactaccccatcaacctggccgccatcaagatgcagaccaaggtggtggagagaattgccaaggagagcctgctgcagctgctggtggacatcatccctggcctgctgcagggctatgacaacacagagagctctgtgaggaaggccagcgtcttctgcctggtggccatctacagcgtgattggagaggacctgaagccccacctggcccagctgaccggcagcaagatgaagctgctgaacctgtacatcaagagggcccagaccaccaacagcaacagcagcagcagcagtgatgtgtccacccacagctag

SEQ ID NO: 299785 - DNA, 2115 bp, Artificial Sequence
  derived and/or modified sequence
tgaaccaagttcgacgaggtgcagaagagcggcaacatgatccagtccgccaacgataagaacttcgacgacgaggactcggtcgacggaaatcgaccctcgtctgccagctctacgagctccaaggctcctccttcctctcgcaggaacgtgggcatgggaacgacgaggcggctcggcagcagcactttggggtctaagagttccgcagcaaaagaaggggcgggtgctgtggacgaggaagacttcatcaaggcatttgatgacgtccccgtcgtgcaaatttatagctctcgtgatctggaagaaagcatcaacaaaatcagggaaatcctgtcggacgacaaacatgattgggagcagcgagtgaatgctctcaagaagatcaggagcttgctgttagctggtgcggccgagtacgacaacttttttcagcacctgcgcctgctggatggcgcattcaaactttcagccaaggacttgcggtcccaggtggtgcgagaagcctgcatcaccctgggccatttaagctccgtacttggtaacaaatttgatcacggcgcagaggccatcatgccaacgatcttcaatctcataccaaattctgctaaaatcatggctacctccggcgtcgtggccgtgagattaatcattcggcacacacacatcccacgacttatacccgtaatcacctctaactgcacaagtaaaagtgtggccgttcggaggcgctgcttcgagttcctagatctgctcctgcaggagtggcaaacacattcccttgaacgacacatcagtgtgctcgccgaaacaatcaaaaagggtatccacgacgcggattcagaggctcgaatagaagcgagaaaatgttattggggattccattcacattttagcagggaggcggagcacctgtaccatacactggaaagttcataccaaaaagctcttcagtcgcacttgaaaaacagtgatagtattgtttccctgcctcagagtgataggagttcaagcagttctcaggaaagccttaaccgccctctgtccgcaaagaggtcgccaactgggtccacaacctcccgcgcctcaacagtttctaccaaatcagtgtctacaaccggcagtttacagaggtcccggtcagacatagacgtaaatgccgctgcaagcgctaaaagcaaagtgtcttcatcatccgggactactccattctcgtcggctgccgctttaccacctggctcatacgcatcacttggccgcatcagaacgcgacggcagagcagcggatcagcaactaatgtggcatctacaccagacaacagggggcgtagcagggccaaagtggtgagtcaatcacaacgcagccgatcggcaaacccagcaggcgcaggtagtagaagcagcagccctggaaaactcctggggagtgggtatggagggttgacaggtggctctagccggggtccacccgtgaccccctcatcggagaaaagatcgaagatccccaggagtcagggctgctcccgagagaccagtccaaataggattgggctcgacagatttggactcggacagcctggccgaataccaggctctgtcaacgcaatgcgcgtgctgagtacgtctaccgacctggaagcggctgtcgctgacgccttgctcttaggagactctcggtctaaaaagaagcctgtgcgcagacgctatgaaccctacggcatgtacagcgatgacgacgctaattccgacgcctcctcagtttgcagcgagcggtcttacggcagccgaaatggcggcattccacactacttgcgccagaccgaggacgtcgccgaggtgttgaatcactgcgccagctcaaactggagcgaacgtaaggaaggtcttctggggctgcagaacctgctgaaatcacagcgcacacttagtagggtggagctcaaaaggctgtgcgagatttttactcggatgttcgctgatccccattcaaagattgcagacagtgaggcggagtgtgaggataaagaagggaatctttttcccagcgaggtatcctgtacagtgagcttccagtacgtcttcggcgactcatgcggtttttataataacagctag

SEQ ID NO: 299786 - DNA, 4485 bp, Artificial Sequence
  derived and/or modified sequence
atggagccccggatggagagctgcctggcccaggtgctgcagaaggatgtcggaaagaggctgcaggtggggcaggagttaatcgactactttagtgataaacagaagagtgcagaccttgaacatgaccagaccatgctcgacaagcttgtagacggattagcgactagttgggttaactcgtcaaattataaggtggtgctgttaggtatggatattttatccgctttggttacacggcttcaggatcgatttaaagcccagattggcactgtactccctagccttatcgatcgcctcggtgacgcgaaggattctgttagggagcaagaccagacactcctgttaaaaattatggaccaagcggcaaacccccagtacgtgtgggacaggatgctgggtggcttcaaacacaaaaactttcgcacacgagaggggatttgcctgtgcctcatagcgactttaaatgcaagcggcgcacagacacttacactttctaaaattgtcccacacatctgtaatcttctgggggatcccaattctcaggtgcgagacgcagccatcaactccctggtggaaatctacagacacgtgggcgagagagtgcgtgcagacctatccaagaaagggctgcctcagtctcggctgaacgtaatcttcacaaaattcgatgaggtccaaaagtctggaaatatgatccaaagcgccaatgacaaaaattttgatgacgaggattctgtggacggtaaccgcccctcgtcggccagctccacctccagtaaggcgccccccagtagcaggcggaatgtcggcatgggaactacgagacggctgggttcctcaactctaggttctaaaagtagcgctgccaaagaaggcgccggcgcagtggacgaagaggatttcatcaaagccttcgacgatgttcctgttgttcagatatattcgtcgcgcgacctggaggagagcatcaacaaaatcagggagatactgagtgatgataaacatgactgggagcagcgagttaacgccctgaaaaaaatccggagcttgctgctggcaggcgctgccgaatatgacaatttctttcaacacttacggctcctggatggcgctttcaagctgtccgcgaaagaccttcggtctcaagtggtgagggaagcttgcatcactcttgggcatctgtcttccgtcctgggtaataagtttgaccacggcgcggaggcaattatgcccacgattttcaacctcatccccaattccgcaaagatcatggcaacttccggggtggtggccgtgagactaattattcggcacacacacatcccgcgcctgatcccggtgatcacgtctaattgtacgtctaaaagtgtcgccgtcaggaggcgttgctttgagttccttgatctgttgttgcaggagtggcagacccattcgctggaacgacacatctccgtccttgctgaaactattaaaaagggcatccacgatgcagatagcgaagcgcggatcgaggcaaggaaatgctattggggattccattcacatttcagcagagaagctgagcacctgtatcatactctggagagctcatatcagaaggcattgcaatctcacttgaagaacagtgatagcattgtgagtctgcctcagtcagataggtcatccagctcttcccaggaaagcctcaacaggccattgagcgccaagagaagtcccaccggctccaccacatccagagcctcaacagtcagtaccaagagcgtgagcaccactggcagccttcagcgttcaagatccgatatagatgtgaatgctgccgccagcgctaaaagcaaggtgagctcaagcagcggcaccaccccctttagttcagcagccgcgctcccaccaggcagctacgcctccctaggaagaatcagaaccaggcgtcagagcagtggaagtgcaacgaatgtggcatccacccctgacaatagaggcagaagccgggccaaggttgtttcacaatctcagaggtcacgtagtgctaaccctgctggagcaggctctaggtcgtccagtcctggtaaacttctggggagcggctacgggggccttactggaggctcgtctagagggccaccagtaactccgtccagcgaaaagaggtccaaaataccacgctcccaggggtgttcgcgggaaacgagtcccaatagaatcggactggaccgattcggactgggacagcctggtcggatcccgggatccgtgaacgctatgagagtgctgtctacctctactgaccttgaggcagccgtggctgacgcacttgtgagaggcaccagcaccggcaaaaagaaaccggtgcggcggcggtacgagccatatggaatgtacagcgacgacgacgccaactcagatgcgagttctgtatgcagcgaacggtcttacggcagtaggaatggtggcatccctcattacctcagacagacggaggacgtggcagaagtgttaaatcactgcgcgtcctctaactggagtgagagaaaggaagggttgttaggtctccaaaatttactgaaatcacagcgcacactctcccgggtggaactgaaacgactgtgtgaaatttttacacggatgtttgcagaccctcatagcaaaatcgccgatagtgaggctgagtgcgaagacaaagaaggcaacctgttcccatctgaagtctcttgtaccagggtctttagcatgttcttagaaactttggtcgacttcattataatacacaaagatgacttgcaggactggctgtttgtgcttctgacacagctgctaaaaaaaatgggtgcagatctgctcgggtccgtccaggcaaaggtgcagaaggcactggatgtgactcgagacagctttccctttgatcagcagttcaatatcctgatgaggtttattgtggatcaaactcagaccccaaacctgaaggttaaagtggccatcctgaaatatattgagagtttggcgaggcagatggatcccaccgattttgtgaattcaagcgagactaggttggccgtgagtcgcatcatcacttggactacggagcctaaatcttcagacgtgcgaaaagccgctcagattgtgttaatctccctcttcgaattgaatacgccggagttcaccatgttgctcggagccctgccaaagaccttccaggatggtgccaccaagttgttacataatcatctgaagaattcctcaaatacatcggttggctcacccagtaatactattggaaggactccgtcccggcacacctcttccagaacgtctccattaaccagtccgaccaattgctcacacggcggtctaagcccctctatgctcgactatgataccgagaatctgaattccgaagagatttacagttctctccgcggggtaaccgaggctattgaaaaattttcgtttcggtcccaggaggatcttaacgaaccaatcaagcgggacggcaagaaagaatgtgacattgtgagccgagacgggggcgccgctagcccagccaccgaaggcagaggcggctctgaagtggaagggggaagaaccgccctggataacaagaccagccttctcaatactcagccccctcgcgcctttccaggacctcgagccagagattacaacccatacccttatagtgatgctattaacacatacgataagacagcacttaaagaagccgttttcgacgacgatatggagcaattgcgggatgttccaattgatcacagtgacctggtggccgatctcttaaaggagctatctaaccacaacgaaagagttgaggaaaggaagggcgcactgcttgaattgctgaagatcactagggaagattccctgggcgtttgggaagaacattttaaaaccattcttttgctgctgctggagactcttggggataaggaccattccatccgagctttggccctgagggtcctgagggagatccttagaaaccagccggctaggtttaagaattatgccgagctaactatcatgaaaacactggaagctcacaaggatagtcacaaggaagtggtcagggctgccgaagaagccgcctcaacattggcgagttcaattcatcctgaacagtgcatcaaggtgctgtgcccaatcattcagacagcagactacccgatcaacctggccgctatcaaaatgcaaaccaaggtggtggaacgaatcgcaaaggagtccttactccagcttctcgtggacataatacccgggcttttacagggttatgacaatacagaatcaagtgtacgcaaagcgagcgtattttgcctggtcgctatctattccgtgatcggcgaggacctgaaaccacacctagcacagctgaccgggagcaagatgaaactgctgaatctgtacataaagagagcccagactaccaactctaattcttcatccagctccgacgttagcactcattcatag

SEQ ID NO: 299787 - DNA, 2115 bp, Artificial Sequence
  derived and/or modified sequence
tgaaccaaattcgatgaagtacagaagtcaggaaacatgatccaatctgccaacgataaaaacttcgacgacgaggactctgttgatggaaaccgacccagcagcgcaagctccacatcttcaaaggcccctccaagtagtcgcagaaacgtagggatgggaactacaaggcgattgggtagcagtaccttggggtcaaaaagtagcgctgctaaagaaggagccggtgccgtcgacgaggaggacttcataaaggcattcgatgacgtgcccgtggttcagatttactcatcacgggatctcgaagagtctatcaacaaaatcagggagatattgagcgatgacaaacacgactgggagcagcgggtaaacgctcttaagaaaatcaggtccctgctcttggccggagctgctgaatacgataacttcttccagcacctaagactcttggacggggcttttaaactgtcagctaaggacctccggtctcaggttgtgcgagaggcctgtattaccctcggccacctgagtagtgtgctaggcaacaaatttgatcatggtgcagaggcaatcatgcccaccattttcaacttgatccccaacagcgccaaaatcatggcaacttccggagttgtcgctgtcagactgattatcaggcatactcacatcccccgactcatcccggtgataacatcgaactgtacttcgaagagtgttgccgttaggcgacgctgcttcgaatttctggacttgctcctgcaggagtggcaaacccactctctggagcgccatatctcagtgttggccgagactatcaagaagggtattcacgatgcagatagtgaggcaagaatcgaggcgcgaaagtgttactggggattccactcccatttctcccgagaagcggagcatctgtaccacaccctagagtcaagttatcagaaagctctgcagtcccatcttaagaactccgactcaattgtgagtctcccacagagtgatcggtcaagcagtagctcgcaggagtccctaaacagacctttgagcgcaaaacgcagccctactggctctacgacatcccgagcgtccacagtgtccactaaatctgtgagcactacaggctcactccagcggtcacggtcagatatagatgttaatgcagccgcaagcgccaaatccaaggtctcaagctcaagcgggaccaccccattctctagcgcggctgccctccccccaggaagctatgcaagcctgggtcgaatccgaacccgccgacagagcagtggtagtgccaccaatgttgcctcaacgcctgacaatcggggtcgcagcagggccaaggttgtgagccagtcccaaagaagtcgtagcgccaacccggctggcgctggttcaaggtcctcgagtccaggtaagttgcttggaagtggctacggaggcctcaccggcggttcgagcaggggtccacccgttactccaagctccgagaagcgaagcaaaatacccaggagtcagggctgctcacgggagacaagccctaataggatcgggcttgaccggttcgggctggggcagcctggacgcattcctggcagcgtgaacgcaatgcgggtcctgagcaccagcactgatctcgaagcggctgttgccgatgccctcctactgggtgattcccgatcaaagaaaaagccagtgcggcgaagatacgaaccttatggcatgtactctgacgatgatgccaactccgatgcaagtagcgtatgtagtgaacgcagctacggatcacgaaatgggggaataccccactacttaaggcaaacagaggacgtggcagaggtgttaaatcactgtgcaagttccaattggtccgagcggaaggaagggctgttgggactacagaatttgctcaaaagtcagagaaccctgtcgcgggttgagctaaagcgcctgtgcgaaattttcacgcggatgtttgccgatccgcactccaaaattgccgatagtgaagccgaatgcgaagacaaggaaggcaatcttttcccttctgaagtaagttgcactgtgtccttccaatacgtgttcggcgatagctgcggcttttataataactcatag

SEQ ID NO: 299788 - DNA, 4485 bp, Artificial Sequence
  derived and/or modified sequence
atggagccacgcatggagtcctgcctcgctcaggttctccagaaagatgtcggaaagaggcttcaggttggccaggaactcatcgattatttctctgacaaacagaagtccgctgacttagagcacgaccagaccatgctcgataagctcgtggacgggcttgcaacctcatgggtgaactcatctaactataaggtcgtactcctcggcatggacatcctgtccgccctcgtgacacgactgcaagaccgattcaaagctcagataggaacagtcttgcctagtctcattgaccggcttggcgacgcaaaagattctgtcagggaacaggatcaaactctgctgctgaaaattatggatcaggcggctaatccacagtatgtgtgggacaggatgctgggcggttttaaacataaaaatttccggaccagagagggaatttgtctgtgcctgattgccacccttaatgcaagcggagctcagaccctgaccctgagtaagatagtgcctcacatctgcaatctactgggggaccccaatagtcaagtgcgggatgccgctattaacagccttgtagaaatttatagacacgtgggtgaacgcgtgagagctgacctgtcaaagaagggcctgccacagtcacgcctgaatgttatcttcactaagtttgacgaggtgcaaaagtctggaaacatgattcagtccgccaacgataaaaactttgacgacgaggattcagtggatggcaatagaccctccagcgcatcgtcaacttctagcaaggccccaccttctagtagaagaaacgtggggatggggacgacgcggaggcttgggagctccacccttgggagcaaatcttcggccgcaaaggaaggggctggagccgtggatgaagaggactttatcaaagcctttgatgacgtgccagtcgtacagatctactcctcccgtgacctggaggaatctattaacaagatccgcgagatcctgtcggacgataagcatgactgggagcagcgggtgaacgctctcaagaaaattcgttcccttcttctggcgggtgcggcagagtatgacaactttttccagcacttgagacttttggacggagctttcaagttgtccgccaaggatctgaggtcccaggtcgtaagggaggcgtgcattaccctcggtcacctctcttctgttttaggaaataagttcgaccacggggcagaggccataatgccaacaatctttaatctcattccaaattcagctaagatcatggccactagcggcgtcgtagcagtgcggttgattatcaggcacacacacattccaagattgatcccagtgataactagtaattgtaccagtaagagcgttgctgtgcgtcgtcgatgcttcgagttcctggatctgttattacaagagtggcagacccacagtctggaaagacacatttctgttctggcggagaccattaaaaaggggatacacgatgccgacagtgaagcgcgaatcgaggcccgtaagtgctactggggatttcacagccatttcagtcgggaagccgagcatctataccatacacttgaaagcagttatcagaaggcactccagagccacttgaaaaattcagattccattgtttcactcccacagtctgatcggtcctcttcttcctctcaggaaagcctcaatcgccctctctctgctaagcggagtcctactggtagcacaacttctcgggcttccacggtgtctaccaagtcagtgagtacaaccgggagtctccagaggtcacgcagcgatattgacgttaatgcagccgcatctgctaaatctaaggttagcagcagcagcggtaccactcctttttcgagcgccgctgccctaccccctggcagctatgcgagtcttggtcggattagaacacgccgtcagtctagcggcagcgcaaccaatgttgcttctacaccagataaccgagggcgttcgcgggctaaggtcgtgagtcagtcccagaggtcgaggtcagctaacccagctggagcagggtccagaagctcttcacctgggaagctgctgggttccggttacggcggtctgaccggcggaagctcccgcggacctccagtgacaccctcttcggaaaaacgatctaaaatacctcgctctcagggatgttcccgggaaacatccccaaatcggatagggcttgataggttcggactggggcagccaggtcgcatcccaggatcagttaacgcaatgcgcgtactcagcacatccacagacctggaggcggcagtggctgacgctttagtgagaggaacaagcaccggcaaaaagaagcccgtgcgaagacgctacgagccctacgggatgtacagcgacgacgatgctaattccgacgcatcatcagtgtgcagcgagaggagctacgggagcagaaacggaggtatcccacattacttaaggcaaacggaggacgttgcggaggtgctgaaccactgtgcttccagcaactggagcgagcgaaaagaggggctgctgggcctgcaaaacctgttaaaaagccagagaactttaagcagggtagagctgaagcgcctgtgtgagatattcactcgcatgttcgctgaccctcatagcaagatagctgactctgaggctgagtgcgaggataaagaaggtaacttgttcccttctgaggttagttgtacgagggtgttcagtatgttcttagaaacacttgtcgactttataatcatacacaaagacgatctacaggactggctgttcgtactgctgactcagctgcttaagaaaatgggagcagatctgctgggctccgtgcaggccaaagtacagaaggctctggacgttacgcgggatagtttcccgttcgatcagcagttcaacattctgatgcgtttcatcgtggatcagacacagaccccaaacttaaaagtgaaggtggccatcctcaaatatatcgaaagcctggctaggcaaatggaccccacggatttcgtcaactcctctgagacccggctggcggtatcacggatcatcacctggacaacagagcccaaatcttctgatgtgaggaaggcggcacagatcgtgctcatttccctttttgaactcaacactcccgagttcaccatgctgctcggggctttgcccaagaccttccaagacggggcaaccaagcttctccacaatcatttgaagaactcctctaacaccagcgtgggctcacccagtaacactattggcagaactccatcccggcacacgtcctcgagaacaagtcctttgacttcgcccacgaactgcagccatggtggactttccccttcgatgttggattatgatacggaaaatttgaacagcgaggagatatactcgtcgctccggggagtcactgaagccattgagaaatttagcttccgaagtcaggaggatctgaacgagccaattaaacgggatggcaagaaagagtgcgacatcgtgtccagagacggtggcgctgccagcccagccactgaaggtcggggtggcagcgaagtggaggggggacgcaccgcactggacaataagacctcactgctgaacacccagcctcctcgtgcttttcccggacctagagcgagggactacaacccatacccctattcagacgctattaatacctatgacaagaccgctctcaaagaagccgtgttcgacgacgatatggagcagctgagagacgtgccaatcgatcatagcgatctggtcgctgaccttttgaaggaactaagcaaccacaacgagcgcgttgaagaaaggaagggagccttattggagctgctaaaaataactcgggaggactctttaggggtgtgggaggaacattttaaaactatcttgctcctactgctggagacactgggagacaaagaccattccatccgagccctcgccttaagagtgttaagagagatcctgagaaaccagccggcaaggttcaagaattacgcggaactcaccataatgaagacgctggaggctcataaagactcgcacaaagaggttgtccgcgcagccgaagaggcggcaagtacactggcttccagtattcaccctgagcagtgtatcaaagtgctctgccccatcattcagacagccgactatccaatcaacttagccgctatcaagatgcagacaaaggttgtggaacgcatcgccaaggagagtttactgcagttactggtggacataattcccggtttgttacagggctatgacaacacagagtcaagcgtgagaaaggcttcagtgttctgcctcgtggcaatctatagcgttatcggagaggatctcaagccgcacctggctcaactcacgggaagtaagatgaaactgcttaacctgtacattaagagagcccagaccacgaatagtaatagcagtagcagcagtgatgtctccacccacagctag

SEQ ID NO: 299789 - DNA, 7958 bp, Artificial Sequence
  derived and/or modified sequence
tttttttttttttaatccccgcaccaagcgcttaacctcattggggtggaggagaaggcggcggctctctggtccgcagcggcaacagtaacgaaaaacagggctaatggactgctgaattatgaagtatttcagacccagtagtagaacatcactctgccactcactcctttatctcctactagttatttaaattggacttttaatatcctaccagctgctcttcagacacacatggtgcattgttgccattccccagattgcatctttgaaacacaggctcttagtaaccttcagcgaacaaagaggcaacctcccagatacgtctgctgggagggagtcatcgtgactgccctctagcttttgctggatctggatttgaattccactatggagcctcgcatggagtcctgcctggcgcaggtgttgcagaaggatgtggggaaacgattgcaggttggccaagaactgatagactatttctcagacaaacagaagtctgctgaccttgagcatgaccagaccatgttagataaacttgtggatggacttgctacctcttgggtgaactctagcaattacaaggtggttctgctgggcatggacatcctgtccgccctggtgacccggctgcaggatcggttcaaggcgcagatcggcacagtgctgccaagtctaatagacagactaggagatgctaaagactctgtgagggagcaggaccaaactctgctgctaaagatcatggatcaagctgctaatccccagtacgtatgggacagaatgcttggaggcttcaaacacaagaatttccgtactcgagaaggcatctgtctctgccttatagcaacactcaatgcctctggagcacagactttaacactaagcaagattgtgccacatatatgcaacttacttggagatccaaacagccaggttcgagatgcagcaataaacagcttagtggaaatttacagacatgtaggagaacgtgtgagggcagatctcagtaaaaaaggattgccacagtcccggttgaatgtaatttttacaaaatttgatgaagtccagaaatctggaaacatgatacaatctgcaaatgataaaaatttcgacgatgaagattctgtggatggtaacagaccttcctctgctagttctacatcatccaaggctccaccaagttctcggagaaacgttggaatgggaaccacccgccggcttggttcatccacccttggatccaagtcttcagctgcaaaagaaggagctggtgctgttgatgaagaggattttattaaagcatttgatgatgtacctgtagtacagatttattccagccgagaccttgaggaatccataaacaaaattagggaaatattatctgatgacaagcatgattgggagcagagagtaaatgctctaaaaaagattagatctttacttttggctggtgctgctgagtatgataacttctttcaacatttgcgtcttttggatggagcctttaaactctctgctaaggacctgcggtctcaggtagtgcgggaggcttgtatcacgttggggcatctgtcatcagttctggggaataagtttgaccatggagctgaagccattatgccaactatctttaatttaattccaaacagtgccaaaattatggccacatctggtgttgtagctgttaggttaattattcggcacacacacatccctaggttaatacctgtcataacaagcaactgtacctctaagtctgtcgcagttagaaggcgctgttttgaatttttagatttgcttttacaagaatggcagacacattcactagaacgacacatatcagtattagctgaaacaataaagaagggaatacatgatgctgattccgaagcaagaatagaagccagaaaatgttactggggtttccacagtcacttcagcagagaagcagagcacttgtaccacaccttggagtcctcctaccagaaagccctgcagtcccacctgaagaactcagacagcatagtgtctctgcctcagtcagaccgctcatcttccagctctcaagagagtctaaatcgtccgctgtctgccaaaagaagtcctactggaagtaccacatctagagcttctacagttagtaccaaatctgtgtcaacgactgggtccctccagcgatctcgaagtgatattgatgtgaacgcagcagccagtgccaaatccaaagtctcctcatcttcgggcacgacgcctttcagctctgcagcagctttgcctccagggtcatacgcatccttaggtcggatccgcacaagacggcaaagctctgggagtgccaccaacgtcgcctctacacctgataaccggggccgcagtcgcgctaaagtggtttcacagtcccagcgatccagatctgctaatcctgctggtgctggcagccggtcaagttccccaggaaaattgttgggaagtggttatggtggacttactgggggctcctcacgaggcccacctgtgacaccgtcttcagaaaagcgaagcaagattcccaggagccagggatgtagccgggaaacaagtccaaaccgaataggattagatcggtttgggcttggccagccaggaagaatacctggttctgtgaatgccatgagagttctgagcacaagtacagatcttgaagctgctgttgctgatgctttggtaagaggcacaagcacaggaaaaaagaagcctgtgaggaggagatatgagccgtatgggatgtattctgacgatgatgccaacagtgatgcctcaagtgtttgctctgagcgctcatatggctccaggaatggtggcattccccattatctgcggcagactgaggatgtagcagaagttctcaaccactgtgctagttcaaactggtcagaaaggaaagaagggcttctgggcctgcagaacttactgaagagccaaagaacactgagtcgagttgaactgaaaaggttgtgtgagatcttcactcggatgtttgctgaccctcatagcaagattgctgattcagaagcagaatgtgaggataaagaaggaaatttgtttccatcagaagtctcttgtacaagagttttcagtatgtttttggagactcttgtggattttataataattcataaggatgatttacaagactggctttttgttcttctcacacaattacttaagaaaatgggagcagatttacttggatctgtgcaagcaaaagttcaaaaggctctagatgtcacaagggactcctttccatttgatcaacaatttaacattttgatgagatttattgtggatcaaactcaaactccaaacctcaaggtcaaagttgcaatcctgaaatacattgagtctctggccagacagatggatccaacagattttgtaaactctagtgagacaaggcttgctgtttctagaatcataacctggacaacagaaccaaagagttcagacgtgagaaaggcagcacagattgtgctaatctctctgtttgaattgaatactcctgaatttaccatgttacttggtgccttgccaaaaacattccaggatggtgccaccaaactcctgcacaaccacctcaagaattccagtaacaccagtgtgggctctccaagcaatacgattggccggacgccctcccgacacaccagcagcaggaccagccccctgacctcacccaccaactgttcccatgggggtctgtctccaagcatgctggactatgatacagagaacctgaactctgaagaaatctatagttctctacgtggagttacagaagccattgaaaagtttagttttcgaagccaagaagatctgaatgagccaattaaacgagatggcaaaaaggagtgtgatattgtgtcccgcgatgggggcgctgcctcccctgccactgagggccgggggggtagtgaagtagaaggaggccggacagctctggataacaagacctcactactcaacacccagcctccgcgcgccttcccggggccgcgggcgcgagactacaacccgtacccctactcagatgccatcaacacctacgacaagaccgccctgaaagaggctgtgttcgatgacgacatggagcagcttcgagacgtgcccatcgaccattctgacctggtggctgaccttctgaaagagctgtccaaccacaatgagcgagtggaggaacggaagggagccctgctggagctgctcaagatcacgcgggaagacagccttggtgtctgggaggagcacttcaagaccattctgctcctgctgctggagacccttggagacaaagaccattcaattcgagcactggcgttaagagttttgagggaaattctgagaaatcaaccagcaagatttaaaaactacgccgagctgacgattatgaagactctggaagcccacaaagactcccataaggaggtggtgagagcggctgaggaggctgcgtccacactggccagttccatccacccggagcagtgcatcaaggtgctctgccccatcatccagacggccgactaccccatcaaccttgctgccatcaagatgcagaccaaagtcgtcgagaggatcgcaaaggagtcattgctgcagctccttgtcgacatcatcccaggcttgctgcagggttatgacaacaccgaaagtagtgtgcgtaaggccagcgtgttttgcttagtggcaatttattccgtaatcggagaagacctgaaacctcaccttgcacagctcacagggagcaagatgaagctactaaacttatacataaagagggcccagaccaccaacagcaacagcagctcctcctccgatgtctccacgcacagctaatggcagtacctgtctcttgtgtagacctagaagcaatcggtggtgcctctcagagacctttccccacccccttcatcggctgcccagtcagtacaaggaggcccacaaatatttattacaatcagtattttggtcccttccagcttttctgtagaatcttactggtattgaatgtaaaggaagcaaggcctgtattgcagtcttcatacaaaacaaaaggaataagaacagaaaagagccatactgaaacatgtcttgtacagcctgctgagatggcgaaaccctgtgtgtggggtgcagtttttaaaaatcagagcgctctagccactacttggtagaaagtagcattttttttttcagttaataacatatttgggggtggggtggggtgttactttgtgttcttcctccttagcctattttcttgtgcgtatggtctgtgtggggcccctttcacagctgacaccacgaaaggtgatatatctttaagttgtgttctgagacctactaaaaatgggaatcaagtcttggcaagaacagtctgaagatggccttttaacaaacgctgggaattttgcttgtcatatccagactggaggccgactgccctggctttcagcgtagaattgggagtgcaccctgacagtctccttccagctctccctaatcgactccaccgacaaggtccctaccccagagcttccatgcaaaggaattcttcaagtttaaatctggacacaaaaataagataaatgtatggcatcatttagggatgcctgagatggcagttcatgaagcacagaagataaagaagaagtctttcatctttactgctgagatccttgggaacactgttgtcatgggggctctgccaagaccctcatctctgggctacacggtgattcagattgagcaccaacttgtttcctcccctcaaagttctgcctaagccgttcagttctaacatggtctcagttaatctggtaaatggcatctttaccatcttagttctgacttctcagtttaatgtgggattaagagccaagaaaagcctagagagactggatatcacaattttttttaattttataaactgaagtagttccttgaatgtctgttgatgaaatagtcactgtttaaggaaaaaagtaattatgaggtgtagcagattgcagaaaaacaggattagaaacacacttaaaaagaacacacatttagagtctctcttcctcctcagcgaaccactaggccccctttttaaaaacacctttagagcctaattactccaataaaagtaactagaggtttggagtctggttaaataaattctgagtaaaattcttaagccaaatggaaattcttaatgcaatcatgaggacttctattgtctcttactgttgtattagatcctataaattgaactgatttttccataaggaaaatgcttcttttgagattaattctaataacgtatttgctattgcagtgcagagcccactgcaactgctaggactgaaagcagaggctgggtgccagagcacgtgattcttaacatcatttccacagacccctctgccctgaccctctgcattggatgcaggaagctgggaaagactgatgttgatttggaaacatgggctgaaaatgaaggccccatagtgcataggaacagtaaagccagggtgctgacgtgtgtgtgtgtgtgtgtgtgtgtgtgtgtgtgtgtgtggtgttgtgtgtgtttgtgcgtgcaccctacacatgtgtggtacctcactgctgctgtttagggaacttgagggacgcgtttcaaggggttgggtattactgacgagctttggctcaaaatatagcaggaccaggtcttttgttgataagtactgtttgtttattaatatgtcattaatggtatttcttttttacactctacaagtgaattagggagtctcttgttgacccctttgttgcaggaatgtgcgtcgggctaggttatccatgagtttctttattcctaatgcagttagaaagacctttctccttgagctctttgactcccagaaggtaccccagtccccagtgtacttagaaaggatctcgaacattgctggacgtcctcatagtactcacaaagggctagccttgaatgtcactcgcccagtcttcagtctcctgacttagagatacaatcacgtcacaggtctcttggcctcaatctgaaaactgctgccgccgcgccgaggagactcgcatgccgccaccacctcactgggagggcgccgagcccaccgtcgccccctagaccctgacagctgcagctgccttgccttgccgccgcctccctgcagggcccctgttccaatgaaaaacagaacacaaaagagcagagcacctaagcctgtctctgcctccctgtctaccggactggccagggcccaagacccccgctgctccactgcggggctgggcgggctgactccctgcttcctccaagctgctgcctcccctgcagccagggtctgggcagggtgcagccggtcctcggggcacgcagcttccttcaagtacactgtgtgtgcttcccggacctgcggcgatgccacgggcctgccttttctatgcgcctcactagcttaccaccctgtgcaggtaatgcaactgactttgtctcatcagtctttttctttccctgccaccctttatttatcaagcgtaatgttacactttaaaggacagcaaataagaactttgtagaatcccaccaggactttgctaacaataatgtttggaaataaagaagtgctctgaaaaaatatcagccaccaaaatagttatgttggcactgtgttcacacgcatggtccccacacccccaggttgggtgggtttttttgttttttgggtttttttgggggggggggctttttcatgttacatccatatctgtatttatatcttatttgtttcactttcaagtgtatcatggcaaatgtacagatttttttgttaataatgtgctaggatttgctaaaaaagaaaaaaaaaaaacccttttgagtttgccctagaataaatgagacttaattc

SEQ ID NO: 299790 - DNA, 2115 bp, Artificial Sequence
  derived and/or modified sequence
tgaaccaagttcgacgaggtgcagaagagcggcaacatgatccagagcgccaacgacaagaacttcgacgacgaggacagcgtggacggcaacagacccagcagcgccagcagcaccagcagcaaggccccccccagcagcagaagaaacgtgggcatgggcaccaccagaagactgggcagcagcaccctgggcagcaagagcagcgccgccaaggagggcgccggcgccgtggacgaggaggacttcatcaaggccttcgacgacgtgcccgtggtgcagatctacagcagcagagacctggaggagagcatcaacaagatcagagagatcctgagcgacgacaagcacgactgggagcagagagtgaacgccctgaagaagatcagaagcctgctgctggccggcgccgccgagtacgacaacttcttccagcacctgagactgctggacggcgccttcaagctgagcgccaaggacctgagaagccaggtggtgagagaggcctgcatcaccctgggccacctgagcagcgtgctgggcaacaagttcgaccacggcgccgaggccatcatgcccaccatcttcaacctgatccccaacagcgccaagatcatggccaccagcggcgtggtggccgtgagactgatcatcagacacacccacatccccagactgatccccgtgatcaccagcaactgcaccagcaagagcgtggccgtgagaagaagatgcttcgagttcctggacctgctgctgcaggagtggcagacccacagcctggagagacacatcagcgtgctggccgagaccatcaagaagggcatccacgacgccgacagcgaggccagaatcgaggccagaaagtgctactggggcttccacagccacttcagcagagaggccgagcacctgtaccacaccctggagagcagctaccagaaggccctgcagagccacctgaagaacagcgacagcatcgtgagcctgccccagagcgacagaagcagcagcagcagccaggagagcctgaacagacccctgagcgccaagagaagccccaccggcagcaccaccagcagagccagcaccgtgagcaccaagagcgtgagcaccaccggcagcctgcagagaagcagaagcgacatcgacgtgaacgccgccgccagcgccaagagcaaggtgagcagcagcagcggcaccacccccttcagcagcgccgccgccctgccccccggcagctacgccagcctgggcagaatcagaaccagaagacagagcagcggcagcgccaccaacgtggccagcacccccgacaacagaggcagaagcagagccaaggtggtgagccagagccagagaagcagaagcgccaaccccgccggcgccggcagcagaagcagcagccccggcaagctgctgggcagcggctacggcggcctgaccggcggcagcagcagaggcccccccgtgacccccagcagcgagaagagaagcaagatccccagaagccagggctgcagcagagagaccagccccaacagaatcggcctggacagattcggcctgggccagcccggcagaatccccggcagcgtgaacgccatgagagtgctgagcaccagcaccgacctggaggccgccgtggccgacgccctgctgctgggcgacagcagaagcaagaagaagcccgtgagaagaagatacgagccctacggcatgtacagcgacgacgacgccaacagcgacgccagcagcgtgtgcagcgagagaagctacggcagcagaaacggcggcatcccccactacctgagacagaccgaggacgtggccgaggtgctgaaccactgcgccagcagcaactggagcgagagaaaggagggcctgctgggcctgcagaacctgctgaagagccagagaaccctgagcagagtggagctgaagagactgtgcgagatcttcaccagaatgttcgccgacccccacagcaagatcgccgacagcgaggccgagtgcgaggacaaggagggcaacctgttccccagcgaggtgagctgcaccgtgagcttccagtacgtgttcggcgacagctgcggcttctacaacaacagctag

SEQ ID NO: 299791 - DNA, 4485 bp, Artificial Sequence
  derived and/or modified sequence
atggagcccagaatggagagctgcctggcccaggtgctgcagaaggacgtgggcaagagactgcaggtgggccaggagctgatcgactacttcagcgacaagcagaagagcgccgacctggagcacgaccagaccatgctggacaagctggtggacggcctggccaccagctgggtgaacagcagcaactacaaggtggtgctgctgggcatggacatcctgagcgccctggtgaccagactgcaggacagattcaaggcccagatcggcaccgtgctgcccagcctgatcgacagactgggcgacgccaaggacagcgtgagagagcaggaccagaccctgctgctgaagatcatggaccaggccgccaacccccagtacgtgtgggacagaatgctgggcggcttcaagcacaagaacttcagaaccagagagggcatctgcctgtgcctgatcgccaccctgaacgccagcggcgcccagaccctgaccctgagcaagatcgtgccccacatctgcaacctgctgggcgaccccaacagccaggtgagagacgccgccatcaacagcctggtggagatctacagacacgtgggcgagagagtgagagccgacctgagcaagaagggcctgccccagagcagactgaacgtgatcttcaccaagttcgacgaggtgcagaagagcggcaacatgatccagagcgccaacgacaagaacttcgacgacgaggacagcgtggacggcaacagacccagcagcgccagcagcaccagcagcaaggccccccccagcagcagaagaaacgtgggcatgggcaccaccagaagactgggcagcagcaccctgggcagcaagagcagcgccgccaaggagggcgccggcgccgtggacgaggaggacttcatcaaggccttcgacgacgtgcccgtggtgcagatctacagcagcagagacctggaggagagcatcaacaagatcagagagatcctgagcgacgacaagcacgactgggagcagagagtgaacgccctgaagaagatcagaagcctgctgctggccggcgccgccgagtacgacaacttcttccagcacctgagactgctggacggcgccttcaagctgagcgccaaggacctgagaagccaggtggtgagagaggcctgcatcaccctgggccacctgagcagcgtgctgggcaacaagttcgaccacggcgccgaggccatcatgcccaccatcttcaacctgatccccaacagcgccaagatcatggccaccagcggcgtggtggccgtgagactgatcatcagacacacccacatccccagactgatccccgtgatcaccagcaactgcaccagcaagagcgtggccgtgagaagaagatgcttcgagttcctggacctgctgctgcaggagtggcagacccacagcctggagagacacatcagcgtgctggccgagaccatcaagaagggcatccacgacgccgacagcgaggccagaatcgaggccagaaagtgctactggggcttccacagccacttcagcagagaggccgagcacctgtaccacaccctggagagcagctaccagaaggccctgcagagccacctgaagaacagcgacagcatcgtgagcctgccccagagcgacagaagcagcagcagcagccaggagagcctgaacagacccctgagcgccaagagaagccccaccggcagcaccaccagcagagccagcaccgtgagcaccaagagcgtgagcaccaccggcagcctgcagagaagcagaagcgacatcgacgtgaacgccgccgccagcgccaagagcaaggtgagcagcagcagcggcaccacccccttcagcagcgccgccgccctgccccccggcagctacgccagcctgggcagaatcagaaccagaagacagagcagcggcagcgccaccaacgtggccagcacccccgacaacagaggcagaagcagagccaaggtggtgagccagagccagagaagcagaagcgccaaccccgccggcgccggcagcagaagcagcagccccggcaagctgctgggcagcggctacggcggcctgaccggcggcagcagcagaggcccccccgtgacccccagcagcgagaagagaagcaagatccccagaagccagggctgcagcagagagaccagccccaacagaatcggcctggacagattcggcctgggccagcccggcagaatccccggcagcgtgaacgccatgagagtgctgagcaccagcaccgacctggaggccgccgtggccgacgccctggtgagaggcaccagcaccggcaagaagaagcccgtgagaagaagatacgagccctacggcatgtacagcgacgacgacgccaacagcgacgccagcagcgtgtgcagcgagagaagctacggcagcagaaacggcggcatcccccactacctgagacagaccgaggacgtggccgaggtgctgaaccactgcgccagcagcaactggagcgagagaaaggagggcctgctgggcctgcagaacctgctgaagagccagagaaccctgagcagagtggagctgaagagactgtgcgagatcttcaccagaatgttcgccgacccccacagcaagatcgccgacagcgaggccgagtgcgaggacaaggagggcaacctgttccccagcgaggtgagctgcaccagagtgttcagcatgttcctggagaccctggtggacttcatcatcatccacaaggacgacctgcaggactggctgttcgtgctgctgacccagctgctgaagaagatgggcgccgacctgctgggcagcgtgcaggccaaggtgcagaaggccctggacgtgaccagagacagcttccccttcgaccagcagttcaacatcctgatgagattcatcgtggaccagacccagacccccaacctgaaggtgaaggtggccatcctgaagtacatcgagagcctggccagacagatggaccccaccgacttcgtgaacagcagcgagaccagactggccgtgagcagaatcatcacctggaccaccgagcccaagagcagcgacgtgagaaaggccgcccagatcgtgctgatcagcctgttcgagctgaacacccccgagttcaccatgctgctgggcgccctgcccaagaccttccaggacggcgccaccaagctgctgcacaaccacctgaagaacagcagcaacaccagcgtgggcagccccagcaacaccatcggcagaacccccagcagacacaccagcagcagaaccagccccctgaccagccccaccaactgcagccacggcggcctgagccccagcatgctggactacgacaccgagaacctgaacagcgaggagatctacagcagcctgagaggcgtgaccgaggccatcgagaagttcagcttcagaagccaggaggacctgaacgagcccatcaagagagacggcaagaaggagtgcgacatcgtgagcagagacggcggcgccgccagccccgccaccgagggcagaggcggcagcgaggtggagggcggcagaaccgccctggacaacaagaccagcctgctgaacacccagccccccagagccttccccggccccagagccagagactacaacccctacccctacagcgacgccatcaacacctacgacaagaccgccctgaaggaggccgtgttcgacgacgacatggagcagctgagagacgtgcccatcgaccacagcgacctggtggccgacctgctgaaggagctgagcaaccacaacgagagagtggaggagagaaagggcgccctgctggagctgctgaagatcaccagagaggacagcctgggcgtgtgggaggagcacttcaagaccatcctgctgctgctgctggagaccctgggcgacaaggaccacagcatcagagccctggccctgagagtgctgagagagatcctgagaaaccagcccgccagattcaagaactacgccgagctgaccatcatgaagaccctggaggcccacaaggacagccacaaggaggtggtgagagccgccgaggaggccgccagcaccctggccagcagcatccaccccgagcagtgcatcaaggtgctgtgccccatcatccagaccgccgactaccccatcaacctggccgccatcaagatgcagaccaaggtggtggagagaatcgccaaggagagcctgctgcagctgctggtggacatcatccccggcctgctgcagggctacgacaacaccgagagcagcgtgagaaaggccagcgtgttctgcctggtggccatctacagcgtgatcggcgaggacctgaagccccacctggcccagctgaccggcagcaagatgaagctgctgaacctgtacatcaagagagcccagaccaccaacagcaacagcagcagcagcagcgacgtgagcacccacagctag

SEQ ID NO: 299792 - protein, 442 aa, Artificial Sequence
  derived and/or modified sequence
MCELSREDAPVRWYKDGLEVEESEALVLERDGPRCRLVLPAAQPEDGGEFVCDAGDDSAFFTVTVTAPPERIVHPAARSLDLHFGAPGRVELRCEVAPAGSQVRWYKDGLEVEASDALQLGAEGPTRTLTLPHAQPEDAGEYVCETRHEAITFNVILAEPPVQFLALETTPSPLCVAPGEPVVLSCELSRAGAPVVWSHNGRPVQEGEGLELHAEGPRRVLCIQAAGPAHAGLYTCQSGAAPGAPSLSFTVQVAEPLLVKLVSELTPLTVHEGDDATFRCEVSPPDADVTWLRNGAVVTPGPQVEMAQNGSSRILTLRGCQLGDAGTVTLRAGSTATSARLHVRETELLFLRRLQDVRAEEGQDVCLEVETGRVGAAGAVRWVRGGQPLPHDSRLSMAQDGHIHRLFIHGVILADQGTYGCESHHDRTLARLSVRRECPVLS

SEQ ID NO: 299793 - protein, 1401 aa, Artificial Sequence
  derived and/or modified sequence
MKASSGDQGSPPCFLRFPRPVRVVSGAEAELKCVVLGEPPPVVVWEKGGQQLAASERLSFPADGAEHGLLLTAALPTDAGVYVCRARNAAGEAYAAAAVTVLEPPASDPELQPAERPLPSPGSGEGAPVFLTGPRSQWVLRGAEVVLTCRAGGLPEPTLYWEKDGMALDEVWDSSHFALQPGRAEDGPGASLALRILAARLPDSGVYVCHARNAHGHAQAGALLQVHQPPESPPADPDEAPAPVVEPLKCAPKTFWVNEGKHAKFRCYVMGKPEPEIEWHWEGRPLLPDRRRLMYRDRDGGFVLKVLYCQAKDRGLYVCAARNSAGQTLSAVQLHVKEPRLRFTRPLQDVEGREHGIAVLECKVPNSRIPTAWFREDQRLLPCRKYEQIEEGTVRRLIIHRLKADDDGIYLCEMRGRVRTVANVTVKGPILKRLPRKLDVLEGENAVLLVETLEAGVEGRWSRDGEELPVICQSSSGHMHALVLPGVTREDAGEVTFSLGNSRTTTLLRVKCVKHSPPGPPILAEMFKGHKNTVLLTWKPPEPAPETPFIYRLERQEVGSEDWIQCFSIEKAGAVEVPGDCVPSEGDYRFRICTVSGHGRSPHVVFHGSAHLVPTARLVAGLEDVQVYDGEDAVFSLDLSTIIQGTWFLNGEELKSNEPEGQVEPGALRYRIEQKGLQHRLILHAVKHQDSGALVGFSCPGVQDSAALTIQESPVHILSPQDRVSLTFTTSERVVLTCELSRVDFPATWYKDGQKVEESELLVVKMDGRKHRLILPEAKVQDSGEFECRTEGVSAFFGVTVQDPPVHIVDPREHVFVHAITSECVMLACEVDREDAPVRWYKDGQEVEESDFVVLENEGPHRRLVLPATQPSDGGEFQCVAGDECAYFTVTITDVSSWIVYPSGKVYVAAVRLERVVLTCELCRPWAEVRWTKDGEEVVESPALLLQKEDTVRRLVLPAVQLEDSGEYLCEIDDESASFTVTVTEPPVRIIYPRDEVTLIAVTLECVVLMCELSREDAPVRWYKDGLEVEESEALVLERDGPRCRLVLPAAQPEDGGEFVCDAGDDSAFFTVTVTEPPVQFLALETTPSPLCVAPGEPVVLSCELSRAGAPVVWSHNGRPVQEGEGLELHAEGPRRVLCIQAAGPAHAGLYTCQSGAAPGAPSLSFTVQVAEPPVRVVAPEAAQTRVRSTPGGDLELVVHLSGPGGPVRWYKDGERLASQGRVQLEQAGARQVLRVQGARSGDAGEYLCDAPQDSRIFLVSVEEPLLVKLVSELTPLTVHEGDDATFRCEVSPPDADVTWLRNGAVVTPGPQRQSCCSYGGCRMCGQRKARMCVSKWRQAEWVQRGPCAGCEVGSPCPTTLACPWPRMGTSTASSSMVSYWPTRAPTAARATTIAPWPGSA

SEQ ID NO: 299794 - DNA, 4206 bp, Artificial Sequence
  derived and/or modified sequence
atgaaggccagttctggggatcagggctcgcctccatgttttttgcggtttcctagacctgtgagggttgtttccggcgccgaggcagaactgaagtgtgtagttctgggcgagcctccgcccgtcgtcgtttgggaaaaaggtggtcagcagttagctgcgtctgagcgattgtcgttcccggccgatggagctgaacacgggctgctgctgaccgctgctctgcccacagacgctggggtgtatgtatgtagggccagaaacgccgcaggcgaggcctacgccgccgccgctgtcactgtcctcgagcctcccgcaagcgaccccgagttacaacctgcagagagaccacttccatccccggggagcggagaaggagcaccagtgttccttactgggccccgctctcaatgggttttgagaggtgcagaagtggtgttgacctgtcgcgcgggaggactccctgaacctaccctgtactgggaaaaggacggcatggcgctggatgaagtgtgggacagcagtcactttgcactgcagccgggacgtgctgaggatgggccaggtgcatcacttgcgctaagaatcctggccgctcgactgcctgactcaggggtgtacgtgtgccacgctcggaatgctcatggtcatgcccaagctggggctctcttgcaggtccaccagcctcctgagagtccacctgcagaccctgacgaggcaccggctccggtagttgagcctctcaaatgcgcaccgaagactttctgggtgaatgaaggaaaacacgctaagtttcggtgctacgtgatgggaaagcccgaaccagaaatcgaatggcattgggaggggcggccactactgccggaccggcggcggctgatgtatagagacagagatggcgggttcgttttgaaagtgctgtactgtcaggcaaaggaccgggggctgtacgtttgtgccgcccgtaacagcgctggccagaccctgagtgccgtccaacttcacgtgaaggagcctcgactgaggtttactaggcccctgcaagatgtcgagggcagggaacatggaatagccgtgctcgagtgcaaagtccccaattcccgcatacccacagcatggtttagagaagaccagcgtctgctgccctgtaggaagtacgagcagattgaggaagggacggttagacggctaattattcacagactgaaggccgacgatgacgggatctatctgtgtgagatgcggggacgagtccggactgtggctaatgtgacagtaaagggcccgattctaaaacgcctaccacgcaagctggatgtgttagagggagagaatgctgttcttcttgtggagacccttgaggcaggagtcgagggaaggtggtccagggatggtgaggagctccctgtgatatgccagtccagctccggacacatgcatgccctggtgcttcctggcgtgacacgggaggatgccggcgaggtcaccttctctctcgggaactcccgaaccactaccttactgagggtcaaatgcgtcaagcattccccccccggtcccccaattctggccgagatgtttaagggacacaagaataccgttctcctgacctggaagccacccgagcccgcgcctgagaccccctttatttacagacttgaacgacaggaagtaggttcagaggattggattcagtgtttctcaatcgaaaaagccggagctgttgaggtaccaggtgattgcgtcccctccgagggtgactaccgcttccgtatctgcactgtgtctgggcacggcaggtcccctcacgtggtgttccatggatctgcccacttagtgccgaccgcccgactggtggctggtctggaagacgtccaggtgtatgacggcgaagatgctgttttctcgttggatcttagtacaatcatccagggtacatggttcctgaatggggaagaactgaaatccaacgaaccagaaggccaggtggagcccggcgctcttcgctatagaatcgaacagaagggcctgcaacatcgcttaatactgcacgccgttaaacatcaggactctggtgccctcgtgggcttttcatgtcctggtgttcaggatagcgccgcattaaccattcaagagtcccccgtgcacattttgtctccccaggatcgcgtcagcctgacctttacaacaagtgagcgggttgttctcacttgcgagctctctcgagtggacttccccgctacctggtacaaagacggccagaaggttgaggaatctgagctcttagtcgtgaaaatggacggaaggaaacaccgcctcatactgccagaagccaaagttcaggattccggtgagtttgagtgtagaactgaaggcgtcagcgccttcttcggtgtaaccgtgcaagatccccccgtccacatcgtggatccaagggagcatgtctttgttcacgcaattacttcagagtgcgtgatgttggcttgtgaggtcgatcgcgaggatgctcccgtgaggtggtacaaggatggacaggaggttgaagagagcgattttgtagtgctggagaatgaaggaccccaccgtagactggttctgccagctacacagccttctgacggaggggagttccagtgcgtggctggagatgagtgcgcatacttcacagttacaatcacagacgtaagcagctggatcgtgtaccctagcggaaaggtctatgtagctgctgtgagactggagagagttgtgctgacatgcgagctatgtaggccatgggccgaggtgcgctggacaaaggacggggaggaggtggtcgaatcacccgccctgttgctgcagaaggaagacactgtgaggcgcctcgtgctccctgcggtccagctggaggacagtggcgagtacctctgcgagattgacgacgagtccgccagttttactgtgacagtgacagagcctcccgtgaggatcatctatccacgtgacgaggtgacgctgatcgccgtcactttggagtgcgtggtcctgatgtgcgagttaagcagggaagacgccccagtgcggtggtataaggacggtctggaggtagaggagagcgaagctctggtgcttgagcgagatggtccacgatgtcgccttgtgctccccgcagctcaaccggaggatggaggggagttcgtctgcgacgctggagatgactccgcctttttcacggtcacagttacagaaccacccgtgcagttcctcgcactggaaacaaccccatcccctctgtgcgtggcaccaggggagcctgtagtgctgtcctgcgaactgagtagggctggagcaccagttgtgtggagccacaacgggcggccagtccaggagggggagggactcgagctgcatgccgagggacccaggagagtattatgcattcaggctgctggtccagcacacgctggactatacacctgccagtccggggccgcaccaggagcccccagccttagcttcactgttcaggtggcggaaccaccggtcagagttgtcgctcctgaggccgctcaaactagggtacggagtacacctgggggggacttagagctggttgtccatctatcaggacccggggggcctgtccgatggtataaggatggggaaaggctcgctagccagggtcgagtccagctggaacaagctggagctagacaggtgctccgtgtgcagggggcccgctccggcgatgcaggggagtacctgtgtgacgcacctcaagacagcagaattttcctcgtgtcagtggaggagccactcctcgtcaagctggtaagcgagctgacaccgctgacagttcacgaaggagacgatgctacgttccggtgcgaagtcagcccgccagacgccgatgtcacttggctcaggaacggggcggtggtcactcctggccctcaacgccagtcatgctgctcatatggagggtgtaggatgtgtggccagcggaaagcccggatgtgcgtaagtaagtggcgacaagcagaatgggtgcaaagaggaccctgtgcagggtgcgaagtaggttctccctgtccaactaccttggcttgcccctggcccagaatgggaacctctacagcttcctcctcgatggtgtcttattggcccactcgcgcccctacagcagcccgcgccaccactatcgcgccttggccggggagcgcttag

SEQ ID NO: 299795 - DNA, 4206 bp, Artificial Sequence
  derived and/or modified sequence
atgaaggccagcagcggggaccagggcagccccccctgcttcctgcgcttccccaggcctgtgcgggtggtgtctggagctgaggccgagctgaagtgtgtggtgctgggggagcccccacctgtggtggtgtgggagaagggcggccagcagctggccgccagcgagcggctgtccttcccagcagatggagctgagcacggcctgctgctgacagctgccctgcccacagatgctggggtgtatgtgtgccgggccagaaatgctgctggggaggcctatgctgctgctgctgtgacagtgctggagcccccagccagtgaccctgagctgcagcctgctgagcggcccctgcccagccctggcagcggggagggcgcccctgtgttcctgaccggccccaggagccagtgggtgctgcggggagctgaggtggtgctgacctgcagagctgggggcctgcctgagcccaccctgtactgggagaaggatggcatggccctggatgaggtgtgggacagcagccactttgccctgcagcccggccgggcagaagatggccctggggccagcctggccctgcgcatcctggccgcccggctgcctgacagcggcgtgtatgtgtgccacgccagaaatgcccacggccacgcccaggccggggccctgctgcaggtgcaccagcccccagagagccccccagctgaccctgatgaggccccagcccctgtggtggagcccctgaagtgtgcccccaagaccttctgggtgaatgaaggcaagcacgccaagttccgctgctacgtgatgggcaagccagagcctgagattgagtggcactgggagggccggcccctgctgcctgacagaagaaggctgatgtacagagacagagatggcggctttgtgctgaaggtgctgtactgccaggccaaggaccggggcctgtatgtgtgtgccgccaggaacagcgctggccagaccctgtctgctgtgcagctgcacgtgaaggagccccggctgcgcttcacccggcccctgcaggatgtggagggccgggagcacggcattgctgtgctggagtgcaaggtgcccaacagccgcatccccacagcctggttccgggaggaccagaggctgctgccctgcaggaaatatgagcagatcgaggagggcaccgtgagaagactcatcatccaccggctgaaggcagatgatgatggcatctacctgtgtgagatgaggggccgggtgaggacagtggccaacgtgacagtgaagggccccatcctgaagaggctgcccaggaagctggatgtgctggagggggagaatgctgtgctgctggtggagaccctggaggccggcgtggagggccgctggagcagagatggagaggagctgcctgtgatctgccagagcagcagcggccacatgcacgccctggtgctgcccggggtgacccgggaggatgctggggaggtgaccttcagcctgggcaacagcaggaccaccaccctgctgcgggtgaagtgtgtgaagcacagccccccaggcccccccatcctggccgagatgttcaagggccacaagaacacagtgctgctgacctggaagcccccagagcccgcccctgagacccccttcatctaccgcctggagcggcaggaggtgggcagcgaggactggatccagtgcttcagcattgagaaggccggggctgtggaggtgcctggggactgtgtgcccagcgagggggactaccgcttccgcatctgcaccgtgtctggccacggccgcagcccccacgtggtgttccacggcagcgcccacctggtgcccacagcccggctggtggccggcctggaggatgtgcaggtgtatgatggagaagatgctgtgttcagcctggacctgagcaccatcatccagggcacctggttcctgaatggagaggagctgaagagcaatgaacctgagggccaggtggagcccggggccctgcgctaccgcatcgagcagaagggcctgcagcacaggctcatcctgcatgctgtgaagcaccaggacagcggggccctggtgggcttcagctgccctggggtgcaggacagcgctgccctgaccatccaggagagccctgtgcacatcctgagcccccaggacagagtgtccctgaccttcaccaccagcgagcgggtggtgctgacctgtgagctgagccgggtggacttccctgccacctggtacaaggatggccagaaggtggaggagagcgagctgctggtggtgaagatggatggcaggaagcacaggctcatcctgcctgaggccaaggtgcaggacagcggggagtttgaatgtagaacagagggcgtgtctgccttctttggagtgacagtgcaggacccccctgtgcacatcgtggacccccgggagcacgtgtttgtgcacgccatcaccagtgaatgtgtgatgctggcctgtgaggtggaccgggaggatgcccctgtgcgctggtacaaggatggccaggaggtggaggagagtgactttgtggtgctggagaatgaaggcccccaccggcggctggtgctgcctgccacccagcccagtgatggaggagagttccagtgtgtggccggagatgaatgtgcctacttcaccgtgaccatcacagatgtgtcctcctggatcgtgtaccccagcggcaaggtgtatgtggccgctgtgcggctggagcgggtggtgctgacctgtgagctgtgccggccctgggccgaggtgcgctggaccaaggatggagaggaggtggtggagagccctgccctgctgctgcagaaggaggacacagtgcggcggctggtgctgcctgctgtgcagctggaggacagcggggagtacctgtgtgaaattgatgatgagagcgccagcttcaccgtgacagtgacagagccccctgtgcgcatcatctaccccagagatgaggtgaccctgattgctgtgaccctggagtgtgtggtgctgatgtgtgagctgagccgggaggatgcccctgtgcgctggtacaaggatggcctggaggtggaggagagcgaggccctggtgctggagagagatggcccccgctgccgcctggtgctgcctgctgcccagccagaagatggaggagaatttgtgtgtgatgctggagatgattctgccttcttcaccgtgacagtgacagagccccctgtgcagttcctggccctggagaccacccccagccccctgtgtgtggcccctggagagcctgtggtgctgagctgtgagctgagccgggccggggcccctgtggtgtggagccacaacggccggcctgtgcaggagggggagggcctggagctgcatgctgagggccccaggagagtgctgtgcatccaggccgccggccctgcccacgccggcctgtacacctgccagagcggggccgcccctggggcccccagcctgtccttcaccgtgcaggtggccgagccccctgtgcgggtggtggcccctgaggccgcccagaccagggtgcgcagcaccccaggaggagacctggagctggtggtgcacctgagcggccctgggggccctgtgcgctggtacaaggatggagagcggctggccagccagggccgggtgcagctggagcaggccggggcccggcaggtgctgcgggtgcagggcgcccggtctggagatgctggggagtacctgtgtgatgccccccaggacagccgcatcttcctggtgtctgtggaggagcccctgctggtgaagctggtgtctgagctgacccccctgactgtgcatgaaggagatgatgccaccttccgctgtgaggtgtccccaccagatgctgatgtgacctggctgagaaatggagctgtggtgaccccaggcccccagaggcagagctgctgcagctatggaggctgcaggatgtgtggccagaggaaggccaggatgtgtgtgtccaagtggaggcaggccgagtgggtgcagaggggcccctgtgccggctgtgaggtgggcagcccctgccccaccaccctggcctgcccctggcccaggatgggcaccagcacagccagcagctccatggtgtcctactggcccacccgggcccccacagctgcccgggccaccaccatcgccccctggccaggcagcgcctag

SEQ ID NO: 299796 - DNA, 4206 bp, Artificial Sequence
  derived and/or modified sequence
atgaaggccagcagcggcgaccagggcagccccccctgcttcctgcggtttccaaggcccgtgagagtggtgtctggagccgaagctgagttgaagtgtgtagtgctgggggagcccccaccggtggtcgtgtgggaaaaaggcggccagcagctcgccgcctctgagcgactatccttccccgccgacggtgcagagcacggactgctgttgactgccgccttaccaactgatgccggcgtgtatgtgtgtagggcccgaaacgctgctggcgaagcatacgcagcagccgccgtgaccgtcctcgagccgcctgcatcagatccagagctccagcccgctgaacggccactaccctcccccggctcgggcgagggggcacccgttttcctgaccgggcctcgctcccagtgggtgctgaggggggcagaggttgttctaacttgccgcgctgggggcctaccagaaccaacactgtattgggagaaagatggaatggcactggacgaggtgtgggactctagtcactttgcactgcagcccggaagggcagaggatggtcccggagcctccctggcgctgagaattctcgcagctagattgcccgactcaggagtctatgtttgccatgctagaaacgcccacggccatgcacaagccggcgctctcctgcaggtgcaccaaccgcccgagtctcctccggccgatccagatgaggcaccggctcccgtagtggagcctctgaaatgcgctcccaagacgttctgggttaatgaaggcaaacatgcaaagttcagatgttacgtgatgggcaaacccgaaccggagattgagtggcattgggagggcagacctctcctgccagatcgacgtcgcctcatgtatcgagaccgtgacggaggcttcgtcctgaaagttctctattgtcaggccaaagacagggggctctatgtctgcgctgcccgcaatagcgcggggcagactttatcagctgtgcagctccatgtcaaggagcctcgcctgagattcaccagacctcttcaggatgtagagggcagggagcacgggatcgccgtgctggaatgcaaagtgcctaactcacggatcccaaccgcctggttccgcgaagatcagaggctgctcccttgcagaaagtacgagcagattgaagaagggacagtcagaaggctgatcatccataggctgaaggcagacgatgacggcatctacctgtgtgagatgcggggtagagtgcgaaccgtggctaacgtgacggtaaagggccccatattaaagagactgccaagaaagcttgacgtgttggaaggagaaaatgctgtgcttctagtggagaccctggaggccggcgtagaaggtagatggtctcgcgatggggaggagctccccgtgatctgccagtcctcctctgggcatatgcatgctctggtattgccgggcgtgactcgtgaggacgccggtgaagttaccttctctttggggaatagccggacgacgaccctcctaagggttaaatgcgtgaagcattctccacctggtcctcctatcctcgccgagatgtttaagggccacaagaataccgtgctgctgacctggaaacctcccgagccggcacctgagacacccttcatttaccgactggagagacaggaggtggggtcagaggactggatccagtgtttttcaatcgagaaagccggcgccgtggaagtgcctggcgactgcgtgccatcagagggagactacagattccggatttgtactgtttccggccacggtcgttcgccccatgttgtgttccacgggtccgcccacttagtcccaactgccagactggtcgcagggctggaagatgttcaggtctacgacggggaagatgctgttttcagtctcgacttgtcgactattattcagggtacgtggttcctgaatggagaagaacttaaaagcaacgagccagaagggcaagtggaacctggtgcactgcggtatcggatcgagcagaaaggactgcaacaccgactgatattgcatgcagtgaaacaccaggacagcggagccctcgtgggtttcagctgccccggggtgcaagattcggcagccctgaccatacaagagagcccagtacacatactctctccacaggatagggtaagtcttaccttcaccacatcagagcgagtggtgttgacatgcgaactgtcgcgggtggactttccagccacttggtataaggacggacagaaagtggaggagagcgaactgctcgtagtgaagatggacggacgaaagcaccgactcatcttgcccgaggctaaagtgcaggattcgggggaatttgaatgcagaaccgagggtgtgagcgcttttttcggtgtcactgttcaggatcctcccgtacacatagttgaccccagggaacatgtcttcgtgcacgctatcacctctgagtgcgtcatgctggcctgcgaggtcgatcgggaagatgcgcccgtgaggtggtataaggacggccaggaggttgaggaatcggacttcgtggtccttgagaacgaaggtccacacaggcggcttgtgctccccgccacccaacctagtgatggcggagagttccagtgcgtggcgggcgacgagtgcgcatacttcactgtgacgatcaccgatgttagtagttggatcgtgtacccaagcgggaaggtgtatgtggccgcggtccggctggagcgagttgtgctcacatgtgagttgtgccggccgtgggctgaggtgaggtggaccaaggacggggaagaggtcgtggaaagtcccgcactcctgctccagaaggaggacaccgtccggagactggtgcttcccgcagtccaactggaggacagtggggaatacctgtgtgaaatcgatgatgaatccgcatctttcacagtgaccgttacggagccacccgtccgcatcatctacccccgggacgaagtcactttgatcgcagtcaccctcgagtgtgtggttctcatgtgcgaactgtctcgcgaagacgccccagtcaggtggtacaaggatggacttgaagtggaagaaagcgaagccctcgttctggagagagatggccctcgctgcaggttggttttgccagctgcccagcccgaggatggcggtgaattcgtgtgcgatgccggcgacgattccgccttttttactgttactgttaccgaaccaccagtgcagtttcttgctctagagaccaccccgtcccccctgtgtgtggcccccggggagcctgtcgttcttagttgtgagctcagtcgcgctggcgcacccgtggtttggtcacataacgggaggcccgtacaggagggcgaaggcttggagcttcacgcagagggcccaagacgggtcctgtgcattcaggccgccggtccggcacatgctggactgtatacatgccagtcaggtgccgcccctggcgccccgagtctctctttcaccgtgcaggtcgctgaacccccggtgcgagtcgttgcacccgaggctgcgcagacacgggtgcgctctacaccaggaggtgacctggaactggtggttcacctctcgggcccaggaggaccagtaaggtggtacaaggatggcgagagattggctagccagggcagggttcagcttgagcaggcaggtgccaggcaggttctccgggtccagggtgcccgttccggagacgcgggtgagtacctatgcgacgccccacaggattcaaggatctttctagtgtcagtggaggaaccgctcctagtgaagctcgtgagcgagttgacccccctcaccgtgcacgagggcgatgatgccactttccggtgcgaggtctcgcctcccgacgccgatgtcacatggctgcggaacggcgcggtggtcacacccggacctcagcgccagtcctgttgttcctatggcggatgtcggatgtgcggacagagaaaggcacgaatgtgcgtcagcaagtggcgccaagcggagtgggtgcagcggggaccatgcgcaggctgtgaagtcggatcaccctgtccgacaacactagcttgcccttggccaagaatggggacctcaacggccagctccagcatggtgagttactggccaacccgcgccccaaccgcagcccgggctacaacaattgcaccgtggccgggatccgcttag

SEQ ID NO: 299797 - DNA, 5711 bp, Artificial Sequence
  derived and/or modified sequence
ggctcctaagagcaggaagccaggcagcgggcaggggaggctgcggggccactcgctggagaggcaaacaggaaggactgccccctgagcgccaggcttcgggcccgggaatcgccgccgccgccgccgcagagctgcagctcggggccgagggtaaggaggcgagccgggagcgggaggcccgggagagctccgcgggtccccgcgcccagtccccagccgcgccccgaccccgccgccccgggcctcggctcgccctccgcacccccccctgcccccccaccgttcgccgctgcaggcggtcggccgccgcgatgaaggcgagctcgggggatcaggggagccccccgtgcttcctgcgcttcccgcggcctgtgcgggtggtaagtggcgccgaggccgagctcaagtgcgtggtcctgggggagccgccgcctgtagtggtgtgggagaagggcgggcagcagctggcggcctcggaacgcctgagcttcccggcggacggcgcggagcacggcctgctgctgaccgccgcactgcccaccgacgcgggggtctacgtgtgccgcgcccgcaacgcggccggcgaggcctacgcggcggccgccgtcaccgtgctggagccgccggcctccgaccccgagctgcagcccgccgagcgcccgctgccatcgccggggtccggggagggcgccccggtcttcctcacggggcctcgatcccagtgggtgctgcggggggcggaggtggtgctgacgtgccgggcggggggcctccccgagcccacactgtactgggagaaggacgggatggccctggacgaagtgtgggacagcagccacttcgcgctccagccgggccgcgccgaggacggccccggcgcgagcctggcactgcgcatcctggcggctcggctgccggattccggcgtctacgtgtgccacgcccgcaacgcgcacggccacgcgcaggcgggggcgctgctccaggtgcaccagccccccgagagcccgcccgcggaccccgacgaggcccccgcgccggtggtggagccgctcaagtgcgcgcctaagaccttctgggtgaacgagggcaagcacgccaagttccgctgctacgtgatgggcaagcccgagcccgagatcgaatggcactgggagggccgcccgctgctcccggaccgccgccgcctcatgtaccgcgaccgcgacggcggcttcgtgctcaaggtgctttactgccaggccaaggatcgtgggctctacgtctgcgccgcgcgcaactcggcgggccagacgctcagtgccgtgcagctgcacgtgaaagagccccgcctccggttcacacggcccctgcaggacgtggagggccgtgagcacgggattgccgtgctggaatgtaaagtacccaactcccgcatccccacggcctggttccgtgaggaccagcggctgctgccctgccgcaagtacgagcagatcgaagagggcactgtccggcgcctcatcatccacaggctgaaggcagacgatgatggtatctacctgtgcgagatgcggggccgggtgcgcaccgtggccaacgtcacagtcaaagggcccatcctgaagcgcctgccccggaagctcgacgtcctggaaggagagaatgctgtgctgctagtggaaactctagaggccggggtcgagggacgctggagccgtgatggggaggagctgccggtcatctgccagagcagctcaggccacatgcatgccctggtccttccaggggtcacccgagaggatgctggcgaggtcacctttagcctgggcaactcccgtaccactacgcttctcagagtaaaatgtgtcaagcacagtcccccaggaccccccatattggcagagatgttcaagggccacaagaacacggtcctgttgacctggaagcctcccgagccagctcccgagaccccattcatctaccggctggagcggcaggaagtgggctctgaagactggattcagtgcttcagcatcgagaaagccggagccgtggaggtgccgggcgactgtgtgccctccgagggtgactaccgcttccgcatctgcacagtcagcggacatggccgtagtccccacgtggtgttccacggttctgctcaccttgtgcccacagctcgcctggtggcaggtctggaggatgtgcaggtatacgacggggaagatgccgtcttctccctcgatctctccaccatcatccagggtacctggttccttaatggggaagagctcaagagtaacgagccggagggccaggtggaacctggggccctgcggtaccgtatagagcagaagggtctgcagcacagactcatcctgcatgccgtcaagcaccaggacagcggtgccctggtcggcttcagctgccccggcgtgcaggactcagctgccctcacaatccaagagagcccggtgcacatcctgagcccccaggacagggtgtcgttgaccttcacaacctcagagcgggtggtgctgacttgtgagctctcaagggtggacttcccggcaacctggtacaaggatgggcagaaggtggaggagagcgagttgctggtggtgaagatggatgggcgcaaacaccgtctgatcctgcctgaggccaaagtccaggacagtggcgagtttgagtgcaggacagaaggggtctcggccttcttcggcgtcactgtccaagatcctcccgtgcacatcgtggacccccgagaacatgtgttcgtgcatgccataacttccgagtgtgtcatgctggcctgtgaggtggaccgagaggacgcccctgtgcgttggtacaaggacgggcaggaggtggaggagagtgacttcgtggtgctggagaatgaggggccccatcgccgcctggtgctgcccgccacccagccctcagacgggggcgagtttcagtgcgtcgctggagatgagtgtgcctacttcactgtcaccatcacagacgtctcctcgtggatcgtgtatcccagcggcaaggtgtatgtggcagccgtgcgcctggagcgtgtggtgctgacctgtgagctatgccggccctgggcagaggtgcgctggaccaaggatggagaggaggtggtggagagccccgcgctgctcctgcagaaggaagacactgtccgccgcctggtgctgcccgctgtccagctcgaggactccggcgagtacttgtgtgaaattgacgatgagtcggcctccttcactgtcaccgtcacagaacccccagtgcggatcatataccctcgcgatgaggtgaccttgatcgccgtgaccttggagtgtgtggtgctgatgtgtgaactgtctcgggaggatgcccctgtgcgctggtacaaggatgggctggaagtggaggagagcgaggccctggtgctggagagggatgggccacgctgccgcctggtgctacctgctgctcagcccgaggacgggggcgagtttgtatgtgatgctggagatgactcggccttcttcactgtcactgtcacagagcctccagtgcagttccttgctctagagacaactccaagcccgctctgtgtggcccctggggagccagtggtgctgagctgtgaactgtcccgggctggcgcccccgtggtctggagccacaatgggaggcccgtgcaggagggcgagggcctagagctccatgccgagggcccccgccgagtcctctgcatccaggctgcaggcccagcccatgcagggctctacacctgccagtctggagcagcccccggagccccaagcctcagcttcaccgtccaggtggctgagccccctgtgcgggtggtagctcccgaggcagcccagacgagggttcggagcaccccaggcggggacctagagctggtggtgcacctctccgggccagggggccctgtacgctggtacaaggacggggagcgactggcaagccaggggcgggtgcagctggagcaggccggggccaggcaggtgctgcgggtgcagggggcacggagcggggacgctggggagtacctgtgcgatgcgccccaggacagccgcatcttccttgtcagcgtggaagagccactgctggtgaagctggtctcggagctgacaccactcactgtccacgagggcgatgatgccacgttccggtgtgaagtctccccaccagatgccgatgtcacctggctgcgcaatggggccgtcgtcactccagggccccagagacagagctgctgttcctacggcggttgcaggatgtgcgggcagaggaaggccaggatgtgtgtctcgaagtggagacaggccgagtgggtgcagcgggggccgtgcgctgggtgcgaggtgggcagcccctgccccacgactctcgcctgtccatggcccaggatgggcacatccaccgcctcttcatccatggtgtcatactggccgaccagggcacctacggctgcgagagccaccacgatcgcaccctggccaggctcagcgtgaggccgaggcagctgagggtgctgcggcctctggaggacgtgaccatcagtgaggggggcagtgccaccttccagctggagctgtcccaggaaggtgtgaccggggagtgggcccggggtggagtacagctgtatccaggacccaagtgtcacatccactcggacggccaccgtcaccgactggtactcaatggcctgggcctggccgactcaggctgtgtctccttcacagcggattccctgcgctgcgcagccagactcattgtgagagaggtcccagtgaccatcgtgcgggggccacacgacctagaggtgaccgagggcgacacagctacgttcgagtgcgagctttcccaagctttggctgatgttacctgggagaaggacgggaacgcgcttacgcctagcccgcggctccggctccaggccctcggcacgcgccgccttctccagctgcgacgctgcggcccctcggacgccgggacctacagctgcgcggtggggacggcccgcgccggaccggtccgcctgaccgtgcgcgagcgtactgtggcggtactctccgagctgcggtcggtgagcgcccgcgaaggcgacggcgctacgttcgagtgcaccgtgtcggaggtcgagaccacggggcgctgggagctcggaggccgcccgctgagacccggagcccgcgtccgcatccgacaggaagggaagaaacacattctggtgcttagcgagctgcgcgccgaggacgccggtgaagtccgcttccaggcggggcccgcccagtccctggctctactggaagtggaggcattgcctctccagatgtgccgccacccccctcgcgagaagaccgttctggtgggccgccgggcggtgctggaggtgactgtgtcccgctcggggggccacgtgtgctggctgcgggagggggccgagctgtgcccgggagataagtatgagatgcgcagccacggccccacccacagcctggtcatccatgacgttcgacctgaggaccaaggcacttactgctgccaggccggccaggacagcacccacacacggctgctggtagagggcaactaggagaacctaaccaggccaggcgggtgcccttggacagcttggaaggcgtttgcccttaccctgggcaggggtagagagacaaggaacaataaaagtgctacagctc

SEQ ID NO: 299798 - DNA, 4206 bp, Artificial Sequence
  derived and/or modified sequence
atgaaagccagtagcggagaccagggatcgccaccatgctttctgaggttccccagaccagtgagggttgttagcggagcagaggccgagttgaaatgtgtggtcttgggcgagccacctcctgttgttgtctgggaaaagggaggccagcaattggctgcaagcgagcgactgagctttcccgctgacggggctgaacatggcctgcttctgactgcagcattaccgacggacgccggagtttatgtctgcagagcaagaaatgcagccggtgaggcatatgccgctgcagcagttaccgtcctggagcctccagcctcagaccccgaactgcaacctgcagagaggccacttcctagcccaggctccggcgagggagccccagtattcctgaccggacctagaagccagtgggtgctccgcggagctgaggtggttctcacatgccgtgcagggggattgccagaaccgaccctatactgggaaaaagacggcatggccctggatgaggtgtgggactcctcacatttcgcactacaaccgggtcgagcggaggatgggccaggagcctcactagctctgaggatcctcgctgcgagacttcccgattccggcgtgtacgtctgtcatgctagaaacgcgcacgggcacgcccaggccggagcactgttgcaggtgcatcagcccccagagtcgccccctgctgaccccgacgaggcccctgcacccgtagtcgagcctctcaaatgtgctccgaaaaccttctgggtgaacgagggaaagcatgcaaagtttaggtgctacgttatgggcaagcctgaacctgaaattgagtggcactgggaagggaggcccctcctgcctgaccgaaggagactgatgtacagagatcgcgatgggggatttgtgcttaaagttctatattgccaggctaaagatcgaggtctgtacgtgtgtgccgcaaggaatagcgctggccaaacattatccgctgtgcaattgcacgtcaaggaaccaagattacgattcacacgacccctgcaggatgtggaagggagagagcatggtattgctgtcttggaatgcaaagtccccaactctagaatcccgacggcatggtttcgggaagatcaaaggcttcttccgtgccggaaatacgaacagatcgaggaggggaccgtcaggagattgatcattcataggctcaaagccgacgacgatggtatttatctctgcgaaatgcgcggacgggtgcgtaccgtcgccaacgtgacagtgaagggaccaattcttaaacggctgccccgaaagttagatgtgcttgagggggagaacgctgtactgttggtcgagactctcgaagctggcgtagaaggcaggtggagccgcgatggcgaggaactgccggtgatctgtcaatccagctcaggccacatgcatgccctggtcctcccaggcgtaacacgcgaggacgccggtgaagttaccttcagcttgggcaattcaagaacaaccactctccttagggtgaagtgcgtcaaacactctccccctgggccacctattctcgctgaaatgtttaaaggtcacaaaaacacggtcttactgacctggaaaccccctgagcccgcacctgaaacccctttcatctatagactggagaggcaggaagtcggtagtgaggattggatccagtgcttttctatcgaaaaggccggagctgtggaagtgccaggagattgcgtgcccagcgagggggattaccgtttccggatctgtacagtctccggtcacggccgatccccgcatgttgttttccatggctccgctcaccttgttccaacagcacgcctggtggccggtcttgaggacgttcaggtatacgacggtgaggatgccgtcttctctttggacctctctacaattattcaaggcacatggtttttgaacggagaggaattgaaaagcaacgaaccagagggccaggtcgagcccggtgccctcaggtaccgtatagagcagaagggactgcagcataggctgattcttcacgcggtaaagcaccaggactcaggcgctcttgtaggatttagctgtcctggcgttcaagactcagccgcactcactattcaggagtcccccgttcacattctgagtccccaggaccgggtgagccttacttttaccactagcgagcgtgtggtgctgacatgtgagctgtcaagagtggattttcctgctacctggtataaagacggccagaaggtggaggagagtgagttgctggttgtcaagatggacggcagaaaacaccgtttaatcctccctgaggcgaaggtccaggacagtggcgagtttgagtgtcgaaccgaaggcgtatcggctttcttcggggttacagtccaggatccccctgtccacatagtggacccaagagagcacgtctttgtgcacgctattacatccgaatgtgtgatgctcgcctgtgaggtagacagggaggatgccccagtcaggtggtataaagatggacaggaagtagaggagtctgacttcgtagtactggaaaatgaaggtccccaccgacgactggtgctgcccgctacccagccatctgacggaggagagtttcagtgcgtcgcaggcgatgaatgcgcatacttcacagtgacaattactgacgtctcaagctggatcgtgtatcccagcggaaaagtgtacgttgccgctgttcgcctggagcgcgttgtcctgacttgcgaattatgtaggccatgggccgaagtccgttggacaaaagacggtgaggaggttgtcgagagccccgctctgctcttacagaaggaggatacagtgcgaaggttagttctccctgccgtacaattagaggactccggtgagtacttatgcgaaattgacgacgaaagcgcctccttcaccgtaaccgtgaccgaaccacccgtccgcattatttatccgcgtgacgaggtaactcttatagcagtgacactcgagtgtgtcgttcttatgtgcgagctgagccgcgaagatgcccctgtccgctggtacaaggatggcctcgaggtcgaggaatcagaagctctcgttctggagcgggacgggccaaggtgtcgcctcgttctgcccgctgcacagcccgaagacggtggcgagttcgtgtgcgatgcgggtgacgattccgccttcttcactgtgaccgtcactgaaccccctgtgcagtttctcgcactcgaaacaactcccagtcctctgtgtgtggctcctggggaacccgtcgtgctgagctgtgagttgagtcgggctggagcccctgtggtgtggtcacacaatgggagacccgtgcaggagggcgaggggttggagctgcatgccgaaggccctagaagagttctttgtatccaggctgccggaccagcacatgccggtctgtacacgtgtcaaagcggcgctgctcccggagctccgagcctcagcttcaccgtacaggtagccgagcctccggtgagagtggtcgcgcctgaagctgctcagacgagggttcgaagcactcctgggggagacctagaactggtggtccacctgagcgggccaggcggaccagtgaggtggtataaggatggcgagcggttagctagtcagggaagggtccagttggagcaagcgggagcacgccaggtacttagggtacaaggtgcaaggagcggagacgcaggggaatacctgtgtgatgcccctcaggacagcagaatattcctcgttagtgttgaggagccccttttggtgaagctcgtcagcgagttgacccctctgaccgtgcacgagggagacgatgctactttccggtgcgaggttagcccacctgatgctgatgtgacatggctgaggaacggcgcagtggtgacccctggaccacaaaggcagtcctgttgttcttacggcggttgtagaatgtgtggccagaggaaggcccgaatgtgtgtgtcgaagtggcgtcaagccgagtgggtccagagagggccttgtgccggatgtgaggtgggatccccttgtcctaccactctggcctgcccttggcctcgtatgggaactagcacagcatcctcctcaatggtctcttactggcccacgcgcgcacccaccgctgccagggctactactattgctccttggccaggctctgcatag

SEQ ID NO: 299799 - DNA, 4206 bp, Artificial Sequence
  derived and/or modified sequence
atgaaggccagcagcggcgaccagggcagccccccctgcttcctgagattccccagacccgtgagagtggtgagcggcgccgaggccgagctgaagtgcgtggtgctgggcgagcccccccccgtggtggtgtgggagaagggcggccagcagctggccgccagcgagagactgagcttccccgccgacggcgccgagcacggcctgctgctgaccgccgccctgcccaccgacgccggcgtgtacgtgtgcagagccagaaacgccgccggcgaggcctacgccgccgccgccgtgaccgtgctggagccccccgccagcgaccccgagctgcagcccgccgagagacccctgcccagccccggcagcggcgagggcgcccccgtgttcctgaccggccccagaagccagtgggtgctgagaggcgccgaggtggtgctgacctgcagagccggcggcctgcccgagcccaccctgtactgggagaaggacggcatggccctggacgaggtgtgggacagcagccacttcgccctgcagcccggcagagccgaggacggccccggcgccagcctggccctgagaatcctggccgccagactgcccgacagcggcgtgtacgtgtgccacgccagaaacgcccacggccacgcccaggccggcgccctgctgcaggtgcaccagccccccgagagcccccccgccgaccccgacgaggcccccgcccccgtggtggagcccctgaagtgcgcccccaagaccttctgggtgaacgagggcaagcacgccaagttcagatgctacgtgatgggcaagcccgagcccgagatcgagtggcactgggagggcagacccctgctgcccgacagaagaagactgatgtacagagacagagacggcggcttcgtgctgaaggtgctgtactgccaggccaaggacagaggcctgtacgtgtgcgccgccagaaacagcgccggccagaccctgagcgccgtgcagctgcacgtgaaggagcccagactgagattcaccagacccctgcaggacgtggagggcagagagcacggcatcgccgtgctggagtgcaaggtgcccaacagcagaatccccaccgcctggttcagagaggaccagagactgctgccctgcagaaagtacgagcagatcgaggagggcaccgtgagaagactgatcatccacagactgaaggccgacgacgacggcatctacctgtgcgagatgagaggcagagtgagaaccgtggccaacgtgaccgtgaagggccccatcctgaagagactgcccagaaagctggacgtgctggagggcgagaacgccgtgctgctggtggagaccctggaggccggcgtggagggcagatggagcagagacggcgaggagctgcccgtgatctgccagagcagcagcggccacatgcacgccctggtgctgcccggcgtgaccagagaggacgccggcgaggtgaccttcagcctgggcaacagcagaaccaccaccctgctgagagtgaagtgcgtgaagcacagcccccccggcccccccatcctggccgagatgttcaagggccacaagaacaccgtgctgctgacctggaagccccccgagcccgcccccgagacccccttcatctacagactggagagacaggaggtgggcagcgaggactggatccagtgcttcagcatcgagaaggccggcgccgtggaggtgcccggcgactgcgtgcccagcgagggcgactacagattcagaatctgcaccgtgagcggccacggcagaagcccccacgtggtgttccacggcagcgcccacctggtgcccaccgccagactggtggccggcctggaggacgtgcaggtgtacgacggcgaggacgccgtgttcagcctggacctgagcaccatcatccagggcacctggttcctgaacggcgaggagctgaagagcaacgagcccgagggccaggtggagcccggcgccctgagatacagaatcgagcagaagggcctgcagcacagactgatcctgcacgccgtgaagcaccaggacagcggcgccctggtgggcttcagctgccccggcgtgcaggacagcgccgccctgaccatccaggagagccccgtgcacatcctgagcccccaggacagagtgagcctgaccttcaccaccagcgagagagtggtgctgacctgcgagctgagcagagtggacttccccgccacctggtacaaggacggccagaaggtggaggagagcgagctgctggtggtgaagatggacggcagaaagcacagactgatcctgcccgaggccaaggtgcaggacagcggcgagttcgagtgcagaaccgagggcgtgagcgccttcttcggcgtgaccgtgcaggacccccccgtgcacatcgtggaccccagagagcacgtgttcgtgcacgccatcaccagcgagtgcgtgatgctggcctgcgaggtggacagagaggacgcccccgtgagatggtacaaggacggccaggaggtggaggagagcgacttcgtggtgctggagaacgagggcccccacagaagactggtgctgcccgccacccagcccagcgacggcggcgagttccagtgcgtggccggcgacgagtgcgcctacttcaccgtgaccatcaccgacgtgagcagctggatcgtgtaccccagcggcaaggtgtacgtggccgccgtgagactggagagagtggtgctgacctgcgagctgtgcagaccctgggccgaggtgagatggaccaaggacggcgaggaggtggtggagagccccgccctgctgctgcagaaggaggacaccgtgagaagactggtgctgcccgccgtgcagctggaggacagcggcgagtacctgtgcgagatcgacgacgagagcgccagcttcaccgtgaccgtgaccgagccccccgtgagaatcatctaccccagagacgaggtgaccctgatcgccgtgaccctggagtgcgtggtgctgatgtgcgagctgagcagagaggacgcccccgtgagatggtacaaggacggcctggaggtggaggagagcgaggccctggtgctggagagagacggccccagatgcagactggtgctgcccgccgcccagcccgaggacggcggcgagttcgtgtgcgacgccggcgacgacagcgccttcttcaccgtgaccgtgaccgagccccccgtgcagttcctggccctggagaccacccccagccccctgtgcgtggcccccggcgagcccgtggtgctgagctgcgagctgagcagagccggcgcccccgtggtgtggagccacaacggcagacccgtgcaggagggcgagggcctggagctgcacgccgagggccccagaagagtgctgtgcatccaggccgccggccccgcccacgccggcctgtacacctgccagagcggcgccgcccccggcgcccccagcctgagcttcaccgtgcaggtggccgagccccccgtgagagtggtggcccccgaggccgcccagaccagagtgagaagcacccccggcggcgacctggagctggtggtgcacctgagcggccccggcggccccgtgagatggtacaaggacggcgagagactggccagccagggcagagtgcagctggagcaggccggcgccagacaggtgctgagagtgcagggcgccagaagcggcgacgccggcgagtacctgtgcgacgccccccaggacagcagaatcttcctggtgagcgtggaggagcccctgctggtgaagctggtgagcgagctgacccccctgaccgtgcacgagggcgacgacgccaccttcagatgcgaggtgagcccccccgacgccgacgtgacctggctgagaaacggcgccgtggtgacccccggcccccagagacagagctgctgcagctacggcggctgcagaatgtgcggccagagaaaggccagaatgtgcgtgagcaagtggagacaggccgagtgggtgcagagaggcccctgcgccggctgcgaggtgggcagcccctgccccaccaccctggcctgcccctggcccagaatgggcaccagcaccgccagcagcagcatggtgagctactggcccaccagagcccccaccgccgccagagccaccaccatcgccccctggcccggcagcgcctag

SEQ ID NO: 299800 - DNA, 636 bp, Artificial Sequence
  derived and/or modified sequence
atgctgagacagagctgcagcttccccgtgaccagcctgcccgccctgggcggcgtgtgcggcagagagggcgccggcgccgaggtgccccccgccgcctgcggctgcgagggcagagaccccgacaccgagagaagctgcggcagaagcagcaccggcggctgcagcccctgcagcggccccggccccagcagccccagaaccagcagaggcgccctgagccccagcctgggcagactgttcccccacctgcaggtggtgatcaagctgagaatccagctggcccccgccgtgcacctggccctgcccacctgcagcctgctgaccagcagcccccccctggagggctgctgccacagactgaacgaggaggccgaggtgcagagaggcttcagacccatcgccgtggagctggagttcgagaaccagcccctgggcgccgagaccagactgagaaacggcagaagagccggcgtgaagagaagcgagggcagaggccaggtgagacccggccaggtgagaagcaccggccccgagggcggcctgaccagaatggagagaaaggccgccagactgcagtgggacagcggcagcatcaagatgagcgagaacgagcagctgtgggaggagccctag

SEQ ID NO: 299801 - protein, 378 aa, Artificial Sequence
  derived and/or modified sequence
LSLSLSLSLFLDVSLSLSVSLSFSLSHPGSTWFDRDLTLAGRVIVKCPTSGRLEQQLVHVERPILRIPHLAIHLQRNINENFGPNTEMHLVPILATAIQEELEKGTPEPGPLNAVDERHHSVLMSLLCAHLGLSPKDIVEMELCLADTQPVVLGGAYDEFIFAPRLDNLHSCFCALQALIDSCAGPGSLATEPHVRMVTLYDNEEVGSESAQGAQSLLTELVLRRISASCQHPTAFEEAIPKSFMISADMAHAVHPNYLDKHEENHRPLFHKGPVIKVNSKQRYASNAVSEALIREVANKVKVPLQDLMVRNDTPCGTTIGPILASRLGLRVLDLGSPQLAMHSIREMACTTGVLQTLTLFKGFFELFPSLSHNLLVD

SEQ ID NO: 299802 - DNA, 1137 bp, Artificial Sequence
  derived and/or modified sequence
ctgagcctgagcctgagcctgagcctgttcctggacgtgagcctgagcctgagcgtgagcctgagcttcagcctgagccaccccggcagcacctggttcgacagagacctgaccctggccggcagagtgatcgtgaagtgccccaccagcggcagactggagcagcagctggtgcacgtggagagacccatcctgagaatcccccacctggccatccacctgcagagaaacatcaacgagaacttcggccccaacaccgagatgcacctggtgcccatcctggccaccgccatccaggaggagctggagaagggcacccccgagcccggccccctgaacgccgtggacgagagacaccacagcgtgctgatgagcctgctgtgcgcccacctgggcctgagccccaaggacatcgtggagatggagctgtgcctggccgacacccagcccgtggtgctgggcggcgcctacgacgagttcatcttcgcccccagactggacaacctgcacagctgcttctgcgccctgcaggccctgatcgacagctgcgccggccccggcagcctggccaccgagccccacgtgagaatggtgaccctgtacgacaacgaggaggtgggcagcgagagcgcccagggcgcccagagcctgctgaccgagctggtgctgagaagaatcagcgccagctgccagcaccccaccgccttcgaggaggccatccccaagagcttcatgatcagcgccgacatggcccacgccgtgcaccccaactacctggacaagcacgaggagaaccacagacccctgttccacaagggccccgtgatcaaggtgaacagcaagcagagatacgccagcaacgccgtgagcgaggccctgatcagagaggtggccaacaaggtgaaggtgcccctgcaggacctgatggtgagaaacgacaccccctgcggcaccaccatcggccccatcctggccagcagactgggcctgagagtgctggacctgggcagcccccagctggccatgcacagcatcagagagatggcctgcaccaccggcgtgctgcagaccctgaccctgttcaagggcttcttcgagctgttccccagcctgagccacaacctgctggtggactag

SEQ ID NO: 299803 - DNA, 1137 bp, Artificial Sequence
  derived and/or modified sequence
ctgtctctgagtcttagcctgtcattgtttttggacgttagcctgtcattgagtgtgtcactgtccttttcgctaagccaccccggttccacctggttcgaccgcgatctgacgcttgctgggagagtcattgtaaaatgtcctacctccggaagactagagcagcagctcgtgcacgttgagcgacccattctgcgcattccacatttggccatccacttacagcgcaatattaacgagaactttgggcctaatacagagatgcaccttgtgcccatcctagcgactgctattcaagaagagctcgaaaaagggacaccggagccaggccctcttaatgctgtcgacgagcggcaccattctgttctgatgtcccttctgtgcgcccacttgggcttgtcccctaaagatatcgtggagatggaactatgcctcgccgatacacagcctgtggtgcttggcggagcttatgatgagtttatttttgcaccccgcctcgataatctgcactcctgtttctgcgcattgcaggccctcattgactcgtgtgccgggcccggctccctggctacagagcctcacgtcagaatggttactttgtatgacaatgaggaagtgggatccgagagtgcacagggagcacagagtctgctgaccgagctagtgcttcggcgaatatcggccagctgccagcacccaacagcattcgaggaggccatccctaaaagcttcatgatcagtgctgacatggcacatgcagtacatcccaactatctggacaaacatgaagaaaatcatcggcctctctttcacaagggccccgtgattaaggtgaacagtaagcagcggtacgcctccaatgctgttagcgaggccctgattagagaggtggctaacaaagtaaaggttcccctccaggatcttatggtccgtaacgataccccctgtggtaccaccatcggacccattcttgcttctcgcttggggctccgcgtgttggatctgggatccccccagctggcaatgcattctatcagggagatggcctgcactactggcgtcttgcagactttgactctattcaagggctttttcgaactgtttccttcactctcccataacctgctggttgactag

SEQ ID NO: 299804 - DNA, 1137 bp, Artificial Sequence
  derived and/or modified sequence
ctgagcctgagcctgagcctgagcctcttcctggatgtgtccctgagcctgtctgtgtccctgtccttcagcctgagccaccctggcagcacctggtttgaccgggacctgaccctggccggccgggtcatcgtgaagtgccccaccagcggccgcctggagcagcagctggtgcacgtggagcggcccatcctgcgcatcccccacctggccatccacctgcagaggaacatcaatgaaaattttggccccaacacagagatgcacctggtgcccatcctggccacagccatccaggaggagctggagaagggcaccccagagcccggccccctgaatgctgtggatgagcggcaccacagcgtgctgatgagcctgctgtgtgcccacctgggcctgagccccaaggacatcgtggagatggagctgtgcctggccgacacccagcctgtggtgctgggcggggcctatgatgagttcatctttgccccccggctggacaacctgcacagctgcttctgtgccctgcaggccctgattgacagctgtgccggccctggcagcctggccacagagccccacgtgaggatggtgaccctgtatgacaatgaggaggtgggcagcgagagcgcccagggcgcccagagcctgctgacagagctggtgctgcggcgcatcagcgccagctgccagcaccccacagcctttgaggaggccatccccaagagcttcatgatctctgctgacatggcccatgctgtgcaccccaactacctggacaagcatgaggagaaccaccggcccctcttccacaagggccctgtgatcaaggtgaacagcaagcagagatatgccagcaatgctgtgtctgaggccctgatccgggaggtggccaacaaggtgaaggtgcccctgcaggacctgatggtgagaaatgacaccccctgtggcaccaccatcggccccatcctggccagccggctgggcctgcgggtgctggacctgggcagcccccagctggccatgcacagcatccgggagatggcctgcaccaccggggtgctgcagaccctgaccctcttcaagggcttctttgagctgttccccagcctgagccacaacctgctggtggactag

SEQ ID NO: 299805 - DNA, 1137 bp, Artificial Sequence
  derived and/or modified sequence
ctgagcctgagcctgagcctgagcctgttcctggacgtgagcctgtctcttagcgtctccctcagtttcagcctgtcccaccctggatctacatggttcgacagggacctcacattggccggcagagtcatcgttaaatgccctacaagtggacggctggagcaacagctcgtacatgttgagcgccccattcttcgcataccacacctggctatccatctgcagcggaatatcaacgaaaacttcgggcctaatacagagatgcatctggttccaatattggctacagctattcaagaagagctagagaaaggcacgcctgagccgggacctctaaacgccgtcgacgaacgccaccacagtgttcttatgtcactgctgtgcgcacaccttggactctcccccaaagatatcgtagaaatggagctgtgcctggccgatactcagcccgttgttctcggcggcgcctacgacgaatttatttttgcccctaggcttgacaacttacatagttgcttttgtgccttgcaggcactgattgattcttgcgcgggccccggcagcctggcgactgaaccacatgtcagaatggtaactctctatgataacgaagaggtcgggagcgaatcagcccaaggcgcacagagcctgctgacagaactcgtgctccggagaatatcagcatcgtgtcagcaccccactgccttcgaagaggcaatccccaagtcctttatgatcagtgcggacatggctcacgccgtgcaccctaactacctggacaaacacgaggagaaccatcgacctctgttccataagggccccgtgattaaagtgaacagtaaacagcgttatgcttccaatgcagtctctgaggccctcattagagaagtggccaacaaggtaaaagttcccctacaggacctgatggtgcgaaatgataccccatgcggaaccaccatcgggcccatcctggcaagtcgcttagggctcagggtactggatctgggctcccctcagcttgcgatgcattcaatcagggaaatggcgtgtacgaccggagtgttacagactctcacgctgttcaagggattttttgagctatttccctcattaagtcataacctgttggttgactag

SEQ ID NO: 299806 - DNA, 1137 bp, Artificial Sequence
  derived and/or modified sequence
ctctccctgagtcttagtctgagcctctttttggatgtgtctctcagcctgagcgtatccctgtccttcagtctcagtcatcccggttcaacatggttcgatcgcgacctgaccctcgcaggacgcgtgatcgtaaagtgccctactagtgggaggctcgaacagcaactagtacatgttgagaggcccatattgcgaattccgcatctagccattcacctgcagcgcaacattaacgagaatttcggaccgaacaccgaaatgcacctggtcccaatcctggccaccgccattcaggaggagttagagaaaggcactccggaaccagggcctttgaatgctgttgatgaacgacaccacagcgtgctgatgagcctgctgtgtgcacatctgggcctgtctcctaaggacatcgtggaaatggaattatgtcttgcagacactcaaccggtggtcctgggaggcgcatacgacgaatttattttcgccccacggctcgacaacttgcactcatgcttttgcgcattgcaggcactgatcgactcctgtgccggacccggatcactcgccactgaacctcacgttcggatggttaccctgtatgataacgaggaggtgggttcagagtcagcccagggcgctcagagccttctcaccgagctggtcctgaggcgtatatccgcgtcttgccaacatcctactgcattcgaggaggccattcctaagagctttatgatctccgccgatatggcccacgcagtccatcctaactatttggataaacacgaggagaatcataggcctctcttccacaaggggccagtgattaaggtgaactccaaacagcgatatgcctccaacgcagtgagcgaggcccttattcgggaggtggccaacaaagtcaaagtgccgttgcaggacctgatggtgaggaacgacacaccttgtggcacgaccattggtccgatacttgcatctaggctggggctgagggtgcttgatttagggtccccacagctggccatgcattcaattagggaaatggcctgcaccaccggggtgctgcaaacgctgactctcttcaagggctttttcgaactttttccttcgctttctcataatctgttggttgattag

SEQ ID NO: 299807 - DNA, 1137 bp, Artificial Sequence
  derived and/or modified sequence
ctctctctctctctctctctctctctttttctagatgtttctctgtctctctctgtctctctctctttctctctctcacatcctgggagcacctggtttgaccgtgacctgactctggctggacgcgtcattgtcaagtgccctacctcaggtcggctggagcagcagctggtgcacgtggagcggcccattcttcgcatcccacacctggccatccatctgcagcgaaatatcaacgagaactttgggcccaacacagagatgcatctagtccccattcttgccacagccatccaggaggagctggagaaggggactcctgagccagggcctctcaatgctgtggatgagcggcaccattcggtcctcatgtccctgctctgtgcccatctggggctgagccccaaggacatagtggagatggagctctgccttgcagacacccagcctgtggtcttgggtggtgcctatgatgagttcatctttgctcctcggctggacaatctgcacagctgcttctgtgccctgcaggccttgatagattcctgtgcaggccctggctccctggccacagagcctcacgtgcgcatggtcacactctatgacaacgaagaggtggggtctgagagtgcacagggagcacagtcactgctgacagagctggtgctgcggcggatctcagcctcgtgccagcacccgacagccttcgaggaagccatacccaagtccttcatgatcagcgcagacatggcccatgctgtgcatcccaactacctggacaagcatgaggagaaccaccggcctttattccacaagggccccgtgatcaaggtgaacagcaagcaacgctatgcttcaaacgcggtgtcagaggccctgatccgagaggtggccaacaaagtcaaggtccccctgcaggatctcatggtccggaatgacaccccctgtggaaccaccattggacctatcttggcttctcggctggggctgcgggtgctggatttaggcagcccccaactggccatgcactctatccgggagatggcctgcaccacaggagtcctccagaccctcaccctcttcaagggcttctttgagctgttcccttctctaagccataatctcttagtggattga

SEQ ID NO: 299808 - DNA, 183 bp, Artificial Sequence
  derived and/or modified sequence
taacggagacggtcgcggtcccgcgaccggcgccgccgacgcagcagatcaacttctagagaaaggagaaaattgtccaggagtcggagtcgggatcgccatcgcaggcacagatcccgtagcagatcacatagtagaggccaccggcgggcctccagagaccggtccgccaagtataagtag

SEQ ID NO: 299809 - protein, 963 aa, Artificial Sequence
  derived and/or modified sequence
MAAQRIRAANSNGLPRCKSEGTLIDLSEGFSETSFNDIKVPSPSALLVDNPTPFGNAKEVIAIKDYCPTNFTTLKFSKGDHLYVLDTSGGEWWYAHNTTEMGYIPSSYVQPLNYRNSTLSDSGMIDNLPDSPDEVAKELELLGGWTDDKKVPGRMYSNNPFWNGVQTNPFLNGNVPVMPSLDELNPKSTVDLLLFDAGTSSFTESSSATTNSTGNIFDELPVTNGLHAEPPVRRDNPFFRSKRSYSLSELSVLQAKSDAPTSSSFFTGLKSPAPEQFQSREDFRTAWLNHRKLARSCHDLDLLGQSPGWGQTQAVETNIVCKLDSSGGAVQLPDTSISIHVPEGHVAPGETQQISMKALLDPPLELNSDRSCSISPVLEVKLSNLEVKTSIILEMKVSAEIKNDLFSKSTVGLQCLRSDSKEGPYVSVPLNCSCGDTVQAQLHNLEPCMYVAVVAHGPSILYPSTVWDFINKKVTVGLYGPKHIHPSFKTVVTIFGHDCAPKTLLVSEVTRQAPNPAPVALQLWGKHQFVLSRPQDLKVCMFSNMTNYEVKASEQAKVVRGFQLKLGKVSRLIFPITSQNPNELSDFTLRVQVKDDQEAILTQFCVQTPQPPPKSAIKPSGQRRFLKKNEVGKIILSPFATTTKYPTFQDRPVSSLKFGKLLKTVVRQNKNHYLLEYKKGDGIALLSEERVRLRGQLWTKEWYIGYYQGRVGLVHTKNVLVVGRARPSLCSGPELSTSVLLEQILRPCKFLTYIYASVRTLLMENISSWRSFADALGYVNLPLTFFCRAELDSEPERVASVLEKLKEDCNNTENKERKSFQKELVMALLKMDCQGLVVRLIQDFVLLTTAVEVAQRWRELAEKLAKVSKQQMDAYESPHRDRNGVVDSEAMWKPAYDFLLTWSHQIGDSYRDVIQELHLGLDKMKNPITKRWKHLTGTLILVNSLDVLRAAAFSPADQDDFVI

SEQ ID NO: 299810 - protein, 122 aa, Artificial Sequence
  derived and/or modified sequence
MAAQRIRAANSNGLPRCKSEGTLIDLSEGFSETSFNDIKVPSPSALLVDNPTPFGNAKEVIAIKDYCPTNFTTLKFSKGDHLYVLDTSGGEWWYAHNTTEMGYIPSSYVQPLNYRNSTLSDS

SEQ ID NO: 299811 - protein, 553 aa, Artificial Sequence
  derived and/or modified sequence
MAAQRIRAANSNGLPRCKSEGTLIDLSEGFSETSFNDIKVPSPSALLVDNPTPFGNAKEVIAIKDYCPTNFTTLKFSKGDHLYVLDTSGGEWWYAHNTTEMGYIPSSYVQPLNYRNSTLSDSGMIDNLPDSPDEVAKELELLGGWTDDKKVPGRMYSNNPFWNGVQTNPFLNGNVPVMPSLDELNPKSTVDLLLFDAGTSSFTESSSATTNSTGNIFDELPVTNGLHAEPPVRRDNPFFRSKRSYSLSELSVLQAKSDAPTSSSFFTGLKSPAPEQFQSREDFRTAWLNHRKLARSCHDLDLLGQSPGWGQTQAVETNIVCKLDSSGGAVQLPDTSISIHVPEGHVAPGETQQISMKALLDPPLELNSDRSCSISPVLEVKLSNLEVKTSIILEMKVSAEIKNDLFSKSTVGLQCLRSDSKEGPYVSVPLNCSCGDTVQAQLHNLEPCMYVAVVAHGPSILYPSTVWDFINKKVTVGLYGPKHIHPSFKTVVTIFGHDCAPKTLLVSEVTRQAPNPPITKRWKHLTGTLILVNSLDVLRAAAFSPADQDDFVI

SEQ ID NO: 299812 - protein, 56 aa, Artificial Sequence
  derived and/or modified sequence
MAAQRIRAANSNGLPRCKSEGTLIDLSEGFSETSFNDIKVPSPSALLVDNPTPFGN

SEQ ID NO: 299813 - protein, 173 aa, Artificial Sequence
  derived and/or modified sequence
MAAQRIRAANSNGLPRCKSEGTLIDLSEGFSETSFNDIKVPSPSALLVDNPTPFGNAKEVIAIKDYCPTNFTTLKFSKGDHLYVLDTSGGEWWYAHNTTEMGYIPSSYVQPLNYRNSTLSDSGMIDNLPDSPDEVAKELELLGGWTDDKKVPGRMYSNNPFWNGVQTNPFLNG

SEQ ID NO: 299814 - protein, 57 aa, Artificial Sequence
  derived and/or modified sequence
MAAQRIRAANSNGLPRCKSEGTLIDLSEGFSETSFNDIKVPSPSALLVDNPTPFGNA

SEQ ID NO: 299815 - protein, 201 aa, Artificial Sequence
  derived and/or modified sequence
MENISSWRSFADALGYVNLPLTFFCRAELDSEPERVASVLEKLKEDCNNTENKERKSFQKELVMALLKMDCQGLVVRLIQDFVLLTTAVEVAQRWRELAEKLAKVSKQQMDAYESPHRDRNGVVDSEAMWKPAYDFLLTWSHQIGDSYRDVIQELHLGLDKMKNPITKRWKHLTGTLILVNSLDVLRAAAFSPADQDDFVI

SEQ ID NO: 299816 - DNA, 2892 bp, Artificial Sequence
  derived and/or modified sequence
atggcagcacagcggattcgtgcggcgaattccaatggactccccagatgcaagtccgagggtacgctgatcgacctgagcgagggctttagcgaaacgtccttcaatgacattaaggtgccttctcccagtgcattactggtggataaccctacgccctttgggaatgccaaagaggtcatcgcaattaaagattactgcccaactaattttacaactctcaagtttagtaaaggagaccatctgtatgtcttagatacctccgggggcgagtggtggtacgctcataatactaccgagatgggctatatcccctcctcttacgtgcagccgctcaattataggaactcaacattgtccgacagcgggatgattgacaatctaccagactccccggacgaagtcgctaaagaactggagcttcttggtggctggaccgatgacaagaaagtgccagggaggatgtatagcaataatcctttctggaatggagttcagaccaatccctttttgaacggtaatgtaccagtcatgccctcgctggacgagttgaaccccaagtctacagttgacctactgttgttcgacgcgggcacatctagttttaccgaatcctcctccgctactaccaatagcaccggaaacatttttgacgagctccctgtaacaaatggactgcacgccgagcctccggtccgccgcgacaatccgttctttagatccaagcggtcttacagtttaagcgagctcagcgttcttcaggccaaatctgacgcacccaccagcagtagctttttcaccgggctcaagtctcccgcccctgaacagtttcagtcgcgcgaggattttcggacagcctggctcaaccatcggaagctcgcccgttcatgccacgatcttgatctcctggggcagtcacccggatggggccaaacgcaggccgttgaaaccaatatcgtatgcaaattggactcctccgggggagccgtccagctccccgatacctccatctcgatccatgtcccagaagggcatgtggcccccggcgaaacacagcaaatctcaatgaaagctctgttagacccccctctggagttgaactctgaccggtcctgttccataagccctgtgctggaggtgaagctctccaacctagaggtgaaaactagcattatactggaaatgaaggtctccgccgaaatcaagaacgacctattctccaaaagtaccgtgggcctgcagtgcctcaggtctgattccaaggagggtccctacgtgtctgtgcctttgaattgttcatgtggcgacactgttcaggctcagcttcataacctggagccgtgcatgtacgtggccgtggttgcccatggtccttctatcctctacccctccactgtttgggattttataaacaagaaggttacagttgggctgtacggaccaaagcatatccatccatctttcaaaaccgtggtaactatttttggccacgactgcgccccgaagacacttctcgtctccgaggtaacccgccaggcgcctaaccctgcccccgttgctctgcagctgtggggcaaacatcagttcgttctctcccggccccaggatttgaaggtttgcatgtttagcaacatgactaactatgaggtcaaagcctcggaacaagcaaaggtggtccgaggctttcagctcaaactcggcaaggtgtctcggttgatatttccaataacctcacaaaatccaaatgaactatcagacttcactttgagggttcaggtcaaggacgaccaggaagcaatcctgactcagttctgtgttcagaccccacagcctcctcccaagtccgctattaagccatcgggccagcgccgatttttaaagaaaaacgaggtcggcaagattatcctgtccccctttgctacaacaacaaagtacccaaccttccaggatcgacctgtgtcttccctgaaatttggtaaactgctgaaaaccgtcgtccggcagaataagaaccattacctcttggaatataagaaaggcgacggtatcgcgctcttgagtgaggagcgcgtcagacttcggggacaactctggacaaaagagtggtacatcggatactatcaaggccgcgttggattggttcatactaagaatgtgctggtcgtggggagagcccgcccctctctctgttctggccccgaattgagcacttccgttctgctcgaacagattctgaggccgtgtaaatttctgacctacatctatgcctctgtacgaacactgctgatggaaaacatttcatcttggcgatctttcgctgacgctttgggctacgtgaaccttccgctaaccttcttctgcagagctgagctggattccgagccagagcgggtggcgtcagtgctggagaagctgaaggaagattgtaataacactgaaaacaaagagagaaaatcattccagaaagaactagtgatggctttgctgaagatggactgtcaaggcctggtcgtgcgcctgattcaagattttgtgctactaacgaccgctgttgaggtggctcagcgatggagagaattggcggagaaacttgccaaagtaagcaagcagcagatggatgcctacgaatcccctcaccgggaccgaaatggggtcgtcgattccgaggccatgtggaaaccagcctacgacttcctgctcacctggtcgcaccaaatcggcgacagctaccgtgatgttattcaggagttacatttgggcctggacaagatgaaaaatcccataacaaagagatggaaacatctgacaggtaccctgatcctcgttaactccctggatgtgctccgggcagcagcattctcaccagcagatcaggatgatttcgtcatctag

SEQ ID NO: 299817 - DNA, 2892 bp, Artificial Sequence
  derived and/or modified sequence
atggctgcccagagaatcagagctgctaacagcaatggtctcccacgttgtaagtcagagggtactctaatagacctgagtgaaggattctccgaaacctcattcaatgacatcaaagtgccttccccctctgcccttctggtggacaacccgaccccatttggcaacgctaaagaggtgatagcgatcaaggattactgtccaactaattttacaacacttaagttttctaaaggagaccacctttacgtgctggatacttctggcggagaatggtggtatgctcataatacgaccgaaatgggctacattccgagctcatacgtccagcccctgaactataggaacagtactctgtccgattccgggatgatcgataacctgccagactcacccgacgaggtggctaaagagctggaactgcttggtgggtggaccgacgacaagaaggttccaggtaggatgtattctaataatccattttggaatggggtccagacaaacccctttctcaacggaaacgtgcctgttatgccgagcctggatgagctgaaccctaaaagcactgtcgacttgctcttatttgacgctggtacaagctctttcaccgaaagtagttctgccacaacaaactccacaggaaatatcttcgacgagctaccggtaacgaatgggctacacgccgaaccaccggtaagacgcgataaccctttttttaggtctaagcgctcctactctctgtccgaactctctgtgcttcaggcaaaatccgatgccccgacttccagctcctttttcaccggtctaaagagcccagccccggagcagtttcagtctcgggaagacttccgcacagcatggctcaatcataggaaactcgcaagatcatgccacgatctggaccttctaggacaatcccctggttggggtcagactcaggcagttgaaaccaacattgtctgcaaactcgattcctcagggggtgcagtgcagctccccgacaccagcatctccatccatgtccccgaaggccacgttgctcctggcgaaacccagcagatcagcatgaaggccctcctcgatcccccattagaactgaatagtgataggagttgctccatctcgcccgtgctggaagtgaaactttccaatctggaggtgaaaactagcatcatactggagatgaaggtttctgccgagataaagaatgacttgtttagcaagagtactgtggggcttcagtgcctgagaagtgattctaaagaggggccatacgtttcagtcccacttaattgctcttgcggtgatactgtgcaagcccagctccacaacctcgagccttgtatgtatgtcgcagtggtagctcacggaccctctattctgtatccctcgactgtgtgggacttcataaacaagaaagtgacagtcggcctgtacggtcctaagcatatccacccctctttcaagactgttgtcaccattttcgggcacgactgtgcccctaagactctcctggtctcagaggtgacccggcaagcccccaaccctgccccagttgccctgcaattatggggcaaacaccagttcgtgttgagcaggccacaggacttaaaggtctgtatgttctctaacatgactaattatgaagtcaaggcgtctgagcaggccaaggttgttagaggttttcagctcaagctcggaaaggtgtcaaggttgatattccctattacatcccaaaaccccaacgaactgtccgatttcacattgagagtccaggtcaaagatgaccaggaggctatcctaactcagttttgcgtccagactcctcagcctccgccaaaaagcgccattaaacctagcggacaacgccgtttcctaaagaaaaatgaggttggaaaaattattcttagccctttcgccacaactacaaagtaccccaccttccaagatcggccagttagtagtctgaaattcgggaaattattaaaaaccgtcgtaaggcagaacaagaatcactacttattggagtacaaaaaaggcgatggtatcgctcttctttcagaagaacgcgtgcggctcagaggccaactgtggaccaaggagtggtatatcgggtactaccaggggcgggtcggtctggtgcatacaaagaacgtgctcgtagtcggaagggcccgtcctagtctgtgcagcggcccagagttatccacatcagtgctcctggaacagatcctaaggccatgtaaattcctgacctatatctatgcgagcgtaagaacgctgctgatggaaaacatttcttcatggcgttctttcgcagacgcactcgggtacgtgaacctgcccctcacctttttctgtagggccgagctggatagcgaaccggagcgtgtcgcatccgttctcgagaagctgaaggaggactgcaataatactgagaacaaagaaagaaagagttttcaaaaggagctggttatggcgctgctgaaaatggattgccaagggctcgtcgtgcggctgatccaggatttcgtcctacttaccacagctgtcgaagtggcccagcggtggcgggagttagcagaaaagttagccaaagtctcaaaacaacagatggacgcctatgagagcccccacagagaccggaatggcgttgtggactctgaagcgatgtggaaacccgcctacgacttcctccttacatggagtcaccagataggcgacagctaccgcgatgtgatacaagaactgcacctggggctggataagatgaagaatcctatcacaaagcggtggaaacacctcactgggacgctcatcctggtcaatagcctcgatgtactcagagctgctgcctttagccctgctgatcaggacgactttgtaatctag

SEQ ID NO: 299818 - DNA, 2892 bp, Artificial Sequence
  derived and/or modified sequence
atggcagcacagcggataagagctgccaattcaaacggtctaccacgctgcaaatctgaggggacccttatcgacctgtccgagggtttctctgagacaagtttcaacgatatcaaggtaccaagcccctccgcgctactggtggataatcccaccccgtttggcaatgccaaagaggtgattgccataaaagactattgccctactaacttcacaacgttgaaattcagcaagggagaccacttgtatgtgctggatacatcaggaggagaatggtggtacgcccataatacaaccgaaatgggctacattccctccagctatgttcaaccgctaaattaccggaactcgaccctgtcagattccggtatgatagataacttgcccgattcaccagatgaagtggcgaaggagctggagctgctgggaggctggaccgacgataagaaagtacctgggcgtatgtattcgaataaccctttttggaatggtgtgcaaactaatccattcctgaatggcaatgtgcccgtcatgccaagcctagatgagctgaacccgaaaagcaccgttgacctccttttgttcgatgcaggcaccagttcattcactgaaagctcttctgcaactaccaattcaacgggcaacatcttcgacgagctgccagtaaccaatggcctacacgccgagcccccagttaggcgggacaaccctttctttcggtccaaacgctcctacagcctcagtgagctatcggtgctccaggccaagagcgacgccccgaccagtagttctttttttacaggcctcaaatctccagctccggaacagttccaatcaagagaagactttagaaccgcctggctgaaccaccgtaagctggctagaagttgtcatgacctggacctgttgggtcagtccccagggtggggacagacacaagccgtggaaacaaatatcgtttgtaaactagacagctcaggaggagccgtgcagctgcctgacacctccatttccatacatgtgcctgaagggcacgtagcccctggtgaaacacaacagatctcaatgaaagcactgctggacccacccttggagctgaacagcgacagatcgtgcagcatcagccctgtcttagaggtcaaactgagcaacctggaagtgaaaacgtccatcattctggagatgaaagtctctgcagagatcaagaacgatttattctccaaatccactgtgggcctgcagtgcctgcgcagtgactccaaagagggcccctacgtttctgttcctctgaattgcagctgcggcgacaccgtgcaagcgcaactgcacaatctggaaccctgtatgtatgtggctgtcgtggcccacggaccgtccatcctctatccatctactgtgtgggacttcattaataaaaaagtcacagtcggcctctacgggcctaagcatattcatccttcgtttaagaccgtggtgaccatcttcggacacgactgtgcaccgaagaccctcctggtttccgaagtgacaaggcaggctcccaaccctgctcccgttgccctccagctgtgggggaagcaccagttcgtgctgtcaagacctcaggacctaaaggtttgcatgttttccaacatgacaaactatgaggtcaaagcaagcgagcaggcaaaagtggtccgaggcttccagctgaagctgggaaaagtgtcaagactgatcttccccatcacttcccaaaatcctaatgagctgtctgacttcacactcagagtgcaggtgaaagatgatcaagaagcaatcttaacacagttttgtgtccaaaccccccagccgccgccaaagagcgcaatcaagcctagtgggcagcgccgtttcctcaagaagaacgaggtgggaaagatcatactctcaccttttgccactaccaccaagtatccaacctttcaggaccgccctgtgtctagcctcaaattcggaaagctgctgaaaacagtggtcagacagaacaaaaaccattacttattggagtacaagaagggggatggtatagctttactcagtgaggagagagtgcgtctccgcggccagctgtggacaaaagaatggtatattggctattatcagggaagagtggggcttgtgcataccaaaaatgtgttagtcgtggggcgggccagaccatctctttgctccgggcccgaactgagcacctctgtgctgctggagcagatcctgagaccttgtaagttcctaacctatatttacgcaagcgtgcggaccttgctgatggagaacatctcatcatggcggagtttcgccgatgccctggggtatgtgaatttgcctcttacattcttctgccgggctgagttagatagtgaaccagaacgtgtcgcctccgttctggagaaattgaaagaagattgtaacaacaccgagaacaaggagcgcaagtcgtttcagaaagagctcgtaatggcgttactcaaaatggactgccaagggctggttgtgagactcatccaggacttcgtgctcttgacgacggctgtggaagtggcccagaggtggcgcgagttagccgagaaactcgccaaggtgagtaagcagcaaatggatgcatatgagtctccgcacagggacagaaacggcgtggtcgattcggaagccatgtggaagccagcgtatgattttttacttacctggagtcatcagatcggcgactcatatcgggatgtcatccaagagctccatctggggttggacaagatgaagaaccccattacaaaacgctggaagcatctcaccggtaccctaattctcgttaatagcctagatgtactgcgagccgccgctttcagcccagccgatcaggatgacttcgtgatttag

SEQ ID NO: 299819 - DNA, 369 bp, Artificial Sequence
  derived and/or modified sequence
atggcagctcagagaattcgcgctgctaattcaaatgggctacctcggtgtaaaagcgagggcactctgatcgatttatccgagggcttttcagaaacttcattcaatgatattaaagtcccctcaccttcagctctgctggtggacaaccccacccctttcgggaacgctaaggaagttatcgcaatcaaggactattgtccgaccaacttcaccactctcaagttctccaaaggcgatcacctttacgtattagatacatctggaggggagtggtggtacgcccataacaccacagagatgggatacatcccatcaagttacgttcagccattaaactacaggaactccactctaagcgacagctag

SEQ ID NO: 299820 - DNA, 1662 bp, Artificial Sequence
  derived and/or modified sequence
atggctgcacagaggatcagagctgccaattcgaatggcctgccaagatgcaagtcagagggaacacttatcgacctaagtgaggggttttcggagacttcttttaatgatatcaaagtgcccagcccatccgccctgctcgttgacaacccaacaccattcgggaatgccaaagaggtcattgccataaaagattactgccctacaaactttactaccctaaaattcagcaagggggaccacttgtacgttctggacacaagcggcggcgagtggtggtacgctcataacaccaccgagatgggctatatccctagctcctacgttcagccgttgaactaccgtaactctacactcagtgactcaggaatgatcgacaatctgcccgacagtccagacgaggtggcaaaggagcttgaactgctgggcggttggacggatgataagaaagttcccggcagaatgtacagcaataatcctttttggaatggagtccagacaaatccattcctcaacggaaatgtgcctgtgatgccctcgctagacgagctgaatccgaagtctaccgtggatttgctgctcttcgacgccggcacctcttcatttaccgaatcttccagcgcgacaacaaattcaacagggaacatttttgatgagctgccagtgaccaacggccttcacgccgagcctcctgtgagaagggacaaccctttcttccgttcaaagagatcttattccctgtccgaactgagcgtactgcaggccaagtccgatgcaccaacttcttcaagcttcttcacgggccttaagtctccagcccctgagcagtttcagtcccgagaagacttcagaaccgcttggctcaaccataggaaattggctcggagctgtcatgatttagatcttcttggccagagccccgggtggggacagactcaggcagtagaaacgaatattgtgtgtaaactggatagctcagggggagcagtgcagcttccagatacaagcatctctattcacgtgcctgagggccatgtcgcgcccggggaaacacaacagatcagtatgaaggcgctgctagatcctcccctcgagctgaatagcgatcgcagttgcagcatctcccccgttctggaggtgaagctcagcaatctggaagtaaaaactagcatcatcttagaaatgaaggtgagcgccgagatcaaaaacgatctcttctccaagtcgaccgtgggtctccaatgcctcaggagtgactccaaagaagggccctatgtgtccgtgcccctgaactgtagctgcggtgatacagtccaggctcaactccataatttggaaccttgcatgtacgtcgctgtggttgcccacggcccgtccatcctttaccctagcaccgtttgggatttcattaacaagaaggtgacagtcggcctgtatggcccaaaacacattcaccccagtttcaaaacagtagtaaccattttcggacatgactgcgcgccaaaaacactgctggttagcgaagtgacccgccaagcccccaaccccccaattactaagcgctggaaacacttaactggtacgctcatactggttaacagcctcgacgtgctccgcgcagccgcattctccccagccgaccaggacgatttcgtcatctag

SEQ ID NO: 299821 - DNA, 171 bp, Artificial Sequence
  derived and/or modified sequence
atggcagctcagcgcatcagggcggccaactcaaacggcttgccacgatgtaaatccgaaggaactctgattgatctttctgagggattcagcgaaacttcttttaacgacataaaagtaccgagtcccagcgcactgcttgttgataaccccacccctttcggcaattag

SEQ ID NO: 299822 - DNA, 522 bp, Artificial Sequence
  derived and/or modified sequence
atggctgcccaacggataagagccgccaacagcaacggtctccctcgatgcaagtcagaaggcaccctcattgatttatccgagggattcagcgagacaagctttaacgatatcaaggtgcccagcccctccgcactacttgtcgacaaccccacccctttcggtaacgctaaggaggtcatagccattaaagactactgccccaccaatttcacaacacttaagtttagcaagggggaccacttatatgtgctggatactagtggcggcgagtggtggtacgcacataatactacagaaatgggctatatacctagcagctacgtgcagccgcttaattaccgaaacagtactttatcagactcaggtatgatagataatctgcctgacagcccagacgaagtagccaaagagttggagcttctgggggggtggaccgatgataaaaaggtgccagggcgaatgtacagcaacaaccccttctggaacggagtgcaaactaatcccttcctgaatggctag

SEQ ID NO: 299823 - DNA, 174 bp, Artificial Sequence
  derived and/or modified sequence
atggccgctcagcgaataagagcggctaacagtaatggtcttcctaggtgtaagtcagaaggcaccctgatcgacctgtcagagggtttttccgaaacatcctttaatgacatcaaggtgcccagcccctctgccctgctggtggataatccaactcctttcgggaacgcctag

SEQ ID NO: 299824 - DNA, 606 bp, Artificial Sequence
  derived and/or modified sequence
atggagaacattagttcatggcggtcctttgcagacgccttaggttacgtcaaccttcccctcacattcttttgccgagcagagctggatagtgagcccgaaagggtcgccagtgtgctcgaaaaacttaaggaagattgcaacaatacagaaaataaagagcggaagtccttccaaaaagaactggtgatggcccttcttaagatggattgtcaggggctggttgtgagactgatacaggacttcgtactgttaaccactgccgtcgaggtcgctcagagatggcgcgaactagccgaaaagctggccaaggtgagcaaacagcagatggatgcctatgagtctccccatagggaccggaacggagtggtcgactcagaagccatgtggaaaccggcttatgatttcctattgacatggtcacaccagatcggggactcgtaccgggacgtgatccaagaattgcacctcggtctcgacaaaatgaaaaatcctattacgaagaggtggaagcacctcaccggtacgctgattctggtcaacagtctggacgtcctgagggctgccgcattttccccagccgatcaggatgacttcgtgatctag

SEQ ID NO: 299825 - DNA, 2892 bp, Artificial Sequence
  derived and/or modified sequence
atggccgcccagaggatccgggccgccaacagcaatggcctgccccgctgcaagtctgagggcaccctgattgacctgtctgagggcttcagcgagaccagcttcaatgacatcaaggtgcccagccccagcgccctgctggtggacaaccccaccccatttggaaatgccaaggaggtgattgccatcaaggactactgccccaccaacttcaccaccctgaagttcagcaagggggaccacctgtatgtgctggacaccagcggcggggagtggtggtacgcccacaacaccacagagatgggctacatccccagcagctatgtgcagcccctgaactacagaaacagcaccctgagtgacagcggcatgattgacaacctgcctgacagcccagatgaggtggccaaggagctggagctgctgggcggctggacagatgacaagaaggtgcccggccgcatgtacagcaacaaccccttctggaatggagtgcagaccaaccccttcctgaatggaaatgtgcctgtgatgcccagcctggatgagctgaaccccaagagcacagtggacctgctgctgtttgatgctggcaccagcagcttcacagagagcagcagcgccaccaccaacagcactggaaacatctttgatgagctgcctgtgaccaacggcctgcacgccgagccccctgtgagaagagacaaccccttcttccgcagcaagaggagctacagcctgtctgagctgtctgtgctgcaggccaagagtgatgcccccaccagcagcagcttcttcaccggcctgaagagccctgcccctgagcagttccagagccgggaggacttcagaacagcctggctgaaccacaggaagctggcccggagctgccacgacctggacctgctgggccagagccctggctggggccagacccaggccgtggagaccaacatcgtgtgcaagctggacagcagcggcggcgctgtgcagctgcctgacaccagcatcagcatccacgtgcctgagggccacgtggcccctggagagacccagcagatctccatgaaggccctgctggacccccccctggagctgaacagcgacaggagctgcagcatcagccctgtgctggaggtgaagctgagcaacctggaggtgaagaccagcatcatcctggagatgaaggtgtctgctgagatcaagaatgacctcttcagcaagagcacagtgggcctgcagtgcctgcggagtgacagcaaggagggcccctacgtgtctgtgcccctgaactgcagctgtggggacacagtgcaggcccagctgcacaacctggagccctgcatgtatgtggccgtggtggcccacggccccagcatcctgtaccccagcacagtgtgggacttcatcaacaagaaggtgacagtgggcctgtatggccccaagcacatccaccccagcttcaagacagtggtgaccatctttggacatgactgtgcccccaagaccctgctggtgtctgaggtgacccggcaggcccccaacccagcccctgtggccctgcagctgtggggcaagcaccagtttgtgctgagccggccccaggacctgaaggtgtgcatgttcagcaacatgaccaactatgaggtgaaggccagcgagcaggccaaggtggtgcggggcttccagctgaagctgggcaaggtgtcccggctcatcttccccatcaccagccagaaccccaatgagctgagtgacttcaccctgcgggtgcaggtgaaggatgaccaggaggccatcctgacccagttctgtgtgcagaccccccagcccccacccaagagcgccatcaagcccagcggccagaggcgcttcctgaagaagaatgaggtgggcaagatcatcctgagcccctttgccaccaccaccaagtaccccaccttccaggacaggcctgtgagcagcctgaagtttgggaagctgctgaagacagtggtgcggcagaacaagaaccactacctgctggagtacaagaagggagatggcatcgccctgctgtctgaggagcgggtgcggctgcggggccagctgtggaccaaggagtggtacatcggctactaccagggccgggtgggcctggtgcacaccaagaatgtgctggtggtgggccgggcccggcccagcctgtgcagcggccctgagctgagcacctctgtgctgctggagcagatcctgcggccctgcaagttcctgacctacatctatgcctctgtgaggaccctgctgatggagaacatcagctcctggaggagctttgctgatgccctgggctacgtgaacctgcccctgaccttcttctgcagagctgagctggacagcgagcctgagcgggtggcctctgtgctggagaagctgaaggaggactgcaacaacacagagaacaaggagaggaagagcttccagaaggagctggtgatggccctgctgaagatggactgccagggcctggtggtgcggctcatccaggactttgtgctgctgaccacagctgtggaggtggcccagcgctggagggagctggccgagaagctggccaaggtgtccaagcagcagatggatgcctatgagagcccccaccgggacagaaatggagtggtggacagcgaggccatgtggaagccagcctatgacttcctgctgacctggagccaccagatcggggacagctacagagatgtgatccaggagctgcacctgggcctggacaagatgaagaaccccatcaccaagcgctggaagcacctgaccggcaccctcatcctggtgaacagcctggatgtgctgcgggctgctgccttctccccagctgaccaggatgactttgtgatctag

SEQ ID NO: 299826 - DNA, 369 bp, Artificial Sequence
  derived and/or modified sequence
atggccgcccagaggatccgggccgccaacagcaatggcctgccccgctgcaagtctgagggcaccctgattgacctgtctgagggcttcagcgagaccagcttcaatgacatcaaggtgcccagccccagcgccctgctggtggacaaccccaccccatttggaaatgccaaggaggtgattgccatcaaggactactgccccaccaacttcaccaccctgaagttcagcaagggggaccacctgtatgtgctggacaccagcggcggggagtggtggtacgcccacaacaccacagagatgggctacatccccagcagctatgtgcagcccctgaactacagaaacagcaccctgagtgacagctag

SEQ ID NO: 299827 - DNA, 1662 bp, Artificial Sequence
  derived and/or modified sequence
atggccgcccagaggatccgggccgccaacagcaatggcctgccccgctgcaagtctgagggcaccctgattgacctgtctgagggcttcagcgagaccagcttcaatgacatcaaggtgcccagccccagcgccctgctggtggacaaccccaccccatttggaaatgccaaggaggtgattgccatcaaggactactgccccaccaacttcaccaccctgaagttcagcaagggggaccacctgtatgtgctggacaccagcggcggggagtggtggtacgcccacaacaccacagagatgggctacatccccagcagctatgtgcagcccctgaactacagaaacagcaccctgagtgacagcggcatgattgacaacctgcctgacagcccagatgaggtggccaaggagctggagctgctgggcggctggacagatgacaagaaggtgcccggccgcatgtacagcaacaaccccttctggaatggagtgcagaccaaccccttcctgaatggaaatgtgcctgtgatgcccagcctggatgagctgaaccccaagagcacagtggacctgctgctgtttgatgctggcaccagcagcttcacagagagcagcagcgccaccaccaacagcactggaaacatctttgatgagctgcctgtgaccaacggcctgcacgccgagccccctgtgagaagagacaaccccttcttccgcagcaagaggagctacagcctgtctgagctgtctgtgctgcaggccaagagtgatgcccccaccagcagcagcttcttcaccggcctgaagagccctgcccctgagcagttccagagccgggaggacttcagaacagcctggctgaaccacaggaagctggcccggagctgccacgacctggacctgctgggccagagccctggctggggccagacccaggccgtggagaccaacatcgtgtgcaagctggacagcagcggcggcgctgtgcagctgcctgacaccagcatcagcatccacgtgcctgagggccacgtggcccctggagagacccagcagatctccatgaaggccctgctggacccccccctggagctgaacagcgacaggagctgcagcatcagccctgtgctggaggtgaagctgagcaacctggaggtgaagaccagcatcatcctggagatgaaggtgtctgctgagatcaagaatgacctcttcagcaagagcacagtgggcctgcagtgcctgcggagtgacagcaaggagggcccctacgtgtctgtgcccctgaactgcagctgtggggacacagtgcaggcccagctgcacaacctggagccctgcatgtatgtggccgtggtggcccacggccccagcatcctgtaccccagcacagtgtgggacttcatcaacaagaaggtgacagtgggcctgtatggccccaagcacatccaccccagcttcaagacagtggtgaccatctttggacatgactgtgcccccaagaccctgctggtgtctgaggtgacccggcaggcccccaacccccccatcaccaagcgctggaagcacctgaccggcaccctcatcctggtgaacagcctggatgtgctgcgggctgctgccttctccccagctgaccaggatgactttgtgatctag

SEQ ID NO: 299828 - DNA, 171 bp, Artificial Sequence
  derived and/or modified sequence
atggccgcccagaggatccgggccgccaacagcaatggcctgccccgctgcaagtctgagggcaccctgattgacctgtctgagggcttcagcgagaccagcttcaatgacatcaaggtgcccagccccagcgccctgctggtggacaaccccacccccttcggcaactag

SEQ ID NO: 299829 - DNA, 522 bp, Artificial Sequence
  derived and/or modified sequence
atggccgcccagaggatccgggccgccaacagcaatggcctgccccgctgcaagtctgagggcaccctgattgacctgtctgagggcttcagcgagaccagcttcaatgacatcaaggtgcccagccccagcgccctgctggtggacaaccccaccccatttggaaatgccaaggaggtgattgccatcaaggactactgccccaccaacttcaccaccctgaagttcagcaagggggaccacctgtatgtgctggacaccagcggcggggagtggtggtacgcccacaacaccacagagatgggctacatccccagcagctatgtgcagcccctgaactacagaaacagcaccctgagtgacagcggcatgattgacaacctgcctgacagcccagatgaggtggccaaggagctggagctgctgggcggctggacagatgacaagaaggtgcccggccgcatgtacagcaacaaccccttctggaatggagtgcagaccaaccccttcctgaatggatag

SEQ ID NO: 299830 - DNA, 174 bp, Artificial Sequence
  derived and/or modified sequence
atggccgcccagaggatccgggccgccaacagcaatggcctgccccgctgcaagtctgagggcaccctgattgacctgtctgagggcttcagcgagaccagcttcaatgacatcaaggtgcccagccccagcgccctgctggtggacaaccccaccccatttggaaatgcctag

SEQ ID NO: 299831 - DNA, 606 bp, Artificial Sequence
  derived and/or modified sequence
atggagaacatcagctcctggaggagctttgctgatgccctgggctacgtgaacctgcccctgaccttcttctgcagagctgagctggacagcgagcctgagcgggtggcctctgtgctggagaagctgaaggaggactgcaacaacacagagaacaaggagaggaagagcttccagaaggagctggtgatggccctgctgaagatggactgccagggcctggtggtgcggctcatccaggactttgtgctgctgaccacagctgtggaggtggcccagcgctggagggagctggccgagaagctggccaaggtgtccaagcagcagatggatgcctatgagagcccccaccgggacagaaatggagtggtggacagcgaggccatgtggaagccagcctatgacttcctgctgacctggagccaccagatcggggacagctacagagatgtgatccaggagctgcacctgggcctggacaagatgaagaaccccatcaccaagcgctggaagcacctgaccggcaccctcatcctggtgaacagcctggatgtgctgcgggctgctgccttctccccagctgaccaggatgactttgtgatctag

SEQ ID NO: 299832 - DNA, 2892 bp, Artificial Sequence
  derived and/or modified sequence
atggccgcccagcggatccgggccgccaacagcaacggcctgccccggtgtaagtcagaagggacattaatagatcttagtgaaggattctccgagacgagtttcaatgacattaaggtgccaagtccctccgctctgctcgtggacaaccccaccccctttggcaacgcgaaggaggtgattgctatcaaggattactgccctactaacttcacaacactcaagttctcaaagggagaccacctgtatgtgcttgacacatccgggggtgaatggtggtatgctcacaatacaaccgaaatgggatacatcccgagctcatatgtgcagccgctcaattataggaatagcaccctgagcgatagcggcatgatcgacaaccttcctgacagccctgatgaggttgctaaagagttggagctgctcgggggctggacagatgacaaaaaagttcccggccgaatgtacagtaacaatcctttctggaacggcgtccagactaacccttttctcaacggaaacgtgccagttatgccttccctcgacgagttgaatccaaaatccacagtggacctgttactgtttgacgccggcacatcatcatttactgagagctcatctgccactaccaacagtaccggaaatatttttgacgagttgccagtcaccaatgggttgcatgccgagcctcctgtgcgccgcgacaacccatttttcagaagtaaacgtagttacagtctaagcgagttgtcagtcctgcaagccaaaagcgacgccccaacatcatcctcttttttcacagggctgaaaagccctgcgcctgagcaattccagtccagagaggattttaggactgcctggctgaatcatcgcaagctggcccggagctgtcatgacctcgacctcttggggcaaagccccggttggggacaaacacaagccgtcgagactaacatcgtgtgtaaactggactcaagcggcggtgccgtccagttgccagacacctcaatctccatacacgtgcctgaaggccacgtagccccgggggagacacagcagatttcgatgaaagccttacttgacccacctttagagctgaatagcgatagatcgtgtagcatctcccctgttctggaagtgaaattatcgaacttagaggtgaaaacttcgattatcctcgagatgaaggtctccgccgaaatcaagaacgaccttttcagtaaatccaccgttggattgcaatgtctgcggtccgattccaaggaaggaccttacgtgtctgtgcccttgaattgctcttgcggcgatacagtccaggcacagctccacaacttggaaccatgcatgtacgttgccgtggtggcacatggtccaagcattctgtatccgtcaacagtttgggatttcattaacaagaaagtcaccgtcgggctctatggaccgaaacacatccaccctagttttaaaacagttgtaaccattttcggtcatgattgtgccccgaaaacccttttggtctccgaagtcacacgacaggctcctaaccctgccccagtcgctctccaattgtggggtaagcaccaatttgttctgtctcgtccccaggacttaaaagtctgcatgttttctaatatgactaactacgaggtgaaagcaagcgagcaggctaaagtcgtacgtggttttcagctcaagctcggaaaggtgtcaaggctcatctttcctatcacctcacaaaatccaaatgaactatcagacttcaccctgagagtccaggtaaaagacgaccaagaagccattctcactcagttctgcgtccagacaccccagccccctcctaagtctgccatcaagcccagcggccagagacggttccttaaaaaaaacgaggtagggaaaattattctcagcccatttgctacaaccacaaaatacccgacttttcaagatcgcccagtaagtagtttaaaatttggtaaactgcttaaaacggttgtgaggcagaacaagaaccactatctgctcgagtacaaaaaaggcgatgggattgcgctcctgtcagaggagagggtgagactccgaggtcagctttggaccaaggaatggtacatcggatactaccaggggcgagtcgggctggtgcataccaaaaatgtccttgttgtgggcagggcccgccctagtttgtgttcaggtcctgagctttccacctctgtgctgctcgaacagattctgcgaccatgtaagttcctgacgtacatttacgcctccgtccgtactttactaatggagaacatctctagttggcgcagctttgcagacgccttgggatacgtaaacctgccactcaccttcttctgtagagctgaactcgactcagaaccggaacgcgttgcatcggtgctcgagaagctcaaggaggattgtaataatacggaaaacaaagagcgcaagagttttcagaaggaactggtgatggctctcttgaagatggactgccaggggcttgtggtgagattgattcaggacttcgtcctcctcacaaccgctgtagaggtagcacagcgctggcgggagctggccgagaagctggcaaaagtctcaaagcagcagatggatgcgtacgagagcccgcatcgggataggaacggggttgttgacagcgaagctatgtggaaaccagcctatgacttccttctgacgtggagccaccagatcggggattcgtatcgggacgtgatccaggagctgcatctgggattagataagatgaaaaatcccataacaaagaggtggaaacacctgacgggcaccctcattctagttaactcattagacgtgctccgagccgctgccttctcgcccgctgaccaggacgacttcgtcatctag

SEQ ID NO: 299833 - DNA, 2892 bp, Artificial Sequence
  derived and/or modified sequence
atggccgcccagcggatccgggccgccaacagcaacggcctgccccggtgcaaatcagaaggcacactgatcgatctgagcgaggggtttagcgagacaagcttcaatgacataaaggtgcctagtccttcagctctcctagtggacaaccccaccccattcggcaatgccaaagaggtgattgccatcaaggattactgcccaacaaattttactaccttaaaattttctaagggcgaccacctatatgtcttggacacttccgggggtgaatggtggtacgcccataataccaccgaaatggggtacatcccctcttcttatgttcagccactgaactaccgcaactctacattaagtgactcgggcatgatagacaaccttcccgactctccggatgaagtggcgaaggaactggaattgctggggggctggaccgacgacaagaaggttccaggaagaatgtactccaataatccgttctggaacggggtgcagacaaacccctttttgaacggaaacgtgcctgtgatgccctctctggacgagctgaacccaaaaagcacggtggatctgctcctgttcgatgccggaacctcctcattcactgagagcagttctgccactactaacagcactggtaacatattcgacgagttgcccgtgaccaacggcctgcatgcagagcctcctgtgcgcagggataacccgttttttagatccaagcggagttattctttgtccgaattatcagtgctgcaggctaaatcagacgccccgacatcttcaagcttttttacaggcctaaagagcccggccccggaacagtttcagagtcgggaagactttagaaccgcttggctcaaccaccgcaaattagcgcgcagctgtcatgacttggaccttctggggcagagtcctggctgggggcagactcaggctgtggagaccaatattgtctgtaaactggactcctctgggggcgccgtgcaactccccgatacttctatttccatacatgtgcctgagggccacgttgcccctggcgagactcagcagatttctatgaaagctctgctcgaccctccactggagctgaattcagacaggtcttgttccatttcgcctgtattggaagtcaagttatcgaacctggaagttaaaacaagtattatccttgaaatgaaggtcagcgctgaaattaagaatgacctattcagcaagagtacagtgggcctgcaatgcttgcgaagcgactccaaagagggtccatacgtttcagtgcctttaaactgttcttgcggggacaccgttcaggcccaacttcataacctcgaaccctgcatgtatgtcgcagtcgtggcgcatggtcccagtatcctctatccctccacagtctgggattttatcaacaagaaggtaacagtcgggctctacgggccgaagcacatccatccctctttcaagacagtagtgacaatcttcggtcatgactgcgctcctaagaccctgcttgtaagcgaagtcaccaggcaggcccccaatcccgccccagttgccttgcagctctgggggaaacatcaatttgttctgtcccgccctcaggatttgaaagtgtgtatgttctcgaacatgacgaactatgaggttaaggctagtgagcaggccaaggtggtccggggctttcagctcaagttgggcaaagtaagccgacttatctttccaattacctcacagaatccgaatgaacttagtgacttcactttaagagttcaagtgaaggacgatcaagaagctattcttactcaattctgtgtgcagacgccgcagcccccccccaaaagtgccatcaagccctccggccaaagacgatttctgaagaagaacgaagtcgggaagataattctaagccccttcgccaccactacaaagtacccgaccttccaagatcgacctgtctcgtctttaaaatttggcaagctgctgaagaccgtagtccggcagaataagaatcattacctgctggaatacaaaaaaggcgatgggatcgccctcctctccgaggaacgcgtccgcctgcgagggcagctgtggacaaaggagtggtatattgggtactaccagggtcgagttggactggtacataccaaaaatgtgttggtggtgggaagagcccggccctccctgtgcagcggtcccgagttgagcacatccgtcctgctggagcaaattttgaggccctgcaaattcttgacctatatttacgcctctgtcagaaccttgcttatggagaatatcagcagttggagaagttttgccgatgcacttggttacgtgaatcttcccttgacatttttctgccgggccgaattggactccgaacccgagcgggtggcttccgtgttagagaaattaaaggaagattgcaataatacagagaataaggaacggaaatcttttcagaaagaactggttatggcacttcttaagatggattgccagggcctggtcgtcaggctgattcaggacttcgttctgctcaccaccgctgtggaggtggcacagagatggcgggagctcgccgaaaagttagctaaggtgtcgaaacagcagatggatgcatacgagtctccgcaccgagacaggaacggcgtggtcgattcagaagcgatgtggaagccggcctacgactttcttctcacctggagtcatcagattggggatagctatcgcgacgtgattcaagagcttcaccttggcctggataagatgaaaaaccccataacgaagcggtggaaacatttgacaggcacattgattctcgtcaattctcttgacgtcttgagggcagccgccttcagccccgcagaccaggacgatttcgttatctag

SEQ ID NO: 299834 - DNA, 2892 bp, Artificial Sequence
  derived and/or modified sequence
atggccgcccagcggatccgggccgccaacagcaacggcctgcccaggtgtaagtcagagggaaccctgatcgacctctccgaaggattttccgagacctcatttaacgacattaaagtgccctcaccatctgcattgctagtggacaatccaacaccctttggaaacgctaaagaggtgatagctattaaagattattgccctactaacttcaccacactcaagttctccaaaggcgatcacttgtacgttctggatacctccggaggagagtggtggtatgcccacaacacaacggaaatggggtatattcctagctcttacgtccagcccctgaactacagaaactccactctgtctgattctggtatgatcgataacttgcctgacagcccggacgaagtcgccaaagagctcgagctgctggggggatggaccgacgataagaaggtgcctggcagaatgtattctaacaacccattctggaatggggttcagacaaacccattcctgaacgggaatgtgcctgtgatgccatccctcgatgagctgaatccaaagagcacggtggacctgctgttgttcgatgccggcaccagctcatttacagagtcttcttctgcaaccacgaatagtaccggcaacatttttgatgagctgcccgtcaccaacggcctccatgccgagcctccagtgcgtcgcgataaccccttctttcggagcaagagatcctattccctctcagagttgagcgtcttgcaggcaaaaagtgatgcacccacatcaagttctttctttacaggccttaagtcacctgcgccggagcagttccagagccgggaggatttccgtacggcttggctcaaccaccgtaaacttgcacggagctgccacgatctggacctgctcggacagtctcctggttggggccaaacgcaggctgtcgaaaccaacatagtatgcaagttggattccagcgggggagccgtccagctgccagacacctcaatctcgattcacgtgcctgaaggtcatgttgcaccaggagaaacgcagcaaattagcatgaaggcattactggacccacctttagaactaaattctgacaggtcctgtagcatcagccccgtcctagaggtgaaactcagcaacctggaagttaagaccagcatcatcctcgagatgaaggtgtcagcggagattaaaaacgatttattctctaaatctacagtcggtctgcagtgcctcaggtccgacagtaaggaaggcccctatgtctccgtgcccctgaactgcagttgtggagatacagttcaggcccaacttcataacctagagccctgcatgtatgtagccgtagttgcccacggcccatctatcttgtacccttcaactgtgtgggacttcatcaacaagaaggtgaccgtgggactgtatggccccaagcatatccacccgtccttcaagaccgtggtgaccatcttcgggcacgactgcgctccgaaaacactgctggtatctgaggtgacgcgacaagcccctaatcccgcccctgtggccttacaactgtggggtaaacaccagttcgtgctttcacggccccaggatctgaaggtctgtatgtttagcaacatgacaaactatgaggtcaaggccagtgaacaagcgaaagtggtcagaggctttcagctgaaactgggaaaagttagccgtctgatcttcccaattaccagccagaatcccaacgaactttcagactttaccctccgggtccaagtgaaggacgatcaagaggctattctgacccagttctgcgtgcagactccacaacctcccccgaaatctgcgatcaaaccctcaggacagcggcgtttcttgaaaaaaaacgaagtcggaaagataatcttgtctccttttgcaacgactaccaagtatcctacattccaggataggccagtctcttccctaaagtttgggaagctgctgaagaccgttgtgcggcagaacaaaaatcattatctgttagagtacaagaaaggcgatggcatcgcactactcagtgaggaacgtgttaggttgcgggggcagctctggaccaaagaatggtacatcggctattatcaaggcagagtcggcctagtccatactaaaaacgtcttggtggtgggtagagctaggccttctctctgtagcgggcccgagcttagtacatctgtgctgctggaacagattctgcgcccatgcaaatttcttacatatatttatgcgtctgttcgcacgctcctgatggaaaatatttcctcttggagatcatttgctgatgccctcggatatgtcaacctgcctctgacattcttctgtagagccgaactggactcagagccggagagagtcgcctcagttctggaaaagctaaaggaggattgcaacaatacagagaacaaggagcgcaagtcctttcagaaagagctggtcatggctctcctcaagatggattgccagggcctggtggttcgacttatccaagatttcgtgcttctcaccaccgccgttgaggtagcccagcggtggcgcgaactggcggaaaagttggccaaagtgtccaagcaacagatggacgcttatgagtccccccatcgcgatagaaacggcgtggtggactcggaagcgatgtggaaacccgcatacgatttcctgttaacgtggtcccaccagataggggatagttatagagacgtgatccaagaactgcatttaggactggataagatgaaaaatccaataactaaaaggtggaagcacctgacaggtaccctaatcctcgtgaactcactcgacgtgcttcgtgcagccgcattttccccagccgatcaggacgacttcgtgatctag

SEQ ID NO: 299835 - DNA, 369 bp, Artificial Sequence
  derived and/or modified sequence
atggccgcccagcggatccgggccgccaacagcaacggcctgcccagatgtaaatcagagggaactctgattgacctcagtgaaggattttcagaaacatcctttaacgatatcaaagttcccagtccctcagccttgctggtggacaacccaactccattcggcaatgccaaggaggttattgccataaaggattattgcccaacgaatttcactactcttaagttttcaaagggcgaccacctgtacgtgcttgacacatcaggtggggagtggtggtacgcgcataatactacagaaatgggatatattccttcttcctacgttcaacctctcaactaccggaattccaccctttccgattcctag

SEQ ID NO: 299836 - DNA, 1662 bp, Artificial Sequence
  derived and/or modified sequence
atggccgcccagcggatccgggccgccaacagcaacggcctgccccgatgcaagtctgaaggaacactgattgacctgagcgagggcttctctgagacctctttcaacgatatcaaggtgccttctccctcggccttgctggtggacaatccaaccccattcggcaacgctaaagaagtgatcgccatcaaggactactgtcctactaacttcaccactctcaaattttctaaaggggatcacctgtacgttttggataccagtggaggcgagtggtggtatgcccacaacacgactgaaatgggatatatccctagcagctacgtccaacctctaaactatcggaactccaccctaagcgatagcggcatgatcgataatctgccggactcgcccgacgaagtcgcaaaagagctcgagttactcggtggctggacagacgacaagaaagtgcccggccggatgtacagcaataacccgttctggaatggagtccagacaaatcctttcctcaacggcaacgtgcccgtgatgcccagtctggatgaacttaatcccaaatctacagtggatctactgttgttcgatgctggtacctcgagttttaccgaatcctccagcgccactaccaattcaacaggtaacatctttgacgagttaccagtgactaatggcctgcacgcggagccgccagtgcggagagacaatcccttctttcggagcaagcgctcttactctctttccgaactttctgtgttgcaagcaaagtcagatgccccaacaagttcatccttttttactggcctcaaaagcccggcccccgagcagtttcagagtagggaggatttccgaacagcctggctgaatcaccggaagctggccagatcatgccatgatctggatctgttgggtcaatcccccgggtggggccagacacaagccgtggaaaccaacatcgtgtgcaagctagacagttccggcggcgcagtgcagctgcctgacacttctatttcaattcatgtgccagaaggccatgttgctccgggcgagacacagcaaataagcatgaaagccttactagacccccccctggagctgaactctgacagatcctgttctatcagcccagtactagaggtaaagctgagtaacctggaagtgaagaccagtattatcctggagatgaaggtgagtgcagagattaagaatgacttatttagcaagtctacagtagggctgcagtgtctaagatctgattccaaagaaggaccctacgtgtccgtcccgctcaattgttcttgcggggacacagtccaggctcagcttcacaacttggaaccctgcatgtatgttgccgttgtagctcatggtccatctattctttatcccagcaccgtgtgggattttatcaacaagaaggtcactgtgggcctgtatggcccaaagcatattcatccaagctttaaaactgtcgtgacaattttcggccatgattgtgctccgaagactctgctcgtttccgaggttaccaggcaagcacccaacccaccaattaccaagagatggaagcacctgaccgggacgttaatcctggtgaactcactggacgtgctgagagctgccgcgttctcccccgctgaccaggatgattttgttatttag

SEQ ID NO: 299837 - DNA, 171 bp, Artificial Sequence
  derived and/or modified sequence
atggccgcccagcggatccgggccgccaacagcaacggcctgccccgatgtaaatccgagggaactctcatagatctgagcgaggggttctccgagacctcttttaacgacatcaaggtcccatctcctagcgccctcctggtggataaccccaccccattcgggaactag

SEQ ID NO: 299838 - DNA, 522 bp, Artificial Sequence
  derived and/or modified sequence
atggccgcccagcggatccgggccgccaacagcaacggcctgcccagatgtaaatctgagggcaccttgatcgatctttcagagggcttttctgagacttcgtttaacgatatcaaagttccatcccctagcgcgctccttgtcgacaacccaaccccatttggtaacgcaaaggaagtcattgccatcaaggattattgtcccactaacttcaccacgctgaagtttagtaaaggagatcacctctacgtgctggacactagtggaggggagtggtggtacgcccataatactactgagatgggctacatcccttcatcttatgtgcaacctctgaattatcggaattccaccctgagcgactctggtatgatcgataatctgcctgattccccagacgaagtggcaaaagagctggagcttttgggcggctggaccgatgacaagaaagtgccaggacgcatgtattcaaataatcccttttggaatggcgtgcaaacaaacccttttctgaacgggtag

SEQ ID NO: 299839 - DNA, 174 bp, Artificial Sequence
  derived and/or modified sequence
atggccgcccagcggatccgggccgccaacagcaacggcctgccccgctgcaaatccgaggggactcttatcgatctgagtgaaggctttagtgagactagctttaacgacattaaagttccgagcccctctgcactgctcgtggacaacccgaccccgttcggtaatgcctag

SEQ ID NO: 299840 - DNA, 606 bp, Artificial Sequence
  derived and/or modified sequence
atggagaacatcagcagctggcggagcttcgccgacgccctgggctacgtgaacctgccactgacattcttttgccgggccgaactggacagtgagccagagagagttgcaagcgtgctggaaaagctaaaggaagactgcaataatacagaaaataaggagcgtaagtcctttcaaaaggagctggtcatggcactcctgaaaatggattgccagggtctagtggtgagactgatccaggattttgtcctgctgacaaccgcagtggaagtcgcccagaggtggagagagctggccgagaaactggctaaggtgagcaagcagcagatggatgcctacgaatctccccacagggacaggaatggcgtcgtcgattcagaggcgatgtggaaaccagcatatgacttcctgctcacctggtctcaccagattggcgattcttatagagacgtgatccaggagcttcacttgggcctcgataagatgaagaacccgatcacaaaacgctggaagcacttgaccggcacattaatactggtaaatagcctcgacgttctgagggccgccgctttttcacccgctgaccaggacgatttcgtcatttag

SEQ ID NO: 299841 - DNA, 2892 bp, Artificial Sequence
  derived and/or modified sequence
atggccgctcagcggattagagctgccaatagtaacggtctacccagatgcaagtcagaaggaaccctcatcgacctgagcgagggcttctcagagacgtcctttaacgacatcaaagtgccatctcctagcgctctgctcgtcgacaaccctacgccattcggcaacgccaaagaggtaatcgctattaaggattattgcccaacaaacttcacaacactcaagttttccaaaggcgaccacctgtacgtcttggacacttccgggggtgagtggtggtacgcccacaacaccactgaaatgggatacatcccttcctcatacgttcagccactgaattaccgcaactccaccctctccgactcaggtatgattgataatctgcccgattcccctgatgaagtggctaaggaactggaactcctgggagggtggacggacgacaaaaaggttcccggacggatgtactctaataacccgttttggaacggagtccaaaccaatccctttttaaacggaaacgtacccgtgatgccctctttggacgagttaaatcccaaatctacggtggacctgcttttgttcgatgccggtacttcttcattcactgaatcttcttccgcaaccaccaacagcactggcaatatctttgacgaactgccggttacgaacggattacacgctgaacctcctgtgcgtcgcgacaatccctttttccgttctaagcgctcgtactcgttatccgaactgagcgtgcttcaggccaagtctgacgcacctacaagctcatccttcttcaccgggctgaagtccccagcgccagaacagttccagtcgagggaggactttcggaccgcgtggttgaatcacaggaaactcgctagaagctgtcacgacctcgatctgttgggacagtcccctggctggggccaaacgcaagctgtggagactaatatcgtatgtaaattagatagctccggtggggctgtacaactgcctgataccagcatttccatccatgtgcccgagggccacgtggcacccggtgagacacaacagatctctatgaaggccttactggaccccccacttgagcttaactctgacaggtcctgtagtatcagtccggtgctcgaagtaaagttgtcaaatctagaggtgaagacttcaatcatactggaaatgaaggtcagcgcggagattaaaaatgacctgttctccaaaagcacggtgggccttcagtgtctgcgatccgactcaaaggaaggcccttatgtgtctgttcctctgaattgttcatgcggcgacacagtgcaggcccagttgcataacctcgagccctgtatgtacgtcgcagtggtggcccacggcccaagcatcctgtacccttccaccgtgtgggattttatcaataaaaaagtgacagttggactgtatggacccaaacacatccaccctagcttcaaaacggtagttaccatctttggtcacgactgcgcaccgaagactttgctggtgtcagaggtaacccgccaggccccaaaccctgcgccagtggccctacagctttggggtaaacaccagttcgtcttatccagaccacaggatcttaaggtttgcatgttctcaaacatgaccaactacgaggtgaaggcaagcgagcaagcgaaagtcgtgaggggatttcagcttaagttagggaaggtctcccggctgattttccctataacaagccaaaaccctaacgaactttcagacttcaccctgcgagttcaggtaaaggacgaccaggaggcgatcctcacccagttctgtgtgcagactccccagcctcctcctaaaagtgcaataaagcccagcgggcagaggaggtttctcaagaagaatgaagtgggaaaaattatcctttccccttttgcaaccacaaccaagtaccctacatttcaggaccggcctgtgtccagtctcaaattcgggaagcttctaaagaccgtggtgcgtcagaacaagaatcattatctattggaatacaagaaaggggacggtatcgcactgctcagcgaggaacgagtgcgcctgagggggcagttatggacgaaggagtggtatatcggctattatcagggcagggtggggcttgtgcataccaaaaacgtgctggtggtcgggcgagccaggcccagtctttgctcaggacctgagttgtccactagcgtgcttttggagcagattttgcggccttgtaagtttcttacatatatctatgcctctgtccgtaccctcctcatggagaacatctctagttggcggtcatttgctgacgctctcggctatgtcaatctgcccttgacattcttctgtagggccgagctggactccgaacctgagagggtcgcctcggtgcttgagaagctcaaagaggattgtaataatacggagaacaaggagcggaagtcttttcagaaagagttggtcatggccctcctgaagatggattgtcaaggcctcgttgtgcggctgatccaggactttgtacttttgaccacggccgtggaggtcgcccagcgatggagagagcttgccgaaaagctggctaaagtaagcaagcagcaaatggatgcctatgagtcaccccacagggacaggaatggggtagtggattccgaagctatgtggaaaccagcttacgacttcctgctgacctggagtcaccagattggggacagctacagagatgtaatacaagaactccacctgggattagacaaaatgaaaaaccctattacaaagcgatggaaacacctgaccgggactctcattttggtaaactccctggatgtgctcagagccgcagctttctcacctgccgaccaggacgatttcgtaatttag

SEQ ID NO: 299842 - DNA, 2892 bp, Artificial Sequence
  derived and/or modified sequence
atggccgctcagagaatccgcgctgcaaactccaatggtctccctagatgtaagtctgaagggacactcatcgatctttccgaggggttctcagagacttcctttaatgatattaaggtcccctcccccagtgcgctgctggtagacaatcccacgcccttcggcaatgctaaagaggtcatcgccataaaggactactgccctactaactttaccactctgaagttttccaagggagatcatttgtacgttcttgatacgtcgggaggagagtggtggtatgctcataacactaccgagatgggatatataccatcttcttacgttcagcctctgaattaccggaattccacactaagcgatagcggcatgattgacaacctccccgattctccggacgaggtggcaaaggagctcgaactgctgggaggctggactgacgataagaaggtacctggacggatgtactctaataatccattctggaacggtgtgcagactaacccattcctgaatggaaatgttccagtgatgccttcgctggatgaactcaatcccaagtccacagttgatttgctgcttttcgatgctggcacatcctcctttactgaatcttcgtctgccacgaccaactctacgggcaatatttttgacgagctccccgtgacgaatggtttacatgctgagccccctgttcgcagagataatccgttctttcggtccaaacgcagctactcattgagcgaactgtctgtgctccaggctaaatccgatgcaccgacatcatctagctttttcactgggctgaagagtccggcacccgagcagttccagtcaagggaagattttcgtactgcatggctgaatcataggaagttggccagaagctgccacgacctggaccttctggggcagagtccaggttggggacagactcaagcggtggagaccaacatcgtgtgcaagctagactcaagtggaggcgctgttcagctgccggatactagcatcagcatccatgtgcccgagggacatgtggcacccggtgagactcagcagatatcaatgaaggctctgctggaccctccccttgaacttaactccgaccgatcatgttcaattagtccagtgctggaggtgaaactgagcaatctggaagtcaaaacctcgataattctggaaatgaaagtttccgcagagatcaagaacgacttgttttcaaagtcaaccgtcggactacaatgtctgcgctcagactccaaggaaggtccgtacgtttcagtgccactgaattgctcctgcggcgatacggtgcaggcacaactgcataacctggagccgtgtatgtacgtggctgtggtcgctcacggcccatcaatcctgtacccctctacggtgtgggactttattaacaagaaggtgactgtagggctctatggcccaaagcacatacatccctccttcaagactgtggtgacaatttttggacatgattgcgcacctaaaactctgttggtgtctgaagtgacaaggcaggccccaaatcccgcaccggtagcactgcaactgtggggcaagcaccagttcgtgttatctcgaccacaggacctcaaagtttgtatgtttagtaatatgaccaattatgaggtgaaagccagtgaacaggccaaagttgtgcgtggcttccagctgaagctggggaaggtctcgcgcctgatcttccccattacaagccagaacccaaatgagctttccgatttcaccctgagagtccaggtaaaagatgaccaggaggcaatccttacccagttctgcgtgcagacaccccaaccacccccaaaaagtgccataaaaccctccggacagcgcagattcctgaaaaagaacgaagttggtaagatcatcctaagcccattcgccactactactaaatatccaacattccaagataggcctgtgtcgtcattgaaatttggaaagctgctcaagactgtcgtacggcagaacaagaaccattacctgttggaatataaaaagggtgatgggatagccttactctctgaggaacgtgtccgcctgcgcggacagctctggaccaaagaatggtacataggctactaccagggccgagtgggtctggttcacaccaagaacgtcctggtcgtggggagagctcggccttcactgtgtagcggacccgagttgagtacatctgtgctgctggagcagattctgaggccttgtaaatttttgacatatatctacgcaagcgtgcgcacccttctgatggaaaatattagttcttggaggagctttgctgatgcgctgggctacgtgaacctccctctgaccttcttctgccgggcagagctggattccgaacctgagagggtcgcctctgtgttggaaaaactcaaagaggactgcaataataccgaaaacaaggagcggaaatccttccagaaagaattggttatggccttactgaagatggattgtcaagggcttgtcgttcgcctcattcaggactttgtcttgctgacgacggccgtcgaagtggcccaaagatggcgtgagctggcagaaaagcttgccaaagtgtccaaacagcagatggatgcctatgaatctcctcacagggacagaaacggcgtagtggactctgaggccatgtggaagccagcatacgacttcctgctgacatggagccatcagattggagatagttacagggacgtgatccaggaactccatcttggtctggataagatgaaaaatcctatcacaaagcgctggaaacatctaaccggcaccctgatcctcgtgaattccctggatgtgctgcgagctgccgcattctctcccgcagaccaagacgatttcgtgatttag

SEQ ID NO: 299843 - DNA, 2892 bp, Artificial Sequence
  derived and/or modified sequence
atggcagcccagcggatcagagccgcaaatagcaacggactgcctcggtgtaagagtgaagggacactgatagatctgagtgagggcttctccgaaacctccttcaatgacataaaagttccctccccgagcgctctcttagtggataatcccactcctttcggaaacgccaaagaggtgatcgcaataaaggattactgccctaccaactttaccacgctaaaatttagcaagggggaccatttatacgtcttggataccagcggtggtgagtggtggtacgctcataacacgaccgaaatgggttatatcccctcctcttatgtccaaccattgaactaccggaatagtaccctgagcgatagcggaatgattgacaatttgcccgacagtcctgatgaggtggccaaggagttagaactgcttggcggatggaccgacgataagaaagtaccaggacgtatgtatagtaataatccattctggaatggcgtccagaccaaccccttcctaaacgggaatgtccccgtgatgccctcgcttgacgagctgaaccccaagagtactgttgatttattgctgtttgacgctggtacctcctcctttaccgagtcaagcagtgcaacaaccaatagcacaggaaatatctttgatgagctgcccgtaaccaatggattgcatgctgaaccaccggtaaggcgggataacccatttttcaggagcaagagaagctattctctcagcgaattgagcgtcctgcaggcaaaaagcgacgctccaacaagttcctcattttttaccggacttaagtccccggctcctgagcagtttcagtccagggaggattttaggacagcgtggctcaaccaccgaaagctggctcgctcatgccacgacctcgatctgctcggacagtcccctggctggggacagacacaggctgtggaaactaatattgtgtgtaaactggattcctctggaggcgctgtacaactccctgatacgtcaatctcaattcatgtgccagagggacacgttgcccctggtgaaacccagcagattagcatgaaggccctccttgatcccccacttgaactgaattcagatcgcagctgctcaatttctcctgtgcttgaagtgaagctcagtaatctggaggtgaagactagcatcatactcgagatgaaagtatcagcagagataaagaacgatctcttcagcaaatcaactgttggtctccagtgccttaggagcgacagcaaggaagggccttatgttagcgtgccgctgaactgctcgtgtggagatactgtacaagcgcaacttcacaacctggagccatgtatgtatgtggcagtagttgcccacggaccctccatcctgtatcccagcacagtatgggatttcatcaataagaaagtgaccgtgggactgtatggccctaagcatatccatcctagctttaagaccgtggtgaccatttttggacacgactgcgcccctaaaactttactcgtgtccgaagtcacacgacaggccccaaatccagctcccgtggctctacagctgtggggaaagcaccagtttgtgttatcacgcccacaggatctgaaagtgtgtatgttttcgaatatgacaaattatgaggtgaaagcaagtgagcaagctaaagtcgttaggggtttccagctgaagctcggtaaagtttcacgtctcatattccccatcactagtcagaatcctaacgaactgtctgatttcacactgcgggttcaggtgaaggacgaccaggaagccatactgacgcagttttgtgtgcaaacaccccagccaccccctaaatcagcgatcaaaccgtctgggcaaaggcggtttctgaagaagaacgaagtgggtaaaattatcctctcccctttcgcaactaccacaaaatatccgacctttcaggaccgtcccgtgtcaagcctaaaatttggcaaacttcttaagaccgtggtgagacagaacaagaaccactatctccttgagtataaaaagggtgacgggatagcactgctctcagaggagcgggtgcggttacgcggtcagctctggacaaaggagtggtatattggatactatcagggacgagttggccttgtccatacaaaaaatgtgctagtggtcggcagagctagaccttctctgtgctccggtcccgaactttctactagtgtactattggagcagatcctgcggccatgcaaattcttgacctatatatatgcctctgtgaggacactgctgatggaaaatatctcatcatggcggagcttcgccgatgcactcggctacgtaaacctgcctctgacttttttttgccgtgccgagcttgattcggagcccgaacgagttgcaagtgtgttggagaagctgaaagaggattgtaataatactgagaataaagaacggaaaagcttccaaaaggagctggtaatggcccttcttaagatggactgtcagggtctggttgtgcgcctgatccaagactttgtgctcctgacaaccgcggtggaagtcgcccagagatggcgtgaattggctgaaaagctcgccaaggtttccaagcagcagatggatgcgtacgagagtccccatcgcgacagaaatggagtcgtcgattcagaggctatgtggaaacctgcgtatgactttctcctcacctggagccatcagatcggtgactcatacagagacgtgatccaggagctgcatctgggcttagacaaaatgaagaatccaatcactaaacgctggaagcacctgacagggactctgatccttgtaaattctcttgatgtccttcgcgctgcagcattctctcccgctgaccaggatgatttcgttatttag

SEQ ID NO: 299844 - DNA, 369 bp, Artificial Sequence
  derived and/or modified sequence
atggctgcgcagcgcatccgggctgcaaactcaaacgggctgccacgctgtaaaagtgagggcactctgattgatctctccgaggggttctcagagaccagtttcaatgacatcaaggtgcccagcccatcggcacttctggttgataatccaacgccgtttggcaatgcaaaggaggtgatagcaataaaagactactgccccaccaacttcaccacactaaagttcagtaaaggcgaccacctctacgttctggacacatccgggggtgaatggtggtatgcccacaacaccactgaaatggggtacataccaagctcatacgtccagccattaaattataggaactctacactgtcggattcatag

SEQ ID NO: 299845 - DNA, 1662 bp, Artificial Sequence
  derived and/or modified sequence
atggctgctcaaaggatccgagccgctaattctaatgggctgcccaggtgcaagtcagaaggaactttgattgacctgtcagaaggcttctctgaaacatcctttaatgacattaaggtaccctccccgtccgccctgctggtggataatccgacacctttcgggaatgcgaaagaggtcattgcaataaaggattactgtcctacaaattttaccaccctcaaattttccaaaggagatcacttgtacgtccttgacacttccggtggcgaatggtggtacgcccataacaccaccgaaatggggtacatcccctcatcttacgtacagcctctgaactatcggaattctacgttgagtgatagcggcatgattgacaacttgccggactccccggacgaagtggccaaagaactagaactgctgggtggttggaccgacgacaagaaagttccaggccgaatgtatagtaacaatcctttctggaatggtgttcagactaatcctttccttaatgggaacgtccccgttatgccatctctggacgagttgaacccaaagtcgacagtcgacttgctgttatttgatgccggtactagcagcttcacagagtcttcgtccgcaaccactaacagtacagggaacatttttgacgagttgcctgtgactaacggcttacatgcagagcccccagtgagacgtgacaaccccttttttcggtccaaaagatcttactccctctccgaactgagtgtgctccaggctaagagtgacgctcccacttcctccagcttctttaccggtctaaaaagccctgcgcctgaacagtttcagtctcgcgaagactttcgcactgcttggctgaatcaccgcaaactcgccagaagctgtcacgacctagatctgctggggcagagtcccggatggggccagacccaagccgtggaaacgaacatcgtctgcaaattggactcctccgggggagcagttcagctgccagatacaagcatcagtatccacgttccagaaggacatgtagcacctggtgaaacccagcagatttccatgaaagctttgctggaccctcccctggagctgaatagtgaccgcagctgctcgatcagccccgtgctggaggtgaagctgagtaatctggaagttaagacatctattattcttgaaatgaaggtctccgccgaaattaagaatgatctgttttcgaagtctactgtgggtttgcagtgtctgcggtcagactcaaaggaaggaccctacgtgagcgtccctctgaattgttcttgcggggatactgtacaggcccagcttcacaatctggagccatgtatgtacgtcgccgtggtggctcatggcccaagcattctgtacccttcaaccgtttgggacttcatcaacaaaaaggtcaccgtggggctgtacggtcctaagcatatccatccttcatttaagacagttgttacaatctttggtcacgactgtgcaccaaaaacgttactagttagcgaggtgacgcgccaggccccaaacccgcctattaccaaacgatggaaacacctgaccggcacactgatcctcgtaaattcactggacgtcctgcgggctgcggcttttagccctgcggaccaggatgattttgtgatatag

SEQ ID NO: 299846 - DNA, 171 bp, Artificial Sequence
  derived and/or modified sequence
atggccgctcaaaggattcgggcagcgaactccaacggccttccgagatgcaagtctgaggggactctgatagacttatctgagggcttttcagagacttccttcaacgacattaaggtgccatctccttctgcgcttttggttgacaatccgacacccttcgggaactag

SEQ ID NO: 299847 - DNA, 522 bp, Artificial Sequence
  derived and/or modified sequence
atggccgcacaacgaatcagagctgcaaattctaatggcctgccacgctgcaaatcagaaggcacccttatcgatttatctgagggtttcagtgagacatcattcaacgatatcaaggtgcccagccccagcgcgctccttgtagataaccctactccatttggaaatgccaaagaggtaatcgccatcaaggactactgcccgaccaacttcacgacactcaagttttcaaagggcgatcacctgtacgtgctagacacttcggggggtgagtggtggtacgcccacaatacaaccgagatgggctatatcccgtctagttacgtgcagccacttaactatcgcaatagcaccctgtcagactccggaatgatcgataacctccctgacagcccggatgaagtggcgaaggagttagagctgctaggaggatggaccgacgataagaaggtcccaggtagaatgtactcgaataacccattctggaatggcgttcaaacaaaccctttcttaaacggatag

SEQ ID NO: 299848 - DNA, 174 bp, Artificial Sequence
  derived and/or modified sequence
atggctgcccagcgcattcgcgctgcaaatagcaacgggctgccacggtgtaagagtgaggggacgctgattgatctgtcagaggggtttagcgaaacaagcttcaacgacattaaggttcccagcccaagcgctctgctggtcgacaatccaacgccatttgggaacgcctag

SEQ ID NO: 299849 - DNA, 606 bp, Artificial Sequence
  derived and/or modified sequence
atggagaatatcagcagctggaggtcattcgctgacgccctgggttacgtcaatctacctctgacttttttctgtcgagctgagctggattcagagcccgagcgagtcgcttccgtgctggagaagctgaaggaggactgcaataacaccgagaataaagagcggaagtcattccagaaggagctcgtgatggctctgcttaaaatggactgtcagggccttgtggtgagattgattcaggatttcgtgcttttaactacagccgtcgaggttgcccagaggtggagagaactggcagagaagctcgccaaagtgtcgaagcagcaaatggatgcttacgagagccctcatagagacagaaatggcgtcgtcgacagcgaggctatgtggaagcccgcttacgattttcttctgacctggtcgcatcagatcggagactcctatagggacgtcatccaggagctccatctgggcttggacaaaatgaagaaccctataaccaagagatggaaacacctcaccgggactttgattctggtgaatagcctggacgtgctgcgggctgccgcattctcaccagcagatcaggacgattttgtcatctag

SEQ ID NO: 299850 - DNA, 5044 bp, Artificial Sequence
  derived and/or modified sequence
gaaacagagacaagcaccccaacagtagggtgcttcgaggtcctggaggggagccctggccctgtggagagagaccgagtcgtgcagcgtccgtggcctgcatttgaaactgaagggcaagaggctggtgagatccgagagtcatgccgctgcgtggaggaacatgctgaacctctggaggaacggctctacctccagcgtctcccttctctcctggacagaaggccgtgtcctgggacttctctgatggcgagaggctgcggctgtaccaggaagaaatatgaagccttagcggctttacccgggaagcgagtttcgagatggcggctcagcggatccgagcggccaactccaatggcctccctcgctgcaagtcagaggggaccctgattgacctgagcgaagggttttcagagacgagctttaatgacatcaaagtgccttctcccagtgccttgctcgtagacaaccccacacctttcggaaatgcaaaggaagtgattgcgatcaaggactattgccccaccaacttcaccacactgaagttctccaagggcgaccatctctacgtcttggacacatctggcggtgagtggtggtacgcacacaacaccaccgaaatgggctacatcccctcctcctatgtgcagcccttgaactaccggaactcaacactgagtgacagcggtatgattgataatcttccagacagcccagacgaggtagccaaggagctggagctgctcgggggatggacagatgacaaaaaagtaccaggcagaatgtacagtaataaccctttctggaatggggtccagaccaatccatttctgaatgggaacgtgcccgtcatgcccagcctggatgagctgaatcccaaaagtactgtggatttgctcctttttgacgcaggtacatcctccttcaccgaatccagctcagccaccacgaatagcactggcaacatcttcgatgagcttccagtcacaaacggactccacgcagagccgccggtcaggcgggacaaccccttcttcagaagcaagcgctcctacagtctctcggaactctccgtcctccaagccaagtccgatgctcccacatcgtcgagtttcttcaccggcttgaaatcacctgcccccgagcaatttcagagccgggaggattttcgaactgcctggctaaaccacaggaagctggcccggtcttgccacgacctggacttgcttggccaaagccctggttggggccagacccaagccgtggagacaaacatcgtgtgcaagctggatagctccgggggtgctgtccagcttcctgacaccagcatcagcatccacgtgcccgagggccacgtcgcccctggggagacccagcagatctccatgaaagccctgctggaccccccgctggagctcaacagtgacaggtcctgcagcatcagccctgtgctggaggtcaagctgagcaacctggaggtgaaaacctctatcatcttggagatgaaagtgtcagccgagataaaaaatgacctttttagcaaaagcacagtgggcctccagtgcctgaggagcgactcgaaggaagggccatatgtctccgtcccgctcaactgcagctgtggggacacggtccaggcacagctgcacaacctggagccctgtatgtacgtggctgtcgtggcccatggcccaagcatcctctacccttccaccgtgtgggacttcatcaataaaaaagtcacagtgggtctctacggccctaaacacatccacccatccttcaagacggtagtgaccatttttgggcatgactgtgccccaaagacgctcctggtcagcgaggtcacacgccaggcacccaaccctgccccggtggccctgcagctgtgggggaagcaccagttcgttttgtccaggccccaggatctcaaggtctgtatgttttccaatatgacgaattacgaggtcaaagccagcgagcaggccaaagtggtgcgaggattccagctgaagctgggcaaggtgagccgcctgatcttccccatcacctcccagaaccccaacgagctctctgacttcacgctgcgggttcaggtgaaggacgaccaggaggccatcctcacccagttttgtgtccagactcctcagccaccccctaaaagtgccatcaagccttccgggcaaaggaggtttctcaagaagaacgaagtcgggaaaatcatcctgtccccgtttgccaccactacaaagtacccgactttccaggaccgcccggtgtccagcctcaagtttggtaagttgctcaagactgtggtgcggcagaacaagaaccactacctgctggagtacaagaagggcgacgggatcgccctgctcagcgaggagcgggtcaggctccggggccagctgtggaccaaggagtggtacatcggctactaccagggcagggtgggcctcgtgcacaccaagaacgtgctggtggtcggcagggcccggcccagcctgtgctcgggccccgagctgagcacctcggtgctgctggagcagatcctgcggccctgcaaattcctcacgtacatctatgcctccgtgaggaccctgctcatggagaacatcagcagctggcgctccttcgctgacgccctgggctacgtgaacctgccgctcacctttttctgccgggcagagctggatagtgagcccgagcgggtggcgtccgtcctagaaaagctgaaggaggactgtaacaacactgagaacaaagaacggaagtccttccagaaggagcttgtgatggccctactgaagatggactgccagggcctggtggtcagactcatccaggactttgtgctcctgaccacggctgtagaggtggcccagcgctggcgggagctggctgagaagctggccaaggtctccaagcagcagatggacgcctacgagtctccccaccgggacaggaacggggttgtggacagcgaggccatgtggaagcctgcgtatgacttcttactcacctggagccatcagatcggggacagctaccgggatgtcatccaggagctgcacctgggcctggacaagatgaaaaaccccatcaccaagcgctggaagcacctcactgggactctgatcttggtgaactccctggacgttctgagagcagccgccttcagccctgcggaccaggacgacttcgtgatttgaatgggtcccctcccctcctgctgctctggagtgcaagccctcttctgccctgcgtgccctgctgtcaccgcggagctgaagagggaggaaggggcggctgctcagacagatttagggcccgccagctaggctacacccatcatgcgccgccctcctccatcgagggagaggcctgaagggactgcctactgcagctcgttgccaatcacatagctttctatttgttaagtataaatttaaatttaaaatcacttttttaacgaatggggggaagggatctatgagaaaggtggtatctaatttttttatggaccataaaggtttaaaagaaaataggggcacaggctgttgaggtttttatgttgttatagacctttttaaattatgttagagatgtatataggtatttaaaggtcactgggagcgtttctgattcccggccacactttgcatttcaacactcagcccggaaagatgctcgttcggttgttggacctctttcactccctgcgtgtaagaaggtgaatcacgtgggaaaaagtggcttttcagtaaacgggtacagctcattctttctgagaaggccccaggtcctgctccctcctcggatttgattgtcttccgtgctttgcctcactcgtagtaaatgaccatccatagaatatgtgaatctttggtgagcttcagtgggcagagtgaagtcccgcattagcatttaggtgccctgagctgtttctgccaatagattagaaagcagccatgagttgacagtctttagggcccctgccagtgtgcaattagtcattgacaagaacaatgccatttgagagtgaggtggtccctgctgctacgaggccattgtactgttttttccttgaggtcaaagcagtgcttcccatagagtttgctgcctcttctgtggacaggaagaaaacttcatgaccgaatcagagccttggtggccactgactctcgtgcttattgcagatgctgtggttggcctcacaagcaacgccttatgctgatgtgcagaggtgccagctgccatttgccaaactctgcatttcatttcatctaaggcttaacccctcttccttcctggtgtacctgtgtctcctcggaaggaagtcatagtttagatgaaaccattttttgtacaatgtaaagatcatctgagcaagatgagcattttgtaaaaatgaaaatgtgactcacataaaatcaggaacttgacacagtgttgcattaataactttagggtgcagacatgctgtgtgaatctcacaatgcgtcgtagatgtcgcgtgttggaagggagcaggaggaaggactgatactggcaaatcagtagagtgaggtgatccttagcaacgtgccaggacacttcctgtgtgcctgcagttgtcagggaccatttgggatcccgaatctcattctctaaaactgctttcttgaaacatgttacttccttagtataatcaatgtatactcccttactggcctgaaacgttgtatagctacttattcagatactgaagaccaacggactgaaaaaaagaacaaacattagctattttatgctgcaagaaccaggacacacaattcgccaatcatcccaccatataaccttcgattgtgcttctcaactccaccccataatttctcccagagaccatctatcaccttttccccaaagaagaaacaaaaccagttgcaccttaaaccatggatattttttcctcaggggctttaaatagtttcctatgcaacgtgtcttgtagcacaaataaaattctacaaaagttgcagtaaattttatttggatattttaa

SEQ ID NO: 299851 - DNA, 5194 bp, Artificial Sequence
  derived and/or modified sequence
cgcccaggcgcgggaccaccctccgcccgccgaggcgggggcccagcgcgcccggcactctcggcggtccgggcccctcgccactaccgccgccgccgccgccgtgagtcccgcggagccgcgcgcgcccccggctgggccgagccgctggccgacgagcggagcctcaggagccggcggggacgccatgcgagccagcgtctcccttctctcctggacagaaggccgtgtcctgggacttctctgatggcgagaggctgcggctgtaccaggaagaaacatattgccgagtggatgccgccgcgcagcgtgtttgcttgaggcagaagcttcagcatctgctgggataactggaggaagaaatatgaagccttagcggctttacccgggaagcgagtttcgagatggcggctcagcggatccgagcggccaactccaatggcctccctcgctgcaagtcagaggggaccctgattgacctgagcgaagggttttcagagacgagctttaatgacatcaaagtgccttctcccagtgccttgctcgtagacaaccccacacctttcggaaatgcaaaggaagtgattgcgatcaaggactattgccccaccaacttcaccacactgaagttctccaagggcgaccatctctacgtcttggacacatctggcggtgagtggtggtacgcacacaacaccaccgaaatgggctacatcccctcctcctatgtgcagcccttgaactaccggaactcaacactgagtgacagcggtatgattgataatcttccagacagcccagacgaggtagccaaggagctggagctgctcgggggatggacagatgacaaaaaagtaccaggcagaatgtacagtaataaccctttctggaatggggtccagaccaatccatttctgaatgggaacgtgcccgtcatgcccagcctggatgagctgaatcccaaaagtactgtggatttgctcctttttgacgcaggtacatcctccttcaccgaatccagctcagccaccacgaatagcactggcaacatcttcgatgagcttccagtcacaaacggactccacgcagagccgccggtcaggcgggacaaccccttcttcagaagcaagcgctcctacagtctctcggaactctccgtcctccaagccaagtccgatgctcccacatcgtcgagtttcttcaccggcttgaaatcacctgcccccgagcaatttcagagccgggaggattttcgaactgcctggctaaaccacaggaagctggcccggtcttgccacgacctggacttgcttggccaaagccctggttggggccagacccaagccgtggagacaaacatcgtgtgcaagctggatagctccgggggtgctgtccagcttcctgacaccagcatcagcatccacgtgcccgagggccacgtcgcccctggggagacccagcagatctccatgaaagccctgctggaccccccgctggagctcaacagtgacaggtcctgcagcatcagccctgtgctggaggtcaagctgagcaacctggaggtgaaaacctctatcatcttggagatgaaagtgtcagccgagataaaaaatgacctttttagcaaaagcacagtgggcctccagtgcctgaggagcgactcgaaggaagggccatatgtctccgtcccgctcaactgcagctgtggggacacggtccaggcacagctgcacaacctggagccctgtatgtacgtggctgtcgtggcccatggcccaagcatcctctacccttccaccgtgtgggacttcatcaataaaaaagtcacagtgggtctctacggccctaaacacatccacccatccttcaagacggtagtgaccatttttgggcatgactgtgccccaaagacgctcctggtcagcgaggtcacacgccaggcacccaaccctgccccggtggccctgcagctgtgggggaagcaccagttcgttttgtccaggccccaggatctcaaggtctgtatgttttccaatatgacgaattacgaggtcaaagccagcgagcaggccaaagtggtgcgaggattccagctgaagctgggcaaggtgagccgcctgatcttccccatcacctcccagaaccccaacgagctctctgacttcacgctgcgggttcaggtgaaggacgaccaggaggccatcctcacccagttttgtgtccagactcctcagccaccccctaaaagtgccatcaagccttccgggcaaaggaggtttctcaagaagaacgaagtcgggaaaatcatcctgtccccgtttgccaccactacaaagtacccgactttccaggaccgcccggtgtccagcctcaagtttggtaagttgctcaagactgtggtgcggcagaacaagaaccactacctgctggagtacaagaagggcgacgggatcgccctgctcagcgaggagcgggtcaggctccggggccagctgtggaccaaggagtggtacatcggctactaccagggcagggtgggcctcgtgcacaccaagaacgtgctggtggtcggcagggcccggcccagcctgtgctcgggccccgagctgagcacctcggtgctgctggagcagatcctgcggccctgcaaattcctcacgtacatctatgcctccgtgaggaccctgctcatggagaacatcagcagctggcgctccttcgctgacgccctgggctacgtgaacctgccgctcacctttttctgccgggcagagctggatagtgagcccgagcgggtggcgtccgtcctagaaaagctgaaggaggactgtaacaacactgagaacaaagaacggaagtccttccagaaggagcttgtgatggccctactgaagatggactgccagggcctggtggtcagactcatccaggactttgtgctcctgaccacggctgtagaggtggcccagcgctggcgggagctggctgagaagctggccaaggtctccaagcagcagatggacgcctacgagtctccccaccgggacaggaacggggttgtggacagcgaggccatgtggaagcctgcgtatgacttcttactcacctggagccatcagatcggggacagctaccgggatgtcatccaggagctgcacctgggcctggacaagatgaaaaaccccatcaccaagcgctggaagcacctcactgggactctgatcttggtgaactccctggacgttctgagagcagccgccttcagccctgcggaccaggacgacttcgtgatttgaatgggtcccctcccctcctgctgctctggagtgcaagccctcttctgccctgcgtgccctgctgtcaccgcggagctgaagagggaggaaggggcggctgctcagacagatttagggcccgccagctaggctacacccatcatgcgccgccctcctccatcgagggagaggcctgaagggactgcctactgcagctcgttgccaatcacatagctttctatttgttaagtataaatttaaatttaaaatcacttttttaacgaatggggggaagggatctatgagaaaggtggtatctaatttttttatggaccataaaggtttaaaagaaaataggggcacaggctgttgaggtttttatgttgttatagacctttttaaattatgttagagatgtatataggtatttaaaggtcactgggagcgtttctgattcccggccacactttgcatttcaacactcagcccggaaagatgctcgttcggttgttggacctctttcactccctgcgtgtaagaaggtgaatcacgtgggaaaaagtggcttttcagtaaacgggtacagctcattctttctgagaaggccccaggtcctgctccctcctcggatttgattgtcttccgtgctttgcctcactcgtagtaaatgaccatccatagaatatgtgaatctttggtgagcttcagtgggcagagtgaagtcccgcattagcatttaggtgccctgagctgtttctgccaatagattagaaagcagccatgagttgacagtctttagggcccctgccagtgtgcaattagtcattgacaagaacaatgccatttgagagtgaggtggtccctgctgctacgaggccattgtactgttttttccttgaggtcaaagcagtgcttcccatagagtttgctgcctcttctgtggacaggaagaaaacttcatgaccgaatcagagccttggtggccactgactctcgtgcttattgcagatgctgtggttggcctcacaagcaacgccttatgctgatgtgcagaggtgccagctgccatttgccaaactctgcatttcatttcatctaaggcttaacccctcttccttcctggtgtacctgtgtctcctcggaaggaagtcatagtttagatgaaaccattttttgtacaatgtaaagatcatctgagcaagatgagcattttgtaaaaatgaaaatgtgactcacataaaatcaggaacttgacacagtgttgcattaataactttagggtgcagacatgctgtgtgaatctcacaatgcgtcgtagatgtcgcgtgttggaagggagcaggaggaaggactgatactggcaaatcagtagagtgaggtgatccttagcaacgtgccaggacacttcctgtgtgcctgcagttgtcagggaccatttgggatcccgaatctcattctctaaaactgctttcttgaaacatgttacttccttagtataatcaatgtatactcccttactggcctgaaacgttgtatagctacttattcagatactgaagaccaacggactgaaaaaaagaacaaacattagctattttatgctgcaagaaccaggacacacaattcgccaatcatcccaccatataaccttcgattgtgcttctcaactccaccccataatttctcccagagaccatctatcaccttttccccaaagaagaaacaaaaccagttgcaccttaaaccatggatattttttcctcaggggctttaaatagtttcctatgcaacgtgtcttgtagcacaaataaaattctacaaaagttgcagtaaattttatttggatattttaacctgttaagtgtgtgtgtgttttctgtacccaaccagactttaaataaaacaaacatgaaacctaa

SEQ ID NO: 299852 - DNA, 5231 bp, Artificial Sequence
  derived and/or modified sequence
accttaagagggacaactgaaacagagacaagcaccccaacagtagggtgcttcgaggtcctggaggggagccctggccctgtggagagagaccgagtcgtgcagcgtccgtggcctgcatttgaaactgaagggcaagaggctggtgagatccgagagtcatgccgctgcgtggaggaacatgctgaacctctggaggaacggctctacctccaggtcaggctggaggcttttgcatttggtttggcgaggagagacagcaggatttctgggtgccggacatgcttctcggtcagagctgcgtctcccttctctcctggacagaaggccgtgtcctgggacttctctgatggcgagaggctgcggctgtaccaggaagaaacatattgccgagtggatgccgccgcgcagcgtgtttgcttgaggcagaagcttcagcatctgctgggataactggaggaagaaatatgaagccttagcggctttacccgggaagcgagtttcgagatggcggctcagcggatccgagcggccaactccaatggcctccctcgctgcaagtcagaggggaccctgattgacctgagcgaagggttttcagagacgagctttaatgacatcaaagtgccttctcccagtgccttgctcgtagacaaccccacacctttcggaaatgcaaaggaagtgattgcgatcaaggactattgccccaccaacttcaccacactgaagttctccaagggcgaccatctctacgtcttggacacatctggcggtgagtggtggtacgcacacaacaccaccgaaatgggctacatcccctcctcctatgtgcagcccttgaactaccggaactcaacactgagtgacagcggtatgattgataatcttccagacagcccagacgaggtagccaaggagctggagctgctcgggggatggacagatgacaaaaaagtaccaggcagaatgtacagtaataaccctttctggaatggggtccagaccaatccatttctgaatgggaacgtgcccgtcatgcccagcctggatgagctgaatcccaaaagtactgtggatttgctcctttttgacgcaggtacatcctccttcaccgaatccagctcagccaccacgaatagcactggcaacatcttcgatgagcttccagtcacaaacggactccacgcagagccgccggtcaggcgggacaaccccttcttcagaagcaagcgctcctacagtctctcggaactctccgtcctccaagccaagtccgatgctcccacatcgtcgagtttcttcaccggcttgaaatcacctgcccccgagcaatttcagagccgggaggattttcgaactgcctggctaaaccacaggaagctggcccggtcttgccacgacctggacttgcttggccaaagccctggttggggccagacccaagccgtggagacaaacatcgtgtgcaagctggatagctccgggggtgctgtccagcttcctgacaccagcatcagcatccacgtgcccgagggccacgtcgcccctggggagacccagcagatctccatgaaagccctgctggaccccccgctggagctcaacagtgacaggtcctgcagcatcagccctgtgctggaggtcaagctgagcaacctggaggtgaaaacctctatcatcttggagatgaaagtgtcagccgagataaaaaatgacctttttagcaaaagcacagtgggcctccagtgcctgaggagcgactcgaaggaagggccatatgtctccgtcccgctcaactgcagctgtggggacacggtccaggcacagctgcacaacctggagccctgtatgtacgtggctgtcgtggcccatggcccaagcatcctctacccttccaccgtgtgggacttcatcaataaaaaagtcacagtgggtctctacggccctaaacacatccacccatccttcaagacggtagtgaccatttttgggcatgactgtgccccaaagacgctcctggtcagcgaggtcacacgccaggcacccaaccctgccccggtggccctgcagctgtgggggaagcaccagttcgttttgtccaggccccaggatctcaaggtctgtatgttttccaatatgacgaattacgaggtcaaagccagcgagcaggccaaagtggtgcgaggattccagctgaagctgggcaaggtgagccgcctgatcttccccatcacctcccagaaccccaacgagctctctgacttcacgctgcgggttcaggtgaaggacgaccaggaggccatcctcacccagttttgtgtccagactcctcagccaccccctaaaagtgccatcaagccttccgggcaaaggaggtttctcaagaagaacgaagtcgggaaaatcatcctgtccccgtttgccaccactacaaagtacccgactttccaggaccgcccggtgtccagcctcaagtttggtaagttgctcaagactgtggtgcggcagaacaagaaccactacctgctggagtacaagaagggcgacgggatcgccctgctcagcgaggagcgggtcaggctccggggccagctgtggaccaaggagtggtacatcggctactaccagggcagggtgggcctcgtgcacaccaagaacgtgctggtggtcggcagggcccggcccagcctgtgctcgggccccgagctgagcacctcggtgctgctggagcagatcctgcggccctgcaaattcctcacgtacatctatgcctccgtgaggaccctgctcatggagaacatcagcagctggcgctccttcgctgacgccctgggctacgtgaacctgccgctcacctttttctgccgggcagagctggatagtgagcccgagcgggtggcgtccgtcctagaaaagctgaaggaggactgtaacaacactgagaacaaagaacggaagtccttccagaaggagcttgtgatggccctactgaagatggactgccagggcctggtggtcagactcatccaggactttgtgctcctgaccacggctgtagaggtggcccagcgctggcgggagctggctgagaagctggccaaggtctccaagcagcagatggacgcctacgagtctccccaccgggacaggaacggggttgtggacagcgaggccatgtggaagcctgcgtatgacttcttactcacctggagccatcagatcggggacagctaccgggatgtcatccaggagctgcacctgggcctggacaagatgaaaaaccccatcaccaagcgctggaagcacctcactgggactctgatcttggtgaactccctggacgttctgagagcagccgccttcagccctgcggaccaggacgacttcgtgatttgaatgggtcccctcccctcctgctgctctggagtgcaagccctcttctgccctgcgtgccctgctgtcaccgcggagctgaagagggaggaaggggcggctgctcagacagatttagggcccgccagctaggctacacccatcatgcgccgccctcctccatcgagggagaggcctgaagggactgcctactgcagctcgttgccaatcacatagctttctatttgttaagtataaatttaaatttaaaatcacttttttaacgaatggggggaagggatctatgagaaaggtggtatctaatttttttatggaccataaaggtttaaaagaaaataggggcacaggctgttgaggtttttatgttgttatagacctttttaaattatgttagagatgtatataggtatttaaaggtcactgggagcgtttctgattcccggccacactttgcatttcaacactcagcccggaaagatgctcgttcggttgttggacctctttcactccctgcgtgtaagaaggtgaatcacgtgggaaaaagtggcttttcagtaaacgggtacagctcattctttctgagaaggccccaggtcctgctccctcctcggatttgattgtcttccgtgctttgcctcactcgtagtaaatgaccatccatagaatatgtgaatctttggtgagcttcagtgggcagagtgaagtcccgcattagcatttaggtgccctgagctgtttctgccaatagattagaaagcagccatgagttgacagtctttagggcccctgccagtgtgcaattagtcattgacaagaacaatgccatttgagagtgaggtggtccctgctgctacgaggccattgtactgttttttccttgaggtcaaagcagtgcttcccatagagtttgctgcctcttctgtggacaggaagaaaacttcatgaccgaatcagagccttggtggccactgactctcgtgcttattgcagatgctgtggttggcctcacaagcaacgccttatgctgatgtgcagaggtgccagctgccatttgccaaactctgcatttcatttcatctaaggcttaacccctcttccttcctggtgtacctgtgtctcctcggaaggaagtcatagtttagatgaaaccattttttgtacaatgtaaagatcatctgagcaagatgagcattttgtaaaaatgaaaatgtgactcacataaaatcaggaacttgacacagtgttgcattaataactttagggtgcagacatgctgtgtgaatctcacaatgcgtcgtagatgtcgcgtgttggaagggagcaggaggaaggactgatactggcaaatcagtagagtgaggtgatccttagcaacgtgccaggacacttcctgtgtgcctgcagttgtcagggaccatttgggatcccgaatctcattctctaaaactgctttcttgaaacatgttacttccttagtataatcaatgtatactcccttactggcctgaaacgttgtatagctacttattcagatactgaagaccaacggactgaaaaaaagaacaaacattagctattttatgctgcaagaaccaggacacacaattcgccaatcatcccaccatataaccttcgattgtgcttctcaactccaccccataatttctcccagagaccatctatcaccttttccccaaagaagaaacaaaaccagttgcaccttaaaccatggatattttttcctcaggggctttaaatagtttcctatgcaacgtgtcttgtagcacaaataaaattctacaaaagttgcagtaaattttatttggatattttaa

SEQ ID NO: 299853 - DNA, 593 bp, Artificial Sequence
  derived and/or modified sequence
gtgagtcccgcggagccgcgcgcgcccccggctgggccgagccgctggccgacgagcggagcctcaggagccggcggggacgccatgcgagccaggaagaaacatattgccgagtggatgccgccgcgcagcgtgtttgcttgaggcagaagcttcagcatctgctgggataactggaggaagaaatatgaagccttagcggctttacccgggaagcgagtttcgagatggcggctcagcggatccgagcggccaactccaatggcctccctcgctgcaagtcagaggggaccctgattgacctgagcgaagggttttcagagacgagctttaatgacatcaaagtgccttctcccagtgccttgctcgtagacaaccccacacctttcggaaatgcaaaggaagtgattgcgatcaaggactattgccccaccaacttcaccacactgaagttctccaagggcgaccatctctacgtcttggacacatctggcggtgagtggtggtacgcacacaacaccaccgaaatgggctacatcccctcctcctatgtgcagcccttgaactaccggaactcaacactgagtgacagc

SEQ ID NO: 299854 - DNA, 2055 bp, Artificial Sequence
  derived and/or modified sequence
gggaccaccctccgcccgccgaggcgggggcccagcgcgcccggcactctcggcggtccgggcccctcgccactaccgccgccgccgccgccgtgagtcccgcggagccgcgcgcgcccccggctgggccgagccgctggccgacgagcggagcctcaggagccggcggggacgccatgcgagccagcgtctcccttctctcctggacagaaggccgtgtcctgggacttctctgatggcgagaggctgcggctgtaccaggaagaaacatattgccgagtggatgccgccgcgcagcgtgtttgcttgaggcagaagcttcagcatctgctgggataactggaggaagaaatatgaagccttagcggctttacccgggaagcgagtttcgagatggcggctcagcggatccgagcggccaactccaatggcctccctcgctgcaagtcagaggggaccctgattgacctgagcgaagggttttcagagacgagctttaatgacatcaaagtgccttctcccagtgccttgctcgtagacaaccccacacctttcggaaatgcaaaggaagtgattgcgatcaaggactattgccccaccaacttcaccacactgaagttctccaagggcgaccatctctacgtcttggacacatctggcggtgagtggtggtacgcacacaacaccaccgaaatgggctacatcccctcctcctatgtgcagcccttgaactaccggaactcaacactgagtgacagcggtatgattgataatcttccagacagcccagacgaggtagccaaggagctggagctgctcgggggatggacagatgacaaaaaagtaccaggcagaatgtacagtaataaccctttctggaatggggtccagaccaatccatttctgaatgggaacgtgcccgtcatgcccagcctggatgagctgaatcccaaaagtactgtggatttgctcctttttgacgcaggtacatcctccttcaccgaatccagctcagccaccacgaatagcactggcaacatcttcgatgagcttccagtcacaaacggactccacgcagagccgccggtcaggcgggacaaccccttcttcagaagcaagcgctcctacagtctctcggaactctccgtcctccaagccaagtccgatgctcccacatcgtcgagtttcttcaccggcttgaaatcacctgcccccgagcaatttcagagccgggaggattttcgaactgcctggctaaaccacaggaagctggcccggtcttgccacgacctggacttgcttggccaaagccctggttggggccagacccaagccgtggagacaaacatcgtgtgcaagctggatagctccgggggtgctgtccagcttcctgacaccagcatcagcatccacgtgcccgagggccacgtcgcccctggggagacccagcagatctccatgaaagccctgctggaccccccgctggagctcaacagtgacaggtcctgcagcatcagccctgtgctggaggtcaagctgagcaacctggaggtgaaaacctctatcatcttggagatgaaagtgtcagccgagataaaaaatgacctttttagcaaaagcacagtgggcctccagtgcctgaggagcgactcgaaggaagggccatatgtctccgtcccgctcaactgcagctgtggggacacggtccaggcacagctgcacaacctggagccctgtatgtacgtggctgtcgtggcccatggcccaagcatcctctacccttccaccgtgtgggacttcatcaataaaaaagtcacagtgggtctctacggccctaaacacatccacccatccttcaagacggtagtgaccatttttgggcatgactgtgccccaaagacgctcctggtcagcgaggtcacacgccaggcacccaaccctcccatcaccaagcgctggaagcacctcactgggactctgatcttggtgaactccctggacgttctgagagcagccgccttcagccctgcggaccaggacgacttcgtgatttga

SEQ ID NO: 299855 - DNA, 570 bp, Artificial Sequence
  derived and/or modified sequence
aacagagacaagcaccccaacagtagggtgcttcgaggtcctggaggggagccctggccctgtggagagagaccgagtcgtgcagcgtccgtggcctgcatttgaaactgaagggcaagaggctggtgagatccgagagtcatgccgctgcgtggaggaacatgctgaacctctggaggaacggctctacctccagcgtctcccttctctcctggacagaaggccgtgtcctgggacttctctgatggcgagaggctgcggctgtaccaggaagaaacatattgccgagtggatgccgccgcgcagcgtgtttgcttgaggcagaagcttcagcatctgctgggataactggaggaagaaatatgaagccttagcggctttacccgggaagcgagtttcgagatggcggctcagcggatccgagcggccaactccaatggcctccctcgctgcaagtcagaggggaccctgattgacctgagcgaagggttttcagagacgagctttaatgacatcaaagtgccttctcccagtgccttgctcgtagacaaccccacacctttcggaaat

SEQ ID NO: 299856 - DNA, 829 bp, Artificial Sequence
  derived and/or modified sequence
cgcagttggctggtgtttgtttgcacaaggattctttggtaacaatctgcagtcggtttctggcggaatgtgaggtgaagtcacgactgactttcgggatggagcgtctcccttctctcctggacagaaggccgtgtcctgggacttctctgatggcgagaggctgcggctgtaccaggaagaaacatattgccgagtggatgccgccgcgcagcgtgtttgcttgaggcagaagcttcagcatctgctgggataactggaggaagaaatatgaagccttagcggctttacccgggaagcgagtttcgagatggcggctcagcggatccgagcggccaactccaatggcctccctcgctgcaagtcagaggggaccctgattgacctgagcgaagggttttcagagacgagctttaatgacatcaaagtgccttctcccagtgccttgctcgtagacaaccccacacctttcggaaatgcaaaggaagtgattgcgatcaaggactattgccccaccaacttcaccacactgaagttctccaagggcgaccatctctacgtcttggacacatctggcggtgagtggtggtacgcacacaacaccaccgaaatgggctacatcccctcctcctatgtgcagcccttgaactaccggaactcaacactgagtgacagcggtatgattgataatcttccagacagcccagacgaggtagccaaggagctggagctgctcgggggatggacagatgacaaaaaagtaccaggcagaatgtacagtaataaccctttctggaatggggtccagaccaatccatttctgaatggg

SEQ ID NO: 299857 - DNA, 500 bp, Artificial Sequence
  derived and/or modified sequence
agcacagcagcaggggaagaggacagtgaggctgggatgcagcctccatgcagcctgtcgctttctccacaggagctctggcctgggccagactgccgagtcaccctgattcaggagtaggcgtctcccttctctcctggacagaaggccgtgtcctgggacttctctgatggcgagaggctgcggctgtaccaggaagaaacatattgccgagtggatgccgccgcgcagcgtgtttgcttgaggcagaagcttcagcatctgctgggataactggaggaagaaatatgaagccttagcggctttacccgggaagcgagtttcgagatggcggctcagcggatccgagcggccaactccaatggcctccctcgctgcaagtcagaggggaccctgattgacctgagcgaagggttttcagagacgagctttaatgacatcaaagtgccttctcccagtgccttgctcgtagacaaccccacacctttcggaaatgcaaa

SEQ ID NO: 299858 - DNA, 1766 bp, Artificial Sequence
  derived and/or modified sequence
acatccacccatccttcaagacggtagtgaccatttttgggcatgactgtgccccaaagacgctcctggtcagcgaggtcacacgccaggcacccaaccctgccccggtggccctgcagctgtgggggaagcaccagttcgttttgtccaggccccaggatctcaaggtctgtatgttttccaatatgacgaattacgaggtcaaagccagcgagcaggccaaagtggtgcgaggattccagctgaagctgggcaaggtgagccgcctgatcttccccatcacctcccagaaccccaacgagctctctgacttcacgctgcgggttcaggtgaaggacgaccaggaggccatcctcacccagttttgtgtccagactcctcagccaccccctaaaagtgccatcaagccttccgggcaaaggaggtttctcaagaagaacgaagtcgggaaaatcatcctgtccccgtttgccaccactacaaagtacccgactttccaggaccgcccggtgtccagcctcaagtttggtaagttgctcaagactgtggtgcggcagaggagcgggtcaggctccggggccagctgtggaccaaggagtggtacatcggctactaccagggcagggtgggcctcgtgcacaccaagaacgtgctggtggtcggcagggcccggcccagcctgtgctcgggccccgagctgagcacctcggtgctgctggagcagatcctgcggccctgcaaattcctcacgtacatctatgcctccgtgaggaccctgctcatggagaacatcagcagctggcgctccttcgctgacgccctgggctacgtgaacctgccgctcacctttttctgccgggcagagctggatagtgagcccgagcgggtggcgtccgtcctagaaaagctgaaggaggactgtaacaacactgagaacaaagaacggaagtccttccagaaggagcttgtgatggccctactgaagatggactgccagggcctggtggtcagactcatccaggactttgtgctcctgaccacggctgtagaggtggcccagcgctggcgggagctggctgagaagctggccaaggtctccaagcagcagatggacgcctacgagtctccccaccgggacaggaacggggttgtggacagcgaggccatgtggaagcctgcgtatgacttcttactcacctggagccatcagatcggggacagctaccgggatgtcatccaggagctgcacctgggcctggacaagatgaaaaaccccatcaccaagcgctggaagcacctcactgggactctgatcttggtgaactccctggacgttctgagagcagccgccttcagccctgcggaccaggacgacttcgtgatttgaatgggtcccctcccctcctgctgctctggagtgcaagccctcttctgccctgcgtgccctgctgtcaccgcggagctgaagagggaggaaggggcggctgctcagacagatttagggcccgccagctaggctacacccatcatgcgccgccctcctccatcgagggagaggcctgaagggactgcctactgcagctcgttgccaatcacatagctttctatttgttaagtataaatttaaatttaaaatcacttttttaacgaatggggggaagggatctatgagaaaggtggtatctaatttttttatggaccataaaggtttaaaagaaaataggggcacaggctgttgaggtttttatgttgttatagaccttttt

SEQ ID NO: 299859 - DNA, 2892 bp, Artificial Sequence
  derived and/or modified sequence
atggccgcccagagaatcagagccgccaacagcaacggcctgcccagatgcaagagcgagggcaccctgatcgacctgagcgagggcttcagcgagaccagcttcaacgacatcaaggtgcccagccccagcgccctgctggtggacaaccccacccccttcggcaacgccaaggaggtgatcgccatcaaggactactgccccaccaacttcaccaccctgaagttcagcaagggcgaccacctgtacgtgctggacaccagcggcggcgagtggtggtacgcccacaacaccaccgagatgggctacatccccagcagctacgtgcagcccctgaactacagaaacagcaccctgagcgacagcggcatgatcgacaacctgcccgacagccccgacgaggtggccaaggagctggagctgctgggcggctggaccgacgacaagaaggtgcccggcagaatgtacagcaacaaccccttctggaacggcgtgcagaccaaccccttcctgaacggcaacgtgcccgtgatgcccagcctggacgagctgaaccccaagagcaccgtggacctgctgctgttcgacgccggcaccagcagcttcaccgagagcagcagcgccaccaccaacagcaccggcaacatcttcgacgagctgcccgtgaccaacggcctgcacgccgagccccccgtgagaagagacaaccccttcttcagaagcaagagaagctacagcctgagcgagctgagcgtgctgcaggccaagagcgacgcccccaccagcagcagcttcttcaccggcctgaagagccccgcccccgagcagttccagagcagagaggacttcagaaccgcctggctgaaccacagaaagctggccagaagctgccacgacctggacctgctgggccagagccccggctggggccagacccaggccgtggagaccaacatcgtgtgcaagctggacagcagcggcggcgccgtgcagctgcccgacaccagcatcagcatccacgtgcccgagggccacgtggcccccggcgagacccagcagatcagcatgaaggccctgctggacccccccctggagctgaacagcgacagaagctgcagcatcagccccgtgctggaggtgaagctgagcaacctggaggtgaagaccagcatcatcctggagatgaaggtgagcgccgagatcaagaacgacctgttcagcaagagcaccgtgggcctgcagtgcctgagaagcgacagcaaggagggcccctacgtgagcgtgcccctgaactgcagctgcggcgacaccgtgcaggcccagctgcacaacctggagccctgcatgtacgtggccgtggtggcccacggccccagcatcctgtaccccagcaccgtgtgggacttcatcaacaagaaggtgaccgtgggcctgtacggccccaagcacatccaccccagcttcaagaccgtggtgaccatcttcggccacgactgcgcccccaagaccctgctggtgagcgaggtgaccagacaggcccccaaccccgcccccgtggccctgcagctgtggggcaagcaccagttcgtgctgagcagaccccaggacctgaaggtgtgcatgttcagcaacatgaccaactacgaggtgaaggccagcgagcaggccaaggtggtgagaggcttccagctgaagctgggcaaggtgagcagactgatcttccccatcaccagccagaaccccaacgagctgagcgacttcaccctgagagtgcaggtgaaggacgaccaggaggccatcctgacccagttctgcgtgcagaccccccagcccccccccaagagcgccatcaagcccagcggccagagaagattcctgaagaagaacgaggtgggcaagatcatcctgagccccttcgccaccaccaccaagtaccccaccttccaggacagacccgtgagcagcctgaagttcggcaagctgctgaagaccgtggtgagacagaacaagaaccactacctgctggagtacaagaagggcgacggcatcgccctgctgagcgaggagagagtgagactgagaggccagctgtggaccaaggagtggtacatcggctactaccagggcagagtgggcctggtgcacaccaagaacgtgctggtggtgggcagagccagacccagcctgtgcagcggccccgagctgagcaccagcgtgctgctggagcagatcctgagaccctgcaagttcctgacctacatctacgccagcgtgagaaccctgctgatggagaacatcagcagctggagaagcttcgccgacgccctgggctacgtgaacctgcccctgaccttcttctgcagagccgagctggacagcgagcccgagagagtggccagcgtgctggagaagctgaaggaggactgcaacaacaccgagaacaaggagagaaagagcttccagaaggagctggtgatggccctgctgaagatggactgccagggcctggtggtgagactgatccaggacttcgtgctgctgaccaccgccgtggaggtggcccagagatggagagagctggccgagaagctggccaaggtgagcaagcagcagatggacgcctacgagagcccccacagagacagaaacggcgtggtggacagcgaggccatgtggaagcccgcctacgacttcctgctgacctggagccaccagatcggcgacagctacagagacgtgatccaggagctgcacctgggcctggacaagatgaagaaccccatcaccaagagatggaagcacctgaccggcaccctgatcctggtgaacagcctggacgtgctgagagccgccgccttcagccccgccgaccaggacgacttcgtgatctag

SEQ ID NO: 299860 - DNA, 369 bp, Artificial Sequence
  derived and/or modified sequence
atggccgcccagagaatcagagccgccaacagcaacggcctgcccagatgcaagagcgagggcaccctgatcgacctgagcgagggcttcagcgagaccagcttcaacgacatcaaggtgcccagccccagcgccctgctggtggacaaccccacccccttcggcaacgccaaggaggtgatcgccatcaaggactactgccccaccaacttcaccaccctgaagttcagcaagggcgaccacctgtacgtgctggacaccagcggcggcgagtggtggtacgcccacaacaccaccgagatgggctacatccccagcagctacgtgcagcccctgaactacagaaacagcaccctgagcgacagctag

SEQ ID NO: 299861 - DNA, 1662 bp, Artificial Sequence
  derived and/or modified sequence
atggccgcccagagaatcagagccgccaacagcaacggcctgcccagatgcaagagcgagggcaccctgatcgacctgagcgagggcttcagcgagaccagcttcaacgacatcaaggtgcccagccccagcgccctgctggtggacaaccccacccccttcggcaacgccaaggaggtgatcgccatcaaggactactgccccaccaacttcaccaccctgaagttcagcaagggcgaccacctgtacgtgctggacaccagcggcggcgagtggtggtacgcccacaacaccaccgagatgggctacatccccagcagctacgtgcagcccctgaactacagaaacagcaccctgagcgacagcggcatgatcgacaacctgcccgacagccccgacgaggtggccaaggagctggagctgctgggcggctggaccgacgacaagaaggtgcccggcagaatgtacagcaacaaccccttctggaacggcgtgcagaccaaccccttcctgaacggcaacgtgcccgtgatgcccagcctggacgagctgaaccccaagagcaccgtggacctgctgctgttcgacgccggcaccagcagcttcaccgagagcagcagcgccaccaccaacagcaccggcaacatcttcgacgagctgcccgtgaccaacggcctgcacgccgagccccccgtgagaagagacaaccccttcttcagaagcaagagaagctacagcctgagcgagctgagcgtgctgcaggccaagagcgacgcccccaccagcagcagcttcttcaccggcctgaagagccccgcccccgagcagttccagagcagagaggacttcagaaccgcctggctgaaccacagaaagctggccagaagctgccacgacctggacctgctgggccagagccccggctggggccagacccaggccgtggagaccaacatcgtgtgcaagctggacagcagcggcggcgccgtgcagctgcccgacaccagcatcagcatccacgtgcccgagggccacgtggcccccggcgagacccagcagatcagcatgaaggccctgctggacccccccctggagctgaacagcgacagaagctgcagcatcagccccgtgctggaggtgaagctgagcaacctggaggtgaagaccagcatcatcctggagatgaaggtgagcgccgagatcaagaacgacctgttcagcaagagcaccgtgggcctgcagtgcctgagaagcgacagcaaggagggcccctacgtgagcgtgcccctgaactgcagctgcggcgacaccgtgcaggcccagctgcacaacctggagccctgcatgtacgtggccgtggtggcccacggccccagcatcctgtaccccagcaccgtgtgggacttcatcaacaagaaggtgaccgtgggcctgtacggccccaagcacatccaccccagcttcaagaccgtggtgaccatcttcggccacgactgcgcccccaagaccctgctggtgagcgaggtgaccagacaggcccccaacccccccatcaccaagagatggaagcacctgaccggcaccctgatcctggtgaacagcctggacgtgctgagagccgccgccttcagccccgccgaccaggacgacttcgtgatctag

SEQ ID NO: 299862 - DNA, 171 bp, Artificial Sequence
  derived and/or modified sequence
atggccgcccagagaatcagagccgccaacagcaacggcctgcccagatgcaagagcgagggcaccctgatcgacctgagcgagggcttcagcgagaccagcttcaacgacatcaaggtgcccagccccagcgccctgctggtggacaaccccacccccttcggcaactag

SEQ ID NO: 299863 - DNA, 522 bp, Artificial Sequence
  derived and/or modified sequence
atggccgcccagagaatcagagccgccaacagcaacggcctgcccagatgcaagagcgagggcaccctgatcgacctgagcgagggcttcagcgagaccagcttcaacgacatcaaggtgcccagccccagcgccctgctggtggacaaccccacccccttcggcaacgccaaggaggtgatcgccatcaaggactactgccccaccaacttcaccaccctgaagttcagcaagggcgaccacctgtacgtgctggacaccagcggcggcgagtggtggtacgcccacaacaccaccgagatgggctacatccccagcagctacgtgcagcccctgaactacagaaacagcaccctgagcgacagcggcatgatcgacaacctgcccgacagccccgacgaggtggccaaggagctggagctgctgggcggctggaccgacgacaagaaggtgcccggcagaatgtacagcaacaaccccttctggaacggcgtgcagaccaaccccttcctgaacggctag

SEQ ID NO: 299864 - DNA, 174 bp, Artificial Sequence
  derived and/or modified sequence
atggccgcccagagaatcagagccgccaacagcaacggcctgcccagatgcaagagcgagggcaccctgatcgacctgagcgagggcttcagcgagaccagcttcaacgacatcaaggtgcccagccccagcgccctgctggtggacaaccccacccccttcggcaacgcctag

SEQ ID NO: 299865 - DNA, 606 bp, Artificial Sequence
  derived and/or modified sequence
atggagaacatcagcagctggagaagcttcgccgacgccctgggctacgtgaacctgcccctgaccttcttctgcagagccgagctggacagcgagcccgagagagtggccagcgtgctggagaagctgaaggaggactgcaacaacaccgagaacaaggagagaaagagcttccagaaggagctggtgatggccctgctgaagatggactgccagggcctggtggtgagactgatccaggacttcgtgctgctgaccaccgccgtggaggtggcccagagatggagagagctggccgagaagctggccaaggtgagcaagcagcagatggacgcctacgagagcccccacagagacagaaacggcgtggtggacagcgaggccatgtggaagcccgcctacgacttcctgctgacctggagccaccagatcggcgacagctacagagacgtgatccaggagctgcacctgggcctggacaagatgaagaaccccatcaccaagagatggaagcacctgaccggcaccctgatcctggtgaacagcctggacgtgctgagagccgccgccttcagccccgccgaccaggacgacttcgtgatctag

SEQ ID NO: 299866 - DNA, 99 bp, Artificial Sequence
  derived and/or modified sequence
atcataacgacaagaacaaattcacacacaacaatattcacttcaaatccaaatgggttaaatgctccaattaaaggatgcagacgggcaaattggata

SEQ ID NO: 299867 - protein, 1925 aa, Artificial Sequence
  derived and/or modified sequence
MFTLTGCRLVEKTQKVENPSVSFASSFPLIPLLLRGKSVQKKQAESKSQIKLHTQSAPFGLCPKDMMLTQAPSSVVRSRNSRNHTVNSGGSCLSASTVAIPAINDSSAAMSACSTISAQPASSMDTQMHSPKKQERVNKRVIWGIEVAEELHWKGWELGKETTRNLVLKNRSLKLQKMKYRPPKTKFFFTVIPQPIFLSPGITLTLPIVFRPLEAKEYMDQLWFEKAEGMFCVGLRATLPCHRLICRPPSLQLPMCAVGDTTEAFFCLDNVGDLPTFFTWEFSSPFQMLPATGLLEPGQASQIKVTFQPLTAVIYEVQATCWYGAGSRQRSSIQLQAVAKCAQLLVSIKHKCPEDQDAEGFQKLLYFGSVAVGCTSERQIRLHNPSAVNAPFRIEISPDELAEDQAFSCPTAHGIVLPGEKKCVSVFFHPKTLDTRTVDYCSIMPSGCASKTLLKVVGFCRGPAVSLQHYCVNFSWVNLGERSEQPLWIENQSDCTAHFQFAIDCLESVFTIRPAFGTLVGKARMTLHCAFQPTHPIICFRRVACLIHHQDPLFLDLMGTCHSDSTKPAILKPQHLTWYRTHLARGLTLYPPDILDAMLKEKKLAQDQNGALMIPIQDLEDMPAPQYPYIPPMTEFFFDGTSDITIFPPPISVEPVEVDFGACPGPEAPNPVPLCLMNHTKGKIMVVWTRRSDCPFWVTPESCDVPPLKSMAMRLHFQPPHPNCLYTVELEAFAIYKVLQSYSNIEEDCTMCPSWCLTVRARGHSYFAGFEHHIPQYSLDVPKLFPAVSSGEPTYRSLLLVNKDCKLLTFSLAPQRGSDVILRPTSGLVAPGAHQIILICTYPEGSSWKQHTFYLQCNASPQYLKEVSMYSREEPLQLKLDTHKSLYFKPTWVGCSSTSPFTFRNPSRLPLQFEWRVSEQHRKLLAVQPSRGLIQPNERLTLTWTFSPLEETKYLFQVGMWVWEAGLSPNANPAATTHYMLRLVGVGLTSSLSAKEKELAFGNVLVNSKQSRFLVLLNDGNCTLYYRLYLEQGSPEAVDNHPLALQLDRTEGSMPPRSQDTICLTACPKQRSQYSWTITYSLLSHRDNKAGEKQELCCVSLVAVYPLLSILDVSSMGSAEGITRKHLWRLFSLDLLNSYLERDPTPCELTYKVPTRHSMSQIPPVLTPLRLDFNFGAAPFKAPPSVVFLALKNSGVVSLDWAFLLPSDQRIDVELWAEQAELNSTELHQMRVQDNCLFSISPKAGSLSPGQEQMVELKYSHLFIGTDHLPVLFKVSHGREILLNFIGVTVKPEQKYVHFTSTTHQFIPIPIGDTLPPRQIYELYNGGSVPVTYEVQTDVLSQVQEKNFDHPIFCCLNPKGEIQPGSTARVLWIFSPIEAKTYTVDVPIHILGWNSALIHFQGVGYNPHMMGDTAPFHNISSWDNSSIHSRLVVPGQNVFLSQSHISLGNIPVQSKCSRLLFLNNISKNEEIAFSWQPSPLDFGEVSVSPMIGVVAPEETVPFVVTLRASVHASFYSADLVCKLYSQQLMRQYHKELQEWKDEKVRQEVEFTITDMKVKKRTCCTACEPARKYKTLPPIKNQQSVSRPASWKLQTPKEEVSWPCPQPPSPGMLCLGLTARAHATDYFLANFFSEFPCHFLHRELPKRKAPREESETSEEKSPNKWGPVSKQKKQLLVDILTTIIRGLLEDKNFHEAVDQSLVEQVPYFRQFWNEQSTKFMDQKNSLYLMPILPVPSSSWEDGKGKQPKEDRPEHYPGLGKKEEGEEEKGEEEEEELEEEEEEEEETEEEELGKEEIEEKEEERDEKEEKVSWAGIGPTPQPESQESMQWQWQQQLNVMVKEEQEQDEKEAIRRLPAFANLQEALLENMIQNILVEASRGEVVLTSRPRVIALPPFCVPRSLTPDTLLPTQQAEVLHPVVPLPTDLP

SEQ ID NO: 299868 - DNA, 5953 bp, Artificial Sequence
  derived and/or modified sequence
gtcctgtatctatggagacggcaatatggaggcgatcttacatttctttgatttcatctgaacgtccagttcacaattggagtgatgtttaccttaaccggttgtagactggtggagaaaacccagaaggtggagaatccatcagtctcatttgcctcttctttcccccttattcctcttctcctaagaggcaagagtgttcagaagaaacaagcagagagtaaaagccagataaagctccatactcagagtgctccctttggactgtgtcccaaggacatgatgctcacccaggctccaagctccgtcgtgaggtccaggaacagcaggaaccacaccgtgaactctggtggatcctgcctgagtgccagcacagtggccatccctgccatcaacgacagcagtgcagccatgagtgcctgcagcaccatcagcgcccagcccgcaagctccatggacactcagatgcactccccaaagaagcaggagagagtgaacaagagggtcatctggggcattgaggtggctgaggagctgcattggaaaggctgggagctaggaaaggagaccacaaggaatctggttctgaaaaatcgatccttgaaactccagaagatgaagtacaggccccccaagaccaagttcttcttcacggtcatccctcagcccatcttcctgagcccaggcataaccctcacgctccccatcgtcttccggcctctggaggcgaaggagtacatggaccagctgtggtttgagaaagcggaggggatgttctgtgtcggcctacgggccaccctgccctgccacaggctgatctgccgcccaccatccctgcagctgcccatgtgtgctgtgggagatacgactgaggcctttttctgcctggataatgtgggggacctgcccaccttcttcacctgggagttctccagcccattccagatgctgcccgccacggggctcctggagccaggccaggcctctcagatcaaggtgacctttcagccccttacagccgtcatctacgaggtgcaggccacgtgctggtacggggcgggcagccggcagaggagcagcatccagctgcaggctgtggccaagtgcgcccagctgctggtgagcataaagcacaagtgcccggaggaccaggatgccgagggcttccagaagctgttgtactttggctctgttgctgtgggctgcacctcggagaggcagatcaggctacacaacccgtcggcggtaaatgcccccttcaggattgaaatttccccggatgaactggccgaagaccaggccttctcatgccccacggcccatggcatcgtgcttccgggagagaagaaatgtgtgtcggtgttcttccaccccaagactctggacaccagaactgtggactactgctccatcatgccttctggctgtgcctccaagaccctgcttaaagtcgttggtttctgtagaggccctgctgtgtccctgcagcactactgtgtcaacttcagctgggtcaaccttggggagcgctccgagcagcccctgtggattgagaaccaatcggactgcacggcccacttccagtttgccatcgactgcttggagagtgtctttaccatcaggcctgcctttgggacgctggtgggcaaggcccgtatgaccctgcactgtgccttccagcccactcaccccatcatctgctttcggcgtgtggcctgtctcatccaccaccaggacccactgttcctggacctgatggggacctgccactcggacagcaccaagccagccatcctgaagcctcagcacctcacctggtaccgcacacacctggcccggggcctgacgctctacccccctgacatcctggatgccatgctgaaggagaagaagctggcacaggaccagaacggggctctcatgattcccatccaggatctggaggacatgccggccccgcagtacccttatatcccccccatgaccgagttcttcttcgacggcaccagcgacataaccatcttccccccgcccatcagtgtagagcctgtcgaggtagacttcggtgcctgcccagggcctgaggcccccaaccctgtacccctgtgcctgatgaaccacaccaagggcaagatcatggtggtctggacgcgaaggtctgactgccccttctgggtgactccagagagctgcgacgtgcccccactcaagtccatggccatgcgcctgcacttccagccgcctcaccccaactgcctttacacggtggagctcgaagccttcgccatctataaggtcctgcagagctacagtaatattgaggaggactgcaccatgtgcccatcctggtgcctgacggtgcgggcacgaggccacagctatttcgctggctttgagcaccacatcccccagtattccctagatgtccccaagctatttccagcagtgtcctccggtgagcccacctaccgcagcctgctcctggtcaacaaagactgcaagctgctgaccttcagcctggccccccagagaggctcagacgtcatccttcggcccacttcgggccttgtggcacccggggcccaccagatcatcctcatctgcacctaccctgagggcagctcctggaagcagcacactttctatctgcagtgcaatgcttccccccagtatctcaaggaggtgagcatgtacagccgggaggagccactgcagctgaagctggacacccacaaaagcctctacttcaagcccacctgggtgggctgctcctccaccagccccttcaccttccgcaacccctcgcgtctgcccctgcagttcgagtggagggtctctgagcagcatcgaaagctgctggctgtccagccctccagggggctaatccagcccaacgagagacttacgctgacgtggaccttcagccctttggaggagaccaagtacctgttccaagtggggatgtgggtctgggaagccggcctgtccccaaatgccaaccccgctgccaccacccactacatgctccggctggtgggcgttgggctcaccagcagcctctctgcaaaggaaaaggagctggcctttgggaatgtgctggtgaacagcaagcagtccaggttccttgtcctcctgaatgacggcaactgcaccctctattaccgcctctacctggagcagggcagccctgaggccgttgacaaccaccccctcgctctgcagctggaccgaacagaggggagcatgccaccccggtcccaggacaccatctgcctgactgcctgtcccaagcagcggtcccagtactcctggaccatcacctactctctcctttcccacagagataacaaggctggggagaagcaggagctgtgctgcgtctccctggtggccgtgtaccccttgctttccatcctggatgtcagctccatgggcagtgctgagggtatcacccggaagcacctgtggcgcctcttctctctggacctgcttaacagttacttggagcgtgaccccaccccctgtgagctcacctacaaggtgcccacccggcacagcatgagccagatcccccccgtcctcacccctttaaggcttgacttcaatttcggggccgcaccattcaaggccccaccttccgtggtattcctggccctgaagaacagcggagtggtgtccctggactgggccttcctccttccaagtgaccagcggattgacgtggagctctgggcagagcaagcagagttgaattccactgagctccaccagatgcgcgtgcaggacaattgcctcttctccatcagccccaaggctgggagcctgagtcctgggcaggagcagatggtggagttaaaatacagccacctgttcatcggtactgatcacctcccagtgctcttcaaggtgtcccatggccgggagatcctgctaaatttcataggtgtgacagtgaagccggagcagaagtatgtgcacttcacctctactacccaccagttcatccccattcccattggtgacacgctacccccacggcagatttatgagctgtataatggtggctcagtgcccgtgacatatgaggtccagaccgatgtcctgtcacaggttcaggaaaaaaattttgatcaccccatcttttgctgcctcaaccccaaaggggagatccagccaggcagcactgcccgggtcttgtggatcttctcacctatcgaggccaagacctacacggtggacgtgcccatacacatcctgggatggaactcggccctcatccacttccagggagtgggctacaacccccatatgatgggggacacagccccattccacaacatctcctcgtgggacaacagttccatacactctaggctggtggtgcctggacagaatgtcttcctgtcccagtctcatatttccctgggaaacatacctgtgcagagcaagtgcagccgcctgctcttcctcaacaacatctccaagaacgaggaaattgccttctcctggcagccaagtcctctagattttggggaggtgtctgtgagtcccatgataggggtggtggctcctgaagagacggtcccatttgtggtgaccttgagggcctctgtgcatgccagcttctacagtgcagacctggtatgcaagctgtactcgcagcagctcatgaggcagtatcacaaggagctgcaggagtggaaggacgagaaggtgcggcaggaagtggagttcaccatcaccgacatgaaagtgaagaagagaacatgctgcacagcctgtgaacctgcgaggaagtacaagacactgcctcccatcaagaaccagcagtctgtcagccggcctgccagctggaaactgcagaccccaaaggaggaggtgtcctggccctgcccccagccaccctcgccaggcatgctctgcctgggccttactgcccgagcccatgccaccgactactttctggctaacttcttctcagagtttccctgccactttttgcaccgggagctgccaaagaggaaggcccccagggaagagtcagagacttctgaggaaaaatcccctaacaagtggggccctgtttccaagcagaagaagcagctcctggttgacattctcaccacaataatcaggggcctgctggaagacaagaacttccatgaggctgtggaccaaagcctggtggagcaggtgccgtacttccgccaattctggaatgagcagtcaactaagttcatggaccagaaaaacagcctgtacttaatgccaatcctgcctgtaccctccagcagctgggaggatgggaagggcaagcagccgaaggaagacagaccagagcactatccagggttgggaaagaaggaagagggggaggaggagaagggtgaagaggaagaagaagagttggaggaggaagaggaggaagaagaggagacagaagaggaggagttgggcaaggaggagatagaggagaaggaggaggagagggatgagaaggaagagaaagtgagctgggcgggcatcgggcccacaccacagcctgagtcccaggagtccatgcaatggcagtggcaacagcagctgaatgtcatggtgaaggaggagcaagaacaggacgagaaggaggccatcagaaggctcccggccttcgccaacctgcaggaggcgctgctggagaacatgatccagaacatcctggtggaggcgagccgcggggaggtggtactcacctcgcggccacgcgtcatcgccctgccgccgttctgcgtgcccaggagtctgaccccggacacgctgctgccgacgcagcaagcagaggtactccacccggtggtgccacttcctaccgaccttccgtaaatgcccgcgcccagcctctccgacatgccgctaggggtcacgcctggccccctctccaccgccagtaaaagcatctagtcttttttctgta

SEQ ID NO: 299869 - DNA, 5945 bp, Artificial Sequence
  derived and/or modified sequence
gtcctgtatctatggagacggcaatatggaggcgatgtaagttctgagcgttagtcccaaggtcccagggtctcaatttcagtgatgtttaccttaaccggttgtagactggtggagaaaacccagaaggtggagaatccatcagtctcatttgcctcttctttcccccttattcctcttctcctaagaggcaagagtgttcagaagaaacaagcagagagtaaaagccagataaagctccatactcagagtgctccctttggactgtgtcccaaggacatgatgctcacccaggctccaagctccgtcgtgaggtccaggaacagcaggaaccacaccgtgaactctggtggatcctgcctgagtgccagcacagtggccatccctgccatcaacgacagcagtgcagccatgagtgcctgcagcaccatcagcgcccagcccgcaagctccatggacactcagatgcactccccaaagaagcaggagagagtgaacaagagggtcatctggggcattgaggtggctgaggagctgcattggaaaggctgggagctaggaaaggagaccacaaggaatctggttctgaaaaatcgatccttgaaactccagaagatgaagtacaggccccccaagaccaagttcttcttcacggtcatccctcagcccatcttcctgagcccaggcataaccctcacgctccccatcgtcttccggcctctggaggcgaaggagtacatggaccagctgtggtttgagaaagcggaggggatgttctgtgtcggcctacgggccaccctgccctgccacaggctgatctgccgcccaccatccctgcagctgcccatgtgtgctgtgggagatacgactgaggcctttttctgcctggataatgtgggggacctgcccaccttcttcacctgggagttctccagcccattccagatgctgcccgccacggggctcctggagccaggccaggcctctcagatcaaggtgacctttcagccccttacagccgtcatctacgaggtgcaggccacgtgctggtacggggcgggcagccggcagaggagcagcatccagctgcaggctgtggccaagtgcgcccagctgctggtgagcataaagcacaagtgcccggaggaccaggatgccgagggcttccagaagctgttgtactttggctctgttgctgtgggctgcacctcggagaggcagatcaggctacacaacccgtcggcggtaaatgcccccttcaggattgaaatttccccggatgaactggccgaagaccaggccttctcatgccccacggcccatggcatcgtgcttccgggagagaagaaatgtgtgtcggtgttcttccaccccaagactctggacaccagaactgtggactactgctccatcatgccttctggctgtgcctccaagaccctgcttaaagtcgttggtttctgtagaggccctgctgtgtccctgcagcactactgtgtcaacttcagctgggtcaaccttggggagcgctccgagcagcccctgtggattgagaaccaatcggactgcacggcccacttccagtttgccatcgactgcttggagagtgtctttaccatcaggcctgcctttgggacgctggtgggcaaggcccgtatgaccctgcactgtgccttccagcccactcaccccatcatctgctttcggcgtgtggcctgtctcatccaccaccaggacccactgttcctggacctgatggggacctgccactcggacagcaccaagccagccatcctgaagcctcagcacctcacctggtaccgcacacacctggcccggggcctgacgctctacccccctgacatcctggatgccatgctgaaggagaagaagctggcacaggaccagaacggggctctcatgattcccatccaggatctggaggacatgccggccccgcagtacccttatatcccccccatgaccgagttcttcttcgacggcaccagcgacataaccatcttccccccgcccatcagtgtagagcctgtcgaggtagacttcggtgcctgcccagggcctgaggcccccaaccctgtacccctgtgcctgatgaaccacaccaagggcaagatcatggtggtctggacgcgaaggtctgactgccccttctgggtgactccagagagctgcgacgtgcccccactcaagtccatggccatgcgcctgcacttccagccgcctcaccccaactgcctttacacggtggagctcgaagccttcgccatctataaggtcctgcagagctacagtaatattgaggaggactgcaccatgtgcccatcctggtgcctgacggtgcgggcacgaggccacagctatttcgctggctttgagcaccacatcccccagtattccctagatgtccccaagctatttccagcagtgtcctccggtgagcccacctaccgcagcctgctcctggtcaacaaagactgcaagctgctgaccttcagcctggccccccagagaggctcagacgtcatccttcggcccacttcgggccttgtggcacccggggcccaccagatcatcctcatctgcacctaccctgagggcagctcctggaagcagcacactttctatctgcagtgcaatgcttccccccagtatctcaaggaggtgagcatgtacagccgggaggagccactgcagctgaagctggacacccacaaaagcctctacttcaagcccacctgggtgggctgctcctccaccagccccttcaccttccgcaacccctcgcgtctgcccctgcagttcgagtggagggtctctgagcagcatcgaaagctgctggctgtccagccctccagggggctaatccagcccaacgagagacttacgctgacgtggaccttcagccctttggaggagaccaagtacctgttccaagtggggatgtgggtctgggaagccggcctgtccccaaatgccaaccccgctgccaccacccactacatgctccggctggtgggcgttgggctcaccagcagcctctctgcaaaggaaaaggagctggcctttgggaatgtgctggtgaacagcaagcagtccaggttccttgtcctcctgaatgacggcaactgcaccctctattaccgcctctacctggagcagggcagccctgaggccgttgacaaccaccccctcgctctgcagctggaccgaacagaggggagcatgccaccccggtcccaggacaccatctgcctgactgcctgtcccaagcagcggtcccagtactcctggaccatcacctactctctcctttcccacagagataacaaggctggggagaagcaggagctgtgctgcgtctccctggtggccgtgtaccccttgctttccatcctggatgtcagctccatgggcagtgctgagggtatcacccggaagcacctgtggcgcctcttctctctggacctgcttaacagttacttggagcgtgaccccaccccctgtgagctcacctacaaggtgcccacccggcacagcatgagccagatcccccccgtcctcacccctttaaggcttgacttcaatttcggggccgcaccattcaaggccccaccttccgtggtattcctggccctgaagaacagcggagtggtgtccctggactgggccttcctccttccaagtgaccagcggattgacgtggagctctgggcagagcaagcagagttgaattccactgagctccaccagatgcgcgtgcaggacaattgcctcttctccatcagccccaaggctgggagcctgagtcctgggcaggagcagatggtggagttaaaatacagccacctgttcatcggtactgatcacctcccagtgctcttcaaggtgtcccatggccgggagatcctgctaaatttcataggtgtgacagtgaagccggagcagaagtatgtgcacttcacctctactacccaccagttcatccccattcccattggtgacacgctacccccacggcagatttatgagctgtataatggtggctcagtgcccgtgacatatgaggtccagaccgatgtcctgtcacaggttcaggaaaaaaattttgatcaccccatcttttgctgcctcaaccccaaaggggagatccagccaggcagcactgcccgggtcttgtggatcttctcacctatcgaggccaagacctacacggtggacgtgcccatacacatcctgggatggaactcggccctcatccacttccagggagtgggctacaacccccatatgatgggggacacagccccattccacaacatctcctcgtgggacaacagttccatacactctaggctggtggtgcctggacagaatgtcttcctgtcccagtctcatatttccctgggaaacatacctgtgcagagcaagtgcagccgcctgctcttcctcaacaacatctccaagaacgaggaaattgccttctcctggcagccaagtcctctagattttggggaggtgtctgtgagtcccatgataggggtggtggctcctgaagagacggtcccatttgtggtgaccttgagggcctctgtgcatgccagcttctacagtgcagacctggtatgcaagctgtactcgcagcagctcatgaggcagtatcacaaggagctgcaggagtggaaggacgagaaggtgcggcaggaagtggagttcaccatcaccgacatgaaagtgaagaagagaacatgctgcacagcctgtgaacctgcgaggaagtacaagacactgcctcccatcaagaaccagcagtctgtcagccggcctgccagctggaaactgcagaccccaaaggaggaggtgtcctggccctgcccccagccaccctcgccaggcatgctctgcctgggccttactgcccgagcccatgccaccgactactttctggctaacttcttctcagagtttccctgccactttttgcaccgggagctgccaaagaggaaggcccccagggaagagtcagagacttctgaggaaaaatcccctaacaagtggggccctgtttccaagcagaagaagcagctcctggttgacattctcaccacaataatcaggggcctgctggaagacaagaacttccatgaggctgtggaccaaagcctggtggagcaggtgccgtacttccgccaattctggaatgagcagtcaactaagttcatggaccagaaaaacagcctgtacttaatgccaatcctgcctgtaccctccagcagctgggaggatgggaagggcaagcagccgaaggaagacagaccagagcactatccagggttgggaaagaaggaagagggggaggaggagaagggtgaagaggaagaagaagagttggaggaggaagaggaggaagaagaggagacagaagaggaggagttgggcaaggaggagatagaggagaaggaggaggagagggatgagaaggaagagaaagtgagctgggcgggcatcgggcccacaccacagcctgagtcccaggagtccatgcaatggcagtggcaacagcagctgaatgtcatggtgaaggaggagcaagaacaggacgagaaggaggccatcagaaggctcccggccttcgccaacctgcaggaggcgctgctggagaacatgatccagaacatcctggtggaggcgagccgcggggaggtggtactcacctcgcggccacgcgtcatcgccctgccgccgttctgcgtgcccaggagtctgaccccggacacgctgctgccgacgcagcaagcagaggtactccacccggtggtgccacttcctaccgaccttccgtaaatgcccgcgcccagcctctccgacatgccgctaggggtcacgcctggccccctctccaccgccagtaaaagcatctagtcttt

SEQ ID NO: 299870 - DNA, 5870 bp, Artificial Sequence
  derived and/or modified sequence
atttcagtgatgtttaccttaaccggttgtagactggtggagaaaacccagaaggtggagaatccatcagtctcatttgcctcttctttcccccttattcctcttctcctaagaggcaagagtgttcagaagaaacaagcagagagtaaaagccagataaagctccatactcagagtgctccctttggactgtgtcccaaggacatgatgctcacccaggctccaagctccgtcgtgaggtccaggaacagcaggaaccacaccgtgaactctggtggatcctgcctgagtgccagcacagtggccatccctgccatcaacgacagcagtgcagccatgagtgcctgcagcaccatcagcgcccagcccgcaagctccatggacactcagatgcactccccaaagaagcaggagagagtgaacaagagggtcatctggggcattgaggtggctgaggagctgcattggaaaggctgggagctaggaaaggagaccacaaggaatctggttctgaaaaatcgatccttgaaactccagaagatgaagtacaggccccccaagaccaagttcttcttcacggtcatccctcagcccatcttcctgagcccaggcataaccctcacgctccccatcgtcttccggcctctggaggcgaaggagtacatggaccagctgtggtttgagaaagcggaggggatgttctgtgtcggcctacgggccaccctgccctgccacaggctgatctgccgcccaccatccctgcagctgcccatgtgtgctgtgggagatacgactgaggcctttttctgcctggataatgtgggggacctgcccaccttcttcacctgggagttctccagcccattccagatgctgcccgccacggggctcctggagccaggccaggcctctcagatcaaggtgacctttcagccccttacagccgtcatctacgaggtgcaggccacgtgctggtacggggcgggcagccggcagaggagcagcatccagctgcaggctgtggccaagtgcgcccagctgctggtgagcataaagcacaagtgcccggaggaccaggatgccgagggcttccagaagctgttgtactttggctctgttgctgtgggctgcacctcggagaggcagatcaggctacacaacccgtcggcggtaaatgcccccttcaggattgaaatttccccggatgaactggccgaagaccaggccttctcatgccccacggcccatggcatcgtgcttccgggagagaagaaatgtgtgtcggtgttcttccaccccaagactctggacaccagaactgtggactactgctccatcatgccttctggctgtgcctccaagaccctgcttaaagtcgttggtttctgtagaggccctgctgtgtccctgcagcactactgtgtcaacttcagctgggtcaaccttggggagcgctccgagcagcccctgtggattgagaaccaatcggactgcacggcccacttccagtttgccatcgactgcttggagagtgtctttaccatcaggcctgcctttgggacgctggtgggcaaggcccgtatgaccctgcactgtgccttccagcccactcaccccatcatctgctttcggcgtgtggcctgtctcatccaccaccaggacccactgttcctggacctgatggggacctgccactcggacagcaccaagccagccatcctgaagcctcagcacctcacctggtaccgcacacacctggcccggggcctgacgctctacccccctgacatcctggatgccatgctgaaggagaagaagctggcacaggaccagaacggggctctcatgattcccatccaggatctggaggacatgccggccccgcagtacccttatatcccccccatgaccgagttcttcttcgacggcaccagcgacataaccatcttccccccgcccatcagtgtagagcctgtcgaggtagacttcggtgcctgcccagggcctgaggcccccaaccctgtacccctgtgcctgatgaaccacaccaagggcaagatcatggtggtctggacgcgaaggtctgactgccccttctgggtgactccagagagctgcgacgtgcccccactcaagtccatggccatgcgcctgcacttccagccgcctcaccccaactgcctttacacggtggagctcgaagccttcgccatctataaggtcctgcagagctacagtaatattgaggaggactgcaccatgtgcccatcctggtgcctgacggtgcgggcacgaggccacagctatttcgctggctttgagcaccacatcccccagtattccctagatgtccccaagctatttccagcagtgtcctccggtgagcccacctaccgcagcctgctcctggtcaacaaagactgcaagctgctgaccttcagcctggccccccagagaggctcagacgtcatccttcggcccacttcgggccttgtggcacccggggcccaccagatcatcctcatctgcacctaccctgagggcagctcctggaagcagcacactttctatctgcagtgcaatgcttccccccagtatctcaaggaggtgagcatgtacagccgggaggagccactgcagctgaagctggacacccacaaaagcctctacttcaagcccacctgggtgggctgctcctccaccagccccttcaccttccgcaacccctcgcgtctgcccctgcagttcgagtggagggtctctgagcagcatcgaaagctgctggctgtccagccctccagggggctaatccagcccaacgagagacttacgctgacgtggaccttcagccctttggaggagaccaagtacctgttccaagtggggatgtgggtctgggaagccggcctgtccccaaatgccaaccccgctgccaccacccactacatgctccggctggtgggcgttgggctcaccagcagcctctctgcaaaggaaaaggagctggcctttgggaatgtgctggtgaacagcaagcagtccaggttccttgtcctcctgaatgacggcaactgcaccctctattaccgcctctacctggagcagggcagccctgaggccgttgacaaccaccccctcgctctgcagctggaccgaacagaggggagcatgccaccccggtcccaggacaccatctgcctgactgcctgtcccaagcagcggtcccagtactcctggaccatcacctactctctcctttcccacagagataacaaggctggggagaagcaggagctgtgctgcgtctccctggtggccgtgtaccccttgctttccatcctggatgtcagctccatgggcagtgctgagggtatcacccggaagcacctgtggcgcctcttctctctggacctgcttaacagttacttggagcgtgaccccaccccctgtgagctcacctacaaggtgcccacccggcacagcatgagccagatcccccccgtcctcacccctttaaggcttgacttcaatttcggggccgcaccattcaaggccccaccttccgtggtattcctggccctgaagaacagcggagtggtgtccctggactgggccttcctccttccaagtgaccagcggattgacgtggagctctgggcagagcaagcagagttgaattccactgagctccaccagatgcgcgtgcaggacaattgcctcttctccatcagccccaaggctgggagcctgagtcctgggcaggagcagatggtggagttaaaatacagccacctgttcatcggtactgatcacctcccagtgctcttcaaggtgtcccatggccgggagatcctgctaaatttcataggtgtgacagtgaagccggagcagaagtatgtgcacttcacctctactacccaccagttcatccccattcccattggtgacacgctacccccacggcagatttatgagctgtataatggtggctcagtgcccgtgacatatgaggtccagaccgatgtcctgtcacaggttcaggaaaaaaattttgatcaccccatcttttgctgcctcaaccccaaaggggagatccagccaggcagcactgcccgggtcttgtggatcttctcacctatcgaggccaagacctacacggtggacgtgcccatacacatcctgggatggaactcggccctcatccacttccagggagtgggctacaacccccatatgatgggggacacagccccattccacaacatctcctcgtgggacaacagttccatacactctaggctggtggtgcctggacagaatgtcttcctgtcccagtctcatatttccctgggaaacatacctgtgcagagcaagtgcagccgcctgctcttcctcaacaacatctccaagaacgaggaaattgccttctcctggcagccaagtcctctagattttggggaggtgtctgtgagtcccatgataggggtggtggctcctgaagagacggtcccatttgtggtgaccttgagggcctctgtgcatgccagcttctacagtgcagacctggtatgcaagctgtactcgcagcagctcatgaggcagtatcacaaggagctgcaggagtggaaggacgagaaggtgcggcaggaagtggagttcaccatcaccgacatgaaagtgaagaagagaacatgctgcacagcctgtgaacctgcgaggaagtacaagacactgcctcccatcaagaaccagcagtctgtcagccggcctgccagctggaaactgcagaccccaaaggaggaggtgtcctggccctgcccccagccaccctcgccaggcatgctctgcctgggccttactgcccgagcccatgccaccgactactttctggctaacttcttctcagagtttccctgccactttttgcaccgggagctgccaaagaggaaggcccccagggaagagtcagagacttctgaggaaaaatcccctaacaagtggggccctgtttccaagcagaagaagcagctcctggttgacattctcaccacaataatcaggggcctgctggaagacaagaacttccatgaggctgtggaccaaagcctggtggagcaggtgccgtacttccgccaattctggaatgagcagtcaactaagttcatggaccagaaaaacagcctgtacttaatgccaatcctgcctgtaccctccagcagctgggaggatgggaagggcaagcagccgaaggaagacagaccagagcactatccagggttgggaaagaaggaagagggggaggaggagaagggtgaagaggaagaagaagagttggaggaggaagaggaggaagaagaggagacagaagaggaggagttgggcaaggaggagatagaggagaaggaggaggagagggatgagaaggaagagaaagtgagctgggcgggcatcgggcccacaccacagcctgagtcccaggagtccatgcaatggcagtggcaacagcagctgaatgtcatggtgaaggaggagcaagaacaggacgagaaggaggccatcagaaggctcccggccttcgccaacctgcaggaggcgctgctggagaacatgatccagaacatcctggtggaggcgagccgcggggaggtggtactcacctcgcggccacgcgtcatcgccctgccgccgttctgcgtgcccaggagtctgaccccggacacgctgctgccgacgcagcaagcagaggtactccacccggtggtgccacttcctaccgaccttccgtaaatgcccgcgcccagcctctccgacatgccgctaggggtcacgcctggccccctctccaccgccagtaaaagcatctagtcttt

SEQ ID NO: 299871 - protein, 710 aa, Artificial Sequence
  derived and/or modified sequence
METRESEDLEKTRRKSASDQWNTDNEPAKVKPELLPEKEETSQADQDIQDKEPHCHIPIKRNSIFNRSIRRKSKAKARDNPERNASCLADSQDNGKSVNEPLTLNIPWSRMPPCRTAMQTDPGAQEMSESSSTPGNGATPEEWPALADSPTTLTEALRMIHPIPADSWRNLIEQIGLLYQEYRDKSTLQEIETRRQQDAEIEDNTNGSPASEDTPEEEEEEEEEEEPASPPERKTLPQICLLSNPHSRFNLWQDLPEIRSSGVLEILQPEEIKLQEAMFELVTSEASYYKSLNLLVSHFMENERIRKILHPSEAHILFSNVLDVLAVSERFLLELEHRMEENIVISDVCDIVYRYAADHFSVYITYVSNQTYQERTYKQLLQEKAAFRELIAQLELDPKCRGLPFSSFLILPFQRITRLKLLVQNILKRVEERSERECTALDAHKELEMVVKACNEGVRKMSRTEQMISIQKKMEFKIKSVPIISHSRWLLKQGELQQMSGPKTSRTLRTKKLFHEIYLFLFNDLLVICRQIPGDKYQVFDSAPRGLLRVEELEDQGQTLANVFILRLLENADDREATYMLKASSQSEMKRWMTSLAPNRRTKFVSFTSRLLDCPQVQCVHPYVAQQPDELTLELADILNILDKTDDGWIFGERLHDQERGWFPSSMTEEILNPKIRSQNLKECFRVHKMDDPQRSQNKDRRKLGSRNRQ

SEQ ID NO: 299872 - protein, 600 aa, Artificial Sequence
  derived and/or modified sequence
MPPCRTAMQTDPGAQEMSESSSTPGNGATPEEWPALADSPTTLTEALRMIHPIPADSWRNLIEQIGLLYQEYRDKSTLQEIETRRQQDAEIEDNTNGSPASEDTPEEEEEEEEEEEPASPPERKTLPQICLLSNPHSRFNLWQDLPEIRSSGVLEILQPEEIKLQEAMFELVTSEASYYKSLNLLVSHFMENERIRKILHPSEAHILFSNVLDVLAVSERFLLELEHRMEENIVISDVCDIVYRYAADHFSVYITYVSNQTYQERTYKQLLQEKAAFRELIAQLELDPKCRGLPFSSFLILPFQRITRLKLLVQNILKRVEERSERECTALDAHKELEMVVKACNEGVRKMSRTEQMISIQKKMEFKIKSVPIISHSRWLLKQGELQQMSGPKTSRTLRTKKLFHEIYLFLFNDLLVICRQIPGDKYQVFDSAPRGLLRVEELEDQGQTLANVFILRLLENADDREATYMLKASSQSEMKRWMTSLAPNRRTKFVSFTSRLLDCPQVQCVHPYVAQQPDELTLELADILNILDKTDDGWIFGERLHDQERGWFPSSMTEEILNPKIRSQNLKECFRVHKMDDPQRSQNKDRRKLGSRNRQ

SEQ ID NO: 299873 - DNA, 2133 bp, Artificial Sequence
  derived and/or modified sequence
atggaaacacgggaaagtgaagatctggaaaagacacggaggaagagcgcgtctgaccagtggaacacagataatgagcccgccaaggttaaacctgaattgctgcctgaaaaggaggaaacttcacaagccgaccaagatattcaggacaaagagcctcactgtcacattcctataaagcgaaacagtatttttaatcgatctattcgacggaaaagtaaagccaaagctagagacaatcccgagcgcaatgccagctgcttagcagacagtcaagacaacggtaagtcagttaatgagccgctgactctaaatatcccatggtcccggatgcctccctgtcgcacagctatgcagactgatcctggcgctcaggagatgtctgagtcatcatcaacaccaggcaacggagcaacgcctgaagagtggccagctctcgcagactctcccacaactctgactgaggcccttaggatgattcatcctataccggcagactcttggcgcaatctgatcgagcagattgggcttctgtaccaggaatacagggataagtcgacacttcaggagattgagactcggcggcagcaagacgctgaaatcgaagataatacaaatgggagcccagcaagcgaggacacccctgaggaagaggaagaggaagaggaggaggaggagcctgcatcacctccagagagaaagacgctcccgcagatttgccttttgtcaaacccccacagtcggttcaacctctggcaggacctacctgaaatccgcagcagtggcgttttggaaatactgcagccggaggagatcaagctgcaggaggctatgttcgagctggtgacatccgaagcctcctactataagtctctgaacctgctggtcagtcacttcatggagaacgagaggatcagaaaaatcctacatccctctgaggcccacattttgtttagtaacgtgctggatgttctcgcagtctccgaacgcttcttgctggaacttgagcataggatggaggagaatattgtaatcagcgatgtttgtgatatcgtgtaccgatacgccgctgaccacttctcagtgtatatcacatacgtctcgaaccaaacgtatcaggaacgcacttacaagcagcttctccaggaaaaagccgctttcagagagctgatcgcccaactggaactggacccgaaatgcagaggacttcccttcagcagcttcctgatattaccattccaacggattacacggctgaagttgttggtgcagaacatcctcaaacgggtagaagagcgctcagagagggaatgcacagctctggacgcccataaggaactggaaatggtagtgaaagcctgcaatgaaggcgtgcgcaaaatgtctcggactgaacagatgatttcaattcagaaaaagatggaatttaaaatcaaatcagtgccgattatctcacactcaaggtggctcctgaaacagggcgaactgcagcagatgtctggtccgaaaactagccgaaccctcaggaccaagaagctgttccacgagatatacctgttcctattcaacgacctgctggtgatttgtcggcaaattccaggcgacaagtatcaggtgttcgactcggccccgcgtgggctcttgcgggtggaggagttggaagaccagggccaaactctggcgaatgtgtttatcctgcgtctgctggaaaacgcagacgatagagaggccacgtatatgctgaaagcatcatctcaatctgaaatgaagcggtggatgacctctctcgctcctaatcggcgaaccaaatttgtgtccttcacgagccggctcctcgattgccctcaggtgcaatgcgtgcatccttatgtggcacagcagcccgatgagttaacactggaattggccgacatcctgaatattctcgataagacagatgatggatggatctttggggaacgcttacacgaccaggaacgtggttggttccccagctctatgaccgaggagattctgaacccaaaaatcagatctcagaacctgaaagagtgcttcagggtccacaaaatggacgacccacaaaggagtcagaacaaggacagacgcaagttggggtccaggaaccgtcagtag

SEQ ID NO: 299874 - DNA, 1803 bp, Artificial Sequence
  derived and/or modified sequence
atgcccccatgccgtactgccatgcagaccgatccgggagcacaggaaatgtccgagtccagcagcaccccagggaacggcgcgactcctgaagaatggccggccttagctgacagccctacaaccctgacagaagctctccggatgatccaccccattcctgcagattcttggcgaaacctgatagaacaaatcggtcttctctaccaggaataccgtgacaaatctactctgcaagagattgagacccgcaggcagcaggatgctgaaatcgaggacaatacgaacggcagccctgcctccgaggacactcccgaggaggaagaggaggaggaagaggaggaggagcctgcctcaccacctgaacgaaagacccttccacagatttgcctgctttccaatcctcattctagatttaatctgtggcaggatctcccagaaatccgcagctccggtgtgcttgagatccttcagcccgaggaaattaaactgcaggaagccatgttcgaacttgttacaagcgaagcttcgtattacaagtccctgaatcttctggtctcgcactttatggaaaacgagcggatccgcaagatactgcatccatctgaggcccacatactcttctctaacgtcttagatgtactcgccgtatctgaacgtttcttgctggagcttgaacaccgcatggaggagaacatcgttatttccgatgtatgcgacatcgtttatcgttatgctgctgaccacttttctgtctatataacatacgtgagcaatcagacttaccaggaacggacttacaagcagctcctgcaggaaaaggctgccttccgagagctcatagcacagctggaacttgatcctaaatgtcgtggtctcccattctcaagtttcctgatcctgcctttccaaaggattacaagacttaagctcttagtccagaacattcttaagagggtcgaagagcgcagcgaaagggaatgcacagcgctggatgcgcacaaagagctggaaatggtcgtgaaggcctgcaatgagggagtgaggaaaatgtcccgaaccgagcagatgattagtatccaaaagaaaatggaattcaagattaaatctgtgcctattatatcacacagccggtggcttctgaagcagggcgagctgcagcagatgtccgggcccaaaacatcccgtactttgcgtacaaaaaagttgtttcatgagatctacttgttcctgtttaatgacctcctagttatatgcagacagattccaggtgataaatatcaggtgttcgactccgctccacggggcctgctgcgtgtagaagagctggaagaccagggccaaacgttggcaaacgtgttcattctcagattactggagaacgccgatgacagagaagctacttacatgctcaaggcctctagccagagcgagatgaaaagatggatgacgtccctggcaccgaatcggaggactaaattcgtcagctttacgtcccggcttctggactgccctcaggtccagtgcgtgcatccatacgtggctcaacagccagatgaattgacgctggagctcgccgacatcttgaacatcctagacaagacagatgatgggtggatctttggcgaaagactgcatgatcaggagcgcggctggtttccaagtagcatgacggaagagattctgaaccctaagatcagatctcagaacctcaaagagtgtttccgcgtgcataaaatggatgatccgcagcgctcccagaacaaggacaggcggaagctagggtcccgtaaccgtcagtag

SEQ ID NO: 299875 - DNA, 2133 bp, Artificial Sequence
  derived and/or modified sequence
atggagacccgggagagcgaggacctggagaagaccaggaggaagagcgccagtgaccagtggaacacagacaatgaaccagccaaggtgaagccagagctgctgcctgagaaggaggagaccagccaggccgaccaggacatccaggacaaggagccccactgccacatccccatcaagagaaattccatcttcaacagaagcatccggaggaagagcaaggccaaggcccgggacaaccctgagagaaatgccagctgcctggccgacagccaggacaacgggaagtctgtgaatgagcccctgaccctgaacatcccctggagcaggatgccaccctgcaggacagccatgcagacagaccccggggcccaggagatgtctgagagcagcagcaccccaggaaatggagccaccccagaggagtggccagccctggccgacagccccaccaccctgacagaggccctgaggatgatccaccccatcccagctgacagctggaggaacctgattgagcagatcggcctgctgtaccaggagtacagagacaagagcaccctgcaggagattgagacccggcggcagcaggatgctgagattgaggacaacaccaacggcagccctgccagcgaggacaccccagaggaggaggaggaggaggaggaggaggaggagcccgccagccccccagagaggaagaccctgccccagatctgcctgctgagcaacccccacagccgcttcaacctgtggcaggacctgcctgagatccgcagcagtggagtgctggagatcctgcagcctgaggagatcaagctgcaggaggccatgtttgagctggtgaccagcgaggccagctactacaagagcctgaacctgctggtgagccacttcatggagaatgaaagaatcaggaagatcctgcaccccagcgaggcccacatcctcttcagcaatgtgctggatgtgctggccgtgtctgagcgcttcctgctggagctggagcacaggatggaggagaacatcgtcatcagtgatgtgtgtgacatcgtgtaccgctatgctgctgaccacttctctgtgtacatcacctacgtgagcaaccagacctaccaggagaggacctacaagcagctgctgcaggagaaggccgccttccgggagctgattgcccagctggagctggaccccaagtgccggggcctgcccttcagcagcttcctgatcctgcccttccagaggatcacccggctgaagctgctggtgcagaacatcctgaagagggtggaggagaggagtgaaagagaatgtacagccctggatgcccacaaggagctggagatggtggtgaaggcctgcaatgaaggagtgaggaagatgagcaggacagagcagatgatcagcatccagaagaagatggagttcaagatcaagtctgtgcccatcatcagccacagccgctggctgctgaagcagggcgagctgcagcagatgagcggccccaagaccagcaggaccctgcggaccaagaagctgttccacgagatctacctgttcctgttcaatgacctgctggtgatctgccggcagatccctggggacaagtaccaggtgtttgacagcgccccccggggcctgctgcgggtggaggagctggaggaccagggccagaccctggccaacgtgttcatcctgcggctgctggagaatgctgatgaccgggaggccacctacatgctgaaggccagcagccagagcgagatgaagcgctggatgaccagcctggcccccaacagaaggaccaagtttgtgtccttcaccagccggctgctggactgcccccaggtgcagtgtgtgcacccctacgtggcccagcagccagatgagctgaccctggagctggccgacatcctgaacatcctggacaagacagatgatggctggatctttggagagcggctgcatgaccaggagcggggctggttccccagctccatgacagaggagatcctgaaccccaagatccgcagccagaacctgaaggagtgcttccgggtgcacaagatggatgacccccagaggagccagaacaaggacaggaggaagctgggcagcaggaaccggcagtag

SEQ ID NO: 299876 - DNA, 1803 bp, Artificial Sequence
  derived and/or modified sequence
atgccaccctgcaggacagccatgcagacagaccccggggcccaggagatgtctgagagcagcagcaccccaggaaatggagccaccccagaggagtggccagccctggccgacagccccaccaccctgacagaggccctgaggatgatccaccccatcccagctgacagctggaggaacctgattgagcagatcggcctgctgtaccaggagtacagagacaagagcaccctgcaggagattgagacccggcggcagcaggatgctgagattgaggacaacaccaacggcagccctgccagcgaggacaccccagaggaggaggaggaggaggaggaggaggaggagcccgccagccccccagagaggaagaccctgccccagatctgcctgctgagcaacccccacagccgcttcaacctgtggcaggacctgcctgagatccgcagcagtggagtgctggagatcctgcagcctgaggagatcaagctgcaggaggccatgtttgagctggtgaccagcgaggccagctactacaagagcctgaacctgctggtgagccacttcatggagaatgaaagaatcaggaagatcctgcaccccagcgaggcccacatcctcttcagcaatgtgctggatgtgctggccgtgtctgagcgcttcctgctggagctggagcacaggatggaggagaacatcgtcatcagtgatgtgtgtgacatcgtgtaccgctatgctgctgaccacttctctgtgtacatcacctacgtgagcaaccagacctaccaggagaggacctacaagcagctgctgcaggagaaggccgccttccgggagctgattgcccagctggagctggaccccaagtgccggggcctgcccttcagcagcttcctgatcctgcccttccagaggatcacccggctgaagctgctggtgcagaacatcctgaagagggtggaggagaggagtgaaagagaatgtacagccctggatgcccacaaggagctggagatggtggtgaaggcctgcaatgaaggagtgaggaagatgagcaggacagagcagatgatcagcatccagaagaagatggagttcaagatcaagtctgtgcccatcatcagccacagccgctggctgctgaagcagggcgagctgcagcagatgagcggccccaagaccagcaggaccctgcggaccaagaagctgttccacgagatctacctgttcctgttcaatgacctgctggtgatctgccggcagatccctggggacaagtaccaggtgtttgacagcgccccccggggcctgctgcgggtggaggagctggaggaccagggccagaccctggccaacgtgttcatcctgcggctgctggagaatgctgatgaccgggaggccacctacatgctgaaggccagcagccagagcgagatgaagcgctggatgaccagcctggcccccaacagaaggaccaagtttgtgtccttcaccagccggctgctggactgcccccaggtgcagtgtgtgcacccctacgtggcccagcagccagatgagctgaccctggagctggccgacatcctgaacatcctggacaagacagatgatggctggatctttggagagcggctgcatgaccaggagcggggctggttccccagctccatgacagaggagatcctgaaccccaagatccgcagccagaacctgaaggagtgcttccgggtgcacaagatggatgacccccagaggagccagaacaaggacaggaggaagctgggcagcaggaaccggcagtag

SEQ ID NO: 299877 - DNA, 2133 bp, Artificial Sequence
  derived and/or modified sequence
atggagacccgggagagcgaggacctggagaagacccggcggaagtccgcctccgaccagtggaatactgataacgaaccagcgaaggtcaagcccgaactgctcccagaaaaggaagagacctctcaggcagaccaagacatccaggacaaagaaccgcactgccacattccaataaaacgcaatagtatcttcaacaggtctatccggcgaaagtccaaggccaaggcgcgcgacaatcctgagcggaacgctagctgccttgccgactctcaggataatggaaaaagtgtgaatgaacctctgactcttaatattccctggagcaggatgccgccctgcaggactgctatgcagacagaccctggcgcacaagagatgtccgagagtagttctacccctggcaatggagccacgccagaggagtggccagccctggccgactcgccaaccacgttgactgaagccctgcgaatgatccatccgataccagccgattcatggcggaacctgattgaacagattggcctgctttaccaggagtaccgtgataaatcaacactgcaggaaatcgagactcgacgccagcaagacgcggaaattgaagacaacactaatggatctcctgcctcagaggacactccagaggaggaagaggaggaagaagaggaagaagagccagcatcgccacccgaacgtaagacgctgcctcagatctgcctgctgtccaatccccacagtagatttaatctatggcaagacttgccagaaattcgaagctccggagtcctggagattctgcagcccgaggagattaagctgcaggaggctatgttcgaactggtgacctccgaagcgagctattataagagcctgaacctccttgtgagccacttcatggagaatgagcggatccgtaagatcttacacccctccgaggctcacattctattcagcaacgttctcgacgtcttagccgtgagcgaacggtttctgcttgagttagagcacaggatggaagaaaatatcgttatctctgacgtttgcgatatcgtctataggtatgccgcagaccactttagtgtatacataacctacgtctccaaccaaacctaccaggaaagaacgtataaacagctgttgcaggagaaggccgcttttcgcgagttaatcgcacagctggagctggatcccaaatgcaggggcctgccattctcaagcttcctgatactgcctttccaaaggatcaccagattgaaacttctggtgcaaaacattttaaagcgcgtcgaggagaggagcgaacgtgagtgcacagccctggatgcacacaaagaactcgaaatggttgtgaaagcctgcaatgaaggcgtgagaaaaatgtctcggacagaacagatgatatcaattcagaagaagatggagttcaagattaaatctgtccctatcatcagccactctcggtggctgttaaagcagggcgagttgcagcagatgtccgggccaaagactagcaggaccctgagaacgaaaaagttattccacgagatttatctgtttctatttaatgatctgttggtcatctgtcgacagattcccggggataagtaccaggtgttcgatagtgctccaaggggattgctaagggtcgaggaacttgaagatcaggggcagactctggctaacgtgtttatccttcggctgctggaaaatgcagacgatcgcgaggctacgtatatgctgaaagcctcctcacagagcgagatgaagcggtggatgacgtcccttgccccaaataggcgcactaagttcgtatcttttacatctcggctgctggattgtccccaagtgcagtgcgttcatccttacgtggctcagcagcctgacgaacttacattggaattggcagacatacttaacatcctggacaagacagacgacggctggattttcggtgaacgactccacgaccaggagaggggttggtttccaagcagtatgactgaagaaattctaaatcctaagatccgcagccagaatctaaaggagtgctttagagtgcataagatggatgaccctcagaggagccagaacaaagatagaaggaaactgggatccaggaatagacagtag

SEQ ID NO: 299878 - DNA, 1803 bp, Artificial Sequence
  derived and/or modified sequence
atgcccccctgccggaccgccatgcagaccgaccccggcgcccaggagatgtctgagagcagcagcacccctggtaacggcgctactcccgaggaatggccagctctggccgattctccaacaaccctgaccgaggctctgaggatgatccatcctatccctgctgatagctggaggaatctgatcgagcaaattgggctgctctaccaggagtaccgagacaaatccactctgcaggaaatcgaaacccggagacagcaggacgcggaaattgaggacaacaccaacggaagccccgcttctgaggacaccccggaagaggaggaggaagaggaggaggaagaagagcctgccagtccacccgagcggaaaacgttgccccagatttgccttttatctaatccccacagtagattcaacttatggcaggacctccccgagattaggagctctggagtcttggaaatcctacagcctgaggagatcaaactgcaggaggctatgttcgagcttgtcactagcgaagcttcctactataaatccctcaatctgttagtctcccattttatggaaaatgagaggatacgcaaaatcctacatccatctgaggctcatatacttttttccaacgtgctggatgtcctggcagtgagtgagcgattcctccttgaactggagcataggatggaggaaaatattgttattagcgacgtttgcgacatcgtctatcggtatgctgccgatcactttagtgtttatattacctatgtttccaatcagacctatcaggaaaggacgtacaaacagttgctccaagagaaagccgcctttagagagctgatcgctcagctggagcttgacccgaagtgtcgcgggctcccgttcagctccttcttaatcctgccattccaaagaattactaggctcaaactgctcgtgcagaatatcctgaagagggtagaggaacggagcgagcgcgaatgtaccgccttagatgcacacaaggagctcgaaatggtcgtcaaggcgtgtaacgagggggtaagaaagatgtcgcggacagagcaaatgatctcgatacagaaaaaaatggagtttaaaattaaatcagtgcccatcatctctcatagtaggtggcttctgaagcagggagagctgcaacagatgtccggacctaagacctcgcggactctccgcaccaagaaattgttccacgaaatctacctgttcctttttaacgacctgctcgtaatatgccggcagatcccaggagataagtatcaggttttcgactcagccccaagaggactcctccgagtggaagagctggaggatcagggtcagacccttgcaaacgtgtttatcctgcggttgcttgagaacgctgacgatcgggaggcaacatacatgctgaaggcctcatctcagtctgagatgaaacgttggatgacatcactcgcccctaaccgccgaaccaaatttgtcagttttaccagtagattgttggactgccctcaggtgcagtgtgtgcatccatatgtcgcgcagcagccggacgagctgaccttagagctagccgatatattgaacattctagacaagacagacgacgggtggatttttggagagcgactgcatgatcaggaaaggggttggtttcccagttccatgactgaggagattctcaaccccaagatccgttctcagaatttaaaggagtgtttcagagtccataagatggacgacccacagagatcccagaataaagacagacggaaactgggctcaaggaacagacagtag

SEQ ID NO: 299879 - DNA, 3215 bp, Artificial Sequence
  derived and/or modified sequence
aggtctaaaggtcgggaatgcttaccagtgaagcttttccaggacaggacgaagtttttggctgtgggctctctgggacagagtggagcgcctgtggatttagccggggacacaccatcctgctcgcaggtgcctggacaggacaggggacgagggaggaacactctctgaggaagcccaactcctatgagctcctctctggcagcactcaaaccagtgaagcttgggaaagtcattgacctccagtcgttctgctgagaaacatctggctctatttccatggagaccagggaatctgaagatttggaaaagacccggaggaaatcagcaagtgatcaatggaacactgataatgaaccagccaaggtgaaacctgagttactcccagaaaaagaggagacttctcaagctgaccaggatatccaagacaaagagcctcattgccacatcccaattaagagaaattccatcttcaatcgctccataagacgcaaaagcaaagccaaggccagagacaaccccgaacggaacgccagctgcctggcagattcacaggacaatggaaaatctgtaaatgagcccctgaccttgaatatcccctggagcagaatgcctccttgcagaacagcaatgcagacagacccaggagcccaggaaatgagtgagtcgtcctccaccccgggaaatggggccacgcccgaggagtggccggccctggccgacagccccaccacgctcaccgaggccctgcggatgatccaccccattcccgccgactcctggagaaacctcattgaacaaatagggctcctgtatcaggaataccgagataaatcgactctccaagaaatcgaaaccaggaggcaacaggatgcagaaatagaagacaataccaatgggtccccggccagtgaggacaccccggaggaggaagaagaagaggaggaggaggaggagccggccagcccaccagagaggaagactctgccccagatctgcctgctcagtaacccccactcaaggttcaacctctggcaggatcttcccgagatccggagcagcggggtgcttgagatcctacagcccgaggagattaagctgcaggaggccatgttcgagctggtcacttccgaggcgtcctactacaagagtctgaacctgctcgtgtcccacttcatggagaacgagcggataaggaagatcctgcacccgtccgaggcgcacatcctcttctccaacgtcctggacgtgctggctgtcagtgagcggttcctcctggagctggagcaccggatggaggagaacatcgtcatctctgacgtgtgtgacattgtgtaccgttatgcggccgaccacttctctgtctacatcacctacgtcagcaatcagacctaccaggagcggacctataagcagctgctccaggagaaggcagctttccgggagctgatcgcgcagctagagctcgaccccaagtgcagggggctgcccttctcctccttcctcatcctgcctttccagaggatcacacgcctcaagctgttggtccagaacatcctgaagagggtagaagagaggtctgagcgggagtgcactgctttggatgctcacaaggagctggaaatggtggtgaaggcatgcaacgagggcgtcaggaaaatgagccgcacggaacagatgatcagcattcagaagaagatggagttcaagatcaagtcggtgcccatcatctcccactcccgctggctgctgaagcagggtgagctgcagcagatgtcaggccccaagacctcccggaccctgaggaccaagaagctcttccacgaaatttacctcttcctgttcaacgacctgctggtgatctgccggcagattccaggagacaagtaccaggtatttgactcagctccgcggggactgctgcgtgtggaggagctggaggaccagggccagacgctggccaacgtgttcatcctgcggctgctggagaacgcagatgaccgggaggccacctacatgctaaaggcgtcctctcagagtgagatgaagcgttggatgacctcactggcccccaacaggaggaccaagtttgtttcgttcacatcccggctgctggactgcccccaggtccagtgcgtgcacccatacgtggctcagcagccagacgagctgacgctggagctcgccgacatcctcaacatcctggacaagactgacgacgggtggatctttggcgagcgtctgcacgaccaggagagaggctggttccccagctccatgactgaggagatcttgaatcccaagatccggtcccagaacctcaaggaatgtttccgtgtccacaagatggatgaccctcagcgcagccagaacaaggaccgcaggaagctgggcagccggaatcggcaatgacccccacccagggggccagcgggagcagggcctgcatgagaccccgacagaaggtgggggggggggggctctgggaagcacaggccagcacctccccaggtggcaggatctggcttggggtgcccggccctcatccctgcccacgcagtgagtgctcatgtgtcttggccccttgctcgcaaactggataaagggtgcccaagcctctcctgatgcatttgtaaacaagaaggtttcagcagtattacaccacctccctcatgcctccgagggggtggaagggggtgggcacactccagggccccccatgcccctggcccccagggactggaagaggctcccaacccagagtgtccctgtgggaggcaggcagaaggtgacaattgacacgatttcctgcacgcgtcctcctctaccttggaagcagttagaatctaccaggcacagatgaggccgcccttgcctgacggagcttgatgagcagcccttggtctccggttccaggactgagagcccagctgcctctgcccacccttccccaggcctctgccagcctctggctgcacggtcaggccctgccccatggcaggcctgccagagcttggctggggacccctcccgcctctggctccctgatgggctggatgtaacttgtgtcttctagccccttaaggagcccaggtgttttaaggaatgaattggtcactgcatcttgtatcgattatggttctgagaaaagcaaatatcacttttggctgcattaaaagaagcatcatatataaaataaagaagatgaaggtcta

SEQ ID NO: 299880 - DNA, 2513 bp, Artificial Sequence
  derived and/or modified sequence
aggtctaaaggtcgggaatgcttaccagtgaagcttttccaggacaggacgaagtttttggctgtgggctctctgggacagagtggagcgcctgtggatttagccggggacacaccatcctgctcgcaggtgcctggacaggacaggggacgagggaggaacactctctgaggaagcccaactcctatgagctcctctctggcagcactcaaaccagtgaagcttgggaaagtcattgacctccagtcgttctgctgagaaacatctggctctatttccatggagaccaggatatccaagacaaagagcctcattgccacatcccaattaagagaaattccatcttcaatcgctccataagacgcaaaagcaaagccaaggccagagacaaccccgaacggaacgccagctgcctggcagattcacaggacaatggaaaatctgtaaatgagcccctgaccttgaatatcccctggagcagaatgcctccttgcagaacagcaatgcagacagacccaggagcccaggaaatgagtgagtcgtcctccaccccgggaaatggggccacgcccgaggagtggccggccctggccgacagccccaccacgctcaccgaggccctgcggatgatccaccccattcccgccgactcctggagaaacctcattgaacaaatagggctcctgtatcaggaataccgagataaatcgactctccaagaaatcgaaaccaggaggcaacaggatgcagaaatagaagacaataccaatgggtccccggccagtgaggacaccccggaggaggaagaagaagaggaggaggaggaggagccggccagcccaccagagaggaagactctgccccagatctgcctgctcagtaacccccactcaaggttcaacctctggcaggatcttcccgagatccggagcagcggggtgcttgagatcctacagcccgaggagattaagctgcaggaggccatgttcgagctggtcacttccgaggcgtcctactacaagagtctgaacctgctcgtgtcccacttcatggagaacgagcggataaggaagatcctgcacccgtccgaggcgcacatcctcttctccaacgtcctggacgtgctggctgtcagtgagcggttcctcctggagctggagcaccggatggaggagaacatcgtcatctctgacgtgtgtgacattgtgtaccgttatgcggccgaccacttctctgtctacatcacctacgtcagcaatcagacctaccaggagcggacctataagcagctgctccaggagaaggcagctttccgggagctgatcgcgcagctagagctcgaccccaagtgcagggggctgcccttctcctccttcctcatcctgcctttccagaggatcacacgcctcaagctgttggtccagaacatcctgaagagggtagaagagaggtctgagcgggagtgcactgctttggatgctcacaaggagctggaaatggtggtgaaggcatgcaacgagggcgtcaggaaaatgagccgcacggaacagatgatcagcattcagaagaagatggagttcaagatcaagtcggtgcccatcatctcccactcccgctggctgctgaagcagggtgagctgcagcagatgtcaggccccaagacctcccggaccctgaggaccaagaagctcttccacgaaatttacctcttcctgttcaacgacctgctggtgatctgccggcagattccaggagacaagtaccaggtatttgactcagctccgcggggactgctgcgtgtggaggagctggaggaccagggccagacgctggccaacgtgttcatcctgcggctgctggagaacgcagatgaccgggaggccacctacatgctaaaggcgtcctctcagagtgagatgaagcgttggatgacctcactggcccccaacaggaggaccaagtttgtttcgttcacatcccggctgctggactgcccccaggtccagtgcgtgcacccatacgtggctcagcagccagacgagctgacgctggagctcgccgacatcctcaacatcctggacaagactgacgacgggtggatctttggcgagcgtctgcacgaccaggagagaggctggttccccagctccatgactgaggagatcttgaatcccaagatccggtcccagaacctcaaggaatgtttccgtgtccacaagatggatgaccctcagcgcagccagaacaaggaccgcaggaagctgggcagccggaatcggcaatgacccccacccagggggccagcgggagcagggcctgcatgagaccccgacagaaggtgggggggggggggctctgggaagcacaggccagcacctccccaggtggcaggatctggcttggggtgcccggccctcatccctgcccacgcagtgagtgctcatgtgtcttggccccttgctcgcaaactggataaagggtgcccaagcctctcctgatgcatttgtaaacaa

SEQ ID NO: 299881 - DNA, 2133 bp, Artificial Sequence
  derived and/or modified sequence
atggagactagggagtcagaagacctcgagaagacaagaagaaaatctgcttctgaccagtggaacaccgacaacgagccagctaaagtaaagcccgagttactcccagaaaaggaggagacaagtcaggcggatcaggatatacaagataaggaacctcactgtcatattccaattaaacgcaatagtatttttaatcggtcaatcaggagaaaatctaaggcaaaagccagagacaatccagagagaaacgcctcttgtttggccgactcacaggataatggtaagagtgtgaatgagcctctgacccttaacattccatggagccgcatgcccccatgtcgcactgccatgcagaccgatcctggagcgcaggagatgtccgaatccagcagtactcccggaaatggagccactcctgaggagtggcccgcactcgccgatagccctaccaccctaacagaggcactgagaatgatccatcctattcccgctgattcatggcgtaatctgattgagcagattggcttgctatatcaagaataccgggacaaatcaacccttcaggagatcgagacacggagacagcaggacgctgaaattgaggacaacacaaacggaagccccgcatcagaggacacccctgaagaggaagaagaggaagaggaggaagaggagcctgcatctcccccagaacgaaaaaccctaccccagatctgtcttctcagcaatccacatagccggttcaacctttggcaggacctacctgaaatcagatcatccggtgtccttgagatcttgcagccggaagaaatcaagcttcaggaggcgatgttcgaattagtgacttccgaggcgtcctactataaatctttgaacctattagtatcacacttcatggaaaacgagaggattcgaaagattctgcacccgtctgaggcacacatacttttcagtaatgttctcgatgtgttagcggtgagtgaaagattcttacttgagctagaacaccgcatggaggagaatatcgtgatttcagacgtgtgcgatattgtctatcgctacgctgcggatcacttctcagtgtacattacatatgtgagtaatcagacatatcaagagcgaacctacaagcagttactccaggaaaaggccgcttttagagagctcatcgcacagctcgagctggaccctaagtgcaggggtttacctttctcctcattcttgatcctgcccttccaacgcataactcggctgaagctgctcgtgcagaacatcctgaaaagagtggaagagagatcagagcgagagtgtaccgcccttgacgcccacaaagagctcgagatggtggttaaagcttgcaacgaaggagttagaaaaatgagcagaacagagcagatgatctcgatacagaaaaaaatggaatttaaaattaagtccgtgcctattattagccactctcggtggttattaaaacagggcgagctgcaacaaatgtcagggcctaaaacctctaggacactccggaccaagaaactgtttcatgaaatatatctgttcctctttaatgacttgctggtgatctgtagacagatcccaggagataagtatcaggtgtttgatagcgccccaagaggcctgcttcgggtggaagaactggaagatcagggtcagaccctggccaacgtttttatcctgaggctgcttgagaacgccgatgacagagaggctacctacatgctaaaggcctcaagtcaatcggaaatgaagagatggatgacgtctcttgctccgaacaggaggacaaaatttgtcagcttcactagcaggttgctggactgtccgcaggtgcagtgcgtgcatccttatgtggcacagcagcctgatgagttaacgttagaactggcagacatactgaacattctggataagaccgatgatgggtggatctttggggagcggctgcatgaccaggaaaggggctggtttccttcaagcatgacagaggagatactgaatccaaagattcggagccagaatctgaaggaatgttttagagtgcacaagatggacgacccacagaggagccagaataaagacaggagaaaactcggttcgagaaacagacaatag

SEQ ID NO: 299882 - DNA, 1803 bp, Artificial Sequence
  derived and/or modified sequence
atgccaccctgccggaccgcaatgcagacagatcctggggctcaggaaatgagcgaatcttccagtacacccggaaacggcgcaactcctgaggagtggcccgctctggccgattccccaaccacccttaccgaggccctcagaatgattcatcccataccggcagatagctggcgtaatctaatagaacagatcggtctgctctaccaggaataccgagataagtccacgcttcaggagattgagacaagaaggcaacaggacgcagagatcgaggataatacaaatgggagccccgcttccgaggatacccctgaggaggaggaagaggaggaggaggaggaggaacccgctagcccaccggagaggaagacactgcctcagatctgcctgctcagtaacccacactctaggttcaacctgtggcaggacctccctgagatccgctcctccggcgtcctggaaatcttgcaaccagaagagatcaagcttcaagaagctatgtttgagctcgtaactagtgaagcttcctattacaagtctctgaacctcctggtctctcatttcatggagaacgagcgcattaggaagatcctgcaccccagcgaggcacatatcctgttctccaatgttcttgacgtgctcgcagtgtccgaacggttcctgcttgaattagagcatcgtatggaggagaatatcgtgatcagtgatgtgtgtgacattgtataccggtatgctgcagaccacttctccgtgtatatcacttatgtgagtaaccaaacctaccaggagaggacttacaagcagctcctgcaggagaaagcggcatttcgtgagcttatcgcgcaattggagctggatcctaagtgtcgcggtctgcctttttcatcctttctaatcttgccatttcagaggattacacggctgaagctcctcgtgcagaacattctgaagcgcgtggaggaaaggtcagagcgtgagtgtacagccctggacgctcacaaagagctggagatggttgtaaaagcctgcaacgagggagtgcgtaaaatgtccagaaccgagcaaatgatttccattcagaaaaagatggaatttaagatcaagtctgtgccaatcattagccattcccgctggctgctgaaacagggcgaacttcagcagatgtctggacctaaaacaagtcgcacgctacggactaaaaagctgtttcatgagatctacttattcttgtttaacgaccttctagttatctgtagacagattcccggagacaaataccaagtgttcgatagcgccccaaggggcctcttgagagtggaagaactcgaggaccagggccagacactggcaaacgtcttcatccttcgcctcctcgagaacgcggacgacagagaagcaacttacatgcttaaggcctctagccaaagcgaaatgaagcgttggatgacttccctggcaccaaaccggaggactaagttcgtgagctttacctctcgactcttggattgtccccaggttcagtgcgtgcacccttacgtagcacagcagcccgatgagttgaccctggagctggccgacatacttaatattcttgataaaacagatgatggctggattttcggggagagacttcatgaccaagaaagaggctggttcccaagctcaatgactgaggagatactgaatccaaagatacgaagtcagaacctgaaagagtgcttcagggttcataagatggatgatccacaaagatctcagaataaggataggcgtaagttgggatccagaaaccgacagtag

SEQ ID NO: 299883 - DNA, 2133 bp, Artificial Sequence
  derived and/or modified sequence
atggagaccagagagagcgaggacctggagaagaccagaagaaagagcgccagcgaccagtggaacaccgacaacgagcccgccaaggtgaagcccgagctgctgcccgagaaggaggagaccagccaggccgaccaggacatccaggacaaggagccccactgccacatccccatcaagagaaacagcatcttcaacagaagcatcagaagaaagagcaaggccaaggccagagacaaccccgagagaaacgccagctgcctggccgacagccaggacaacggcaagagcgtgaacgagcccctgaccctgaacatcccctggagcagaatgcccccctgcagaaccgccatgcagaccgaccccggcgcccaggagatgagcgagagcagcagcacccccggcaacggcgccacccccgaggagtggcccgccctggccgacagccccaccaccctgaccgaggccctgagaatgatccaccccatccccgccgacagctggagaaacctgatcgagcagatcggcctgctgtaccaggagtacagagacaagagcaccctgcaggagatcgagaccagaagacagcaggacgccgagatcgaggacaacaccaacggcagccccgccagcgaggacacccccgaggaggaggaggaggaggaggaggaggaggagcccgccagcccccccgagagaaagaccctgccccagatctgcctgctgagcaacccccacagcagattcaacctgtggcaggacctgcccgagatcagaagcagcggcgtgctggagatcctgcagcccgaggagatcaagctgcaggaggccatgttcgagctggtgaccagcgaggccagctactacaagagcctgaacctgctggtgagccacttcatggagaacgagagaatcagaaagatcctgcaccccagcgaggcccacatcctgttcagcaacgtgctggacgtgctggccgtgagcgagagattcctgctggagctggagcacagaatggaggagaacatcgtgatcagcgacgtgtgcgacatcgtgtacagatacgccgccgaccacttcagcgtgtacatcacctacgtgagcaaccagacctaccaggagagaacctacaagcagctgctgcaggagaaggccgccttcagagagctgatcgcccagctggagctggaccccaagtgcagaggcctgcccttcagcagcttcctgatcctgcccttccagagaatcaccagactgaagctgctggtgcagaacatcctgaagagagtggaggagagaagcgagagagagtgcaccgccctggacgcccacaaggagctggagatggtggtgaaggcctgcaacgagggcgtgagaaagatgagcagaaccgagcagatgatcagcatccagaagaagatggagttcaagatcaagagcgtgcccatcatcagccacagcagatggctgctgaagcagggcgagctgcagcagatgagcggccccaagaccagcagaaccctgagaaccaagaagctgttccacgagatctacctgttcctgttcaacgacctgctggtgatctgcagacagatccccggcgacaagtaccaggtgttcgacagcgcccccagaggcctgctgagagtggaggagctggaggaccagggccagaccctggccaacgtgttcatcctgagactgctggagaacgccgacgacagagaggccacctacatgctgaaggccagcagccagagcgagatgaagagatggatgaccagcctggcccccaacagaagaaccaagttcgtgagcttcaccagcagactgctggactgcccccaggtgcagtgcgtgcacccctacgtggcccagcagcccgacgagctgaccctggagctggccgacatcctgaacatcctggacaagaccgacgacggctggatcttcggcgagagactgcacgaccaggagagaggctggttccccagcagcatgaccgaggagatcctgaaccccaagatcagaagccagaacctgaaggagtgcttcagagtgcacaagatggacgacccccagagaagccagaacaaggacagaagaaagctgggcagcagaaacagacagtag

SEQ ID NO: 299884 - DNA, 1803 bp, Artificial Sequence
  derived and/or modified sequence
atgcccccctgcagaaccgccatgcagaccgaccccggcgcccaggagatgagcgagagcagcagcacccccggcaacggcgccacccccgaggagtggcccgccctggccgacagccccaccaccctgaccgaggccctgagaatgatccaccccatccccgccgacagctggagaaacctgatcgagcagatcggcctgctgtaccaggagtacagagacaagagcaccctgcaggagatcgagaccagaagacagcaggacgccgagatcgaggacaacaccaacggcagccccgccagcgaggacacccccgaggaggaggaggaggaggaggaggaggaggagcccgccagcccccccgagagaaagaccctgccccagatctgcctgctgagcaacccccacagcagattcaacctgtggcaggacctgcccgagatcagaagcagcggcgtgctggagatcctgcagcccgaggagatcaagctgcaggaggccatgttcgagctggtgaccagcgaggccagctactacaagagcctgaacctgctggtgagccacttcatggagaacgagagaatcagaaagatcctgcaccccagcgaggcccacatcctgttcagcaacgtgctggacgtgctggccgtgagcgagagattcctgctggagctggagcacagaatggaggagaacatcgtgatcagcgacgtgtgcgacatcgtgtacagatacgccgccgaccacttcagcgtgtacatcacctacgtgagcaaccagacctaccaggagagaacctacaagcagctgctgcaggagaaggccgccttcagagagctgatcgcccagctggagctggaccccaagtgcagaggcctgcccttcagcagcttcctgatcctgcccttccagagaatcaccagactgaagctgctggtgcagaacatcctgaagagagtggaggagagaagcgagagagagtgcaccgccctggacgcccacaaggagctggagatggtggtgaaggcctgcaacgagggcgtgagaaagatgagcagaaccgagcagatgatcagcatccagaagaagatggagttcaagatcaagagcgtgcccatcatcagccacagcagatggctgctgaagcagggcgagctgcagcagatgagcggccccaagaccagcagaaccctgagaaccaagaagctgttccacgagatctacctgttcctgttcaacgacctgctggtgatctgcagacagatccccggcgacaagtaccaggtgttcgacagcgcccccagaggcctgctgagagtggaggagctggaggaccagggccagaccctggccaacgtgttcatcctgagactgctggagaacgccgacgacagagaggccacctacatgctgaaggccagcagccagagcgagatgaagagatggatgaccagcctggcccccaacagaagaaccaagttcgtgagcttcaccagcagactgctggactgcccccaggtgcagtgcgtgcacccctacgtggcccagcagcccgacgagctgaccctggagctggccgacatcctgaacatcctggacaagaccgacgacggctggatcttcggcgagagactgcacgaccaggagagaggctggttccccagcagcatgaccgaggagatcctgaaccccaagatcagaagccagaacctgaaggagtgcttcagagtgcacaagatggacgacccccagagaagccagaacaaggacagaagaaagctgggcagcagaaacagacagtag

SEQ ID NO: 299885 - DNA, 1302 bp, Artificial Sequence
  derived and/or modified sequence
atgtttgagctggtgacttcagaggcctcctattacaagtcgttgaatctgctcgtgtcccactttatggagaatgagcgaataagaaagatcctgcacccatcagaggcgcatattctgttttctaacgtcttagatgttctcgccgtctctgagcgatttcttctcgaactcgagcaccgcatggaagagaacattgtcatttctgacgtttgcgacatagtctaccggtatgctgccgaccacttctctgtctacataacttacgtaagtaatcaaacttaccaggagcgtacatacaaacaactgcttcaggagaaagctgctttccgcgagctgatagcccagctggaactggatcctaaatgcaggggactaccgttctcttccttcctgattttgccatttcagcgcataactaggttaaaactgctggtgcaaaacattctaaagcgggtcgaagagaggtcagagcgcgagtgcacagctctggatgcccacaaggagctcgagatggtcgttaaggcctgtaacgaaggcgttcgtaagatgtcacgcaccgaacagatgatttcaatacagaagaaaatggagtttaagattaagtctgttccaatcatcagccacagcagatggctactgaagcagggggaactgcagcagatgtcagggcctaagactagcagaacgttgagaaccaagaaactgtttcacgagatttatctgttcctgtttaacgacttactggtgatctgtagacagatccctggggataaatatcaagtgtttgacagcgccccgagaggcctgttgcgggtggaagagctcgaagatcaggggcagaccctggccaatgtttttattctgcgactcctcgagaacgcggacgatagagaagcaacgtacatgctgaaagcttctagtcagtcggagatgaagagatggatgacctccttggcgcccaacaggaggaccaaattcgtctccttcacgagccggctgttggactgcccgcaggtgcagtgcgtgcacccttatgtggcacagcagcccgacgaattaacgctggaactcgctgatatcctgaacatacttgataaaactgacgatggctggatttttggcgagcgacttcatgaccaggaacgcggatggttccctagcagtatgacagaggaaattctgaaccctaaaatacggtctcagaacctcaaagagtgctttcgggtgcacaaaatggatgacccacagagatcacagaacaaagaccgcagaaaattgggaagccggaataggcagtag

SEQ ID NO: 299886 - DNA, 1302 bp, Artificial Sequence
  derived and/or modified sequence
atgtttgagctggtgaccagcgaggccagctactacaagagcctgaacctgctggtgagccacttcatggagaatgaaagaatcaggaagatcctgcaccccagcgaggcccacatcctcttcagcaatgtgctggatgtgctggccgtgtctgagcgcttcctgctggagctggagcacaggatggaggagaacatcgtcatcagtgatgtgtgtgacatcgtgtaccgctatgctgctgaccacttctctgtgtacatcacctacgtgagcaaccagacctaccaggagaggacctacaagcagctgctgcaggagaaggccgccttccgggagctgattgcccagctggagctggaccccaagtgccggggcctgcccttcagcagcttcctgatcctgcccttccagaggatcacccggctgaagctgctggtgcagaacatcctgaagagggtggaggagaggtctgagcgggagtgcacagccctggatgcccacaaggagctggagatggtggtgaaggcctgcaatgaaggagtgaggaagatgagcaggacagagcagatgatcagcatccagaagaagatggagttcaagatcaagtctgtgcccatcatcagccacagccgctggctgctgaagcagggcgagctgcagcagatgagcggccccaagaccagcaggaccctgcggaccaagaagctgttccacgagatctacctgttcctgttcaatgacctgctggtgatctgccggcagatccctggggacaagtaccaggtgtttgattctgccccccggggcctgctgcgggtggaggagctggaggaccagggccagaccctggccaacgtgttcatcctgcggctgctggagaatgctgatgaccgggaggccacctacatgctgaaggccagcagccagagcgagatgaagcgctggatgaccagcctggcccccaacagaaggaccaagtttgtgtccttcaccagccggctgctggactgcccccaggtgcagtgtgtgcacccctacgtggcccagcagccagatgagctgaccctggagctggccgacatcctgaacatcctggacaagacagatgatggctggatctttggagagcggctgcatgaccaggagcggggctggttccccagctccatgacagaggagatcctgaaccccaagatccgcagccagaacctgaaggagtgcttccgggtgcacaagatggatgacccccagaggagccagaacaaggacaggaggaagctgggcagcaggaaccggcagtag

SEQ ID NO: 299887 - DNA, 1302 bp, Artificial Sequence
  derived and/or modified sequence
atgttcgagctggtgaccagcgaggccagctactacaagagcctgaatctcctggtgtcccactttatggagaacgagagaattcgcaagatacttcatccttccgaggcacacattctgttctccaacgtcctggatgtgctagccgtgtccgagaggtttctcctcgaattagaacatagaatggaagaaaatatcgtgatctccgatgtgtgtgatatagtgtaccgatacgcagccgaccatttctcggtctacatcacatatgtgagtaatcaaacatatcaggagagaacttacaagcaattgctgcaggaaaaggccgcgtttagggagctcatcgcccagctggagctggaccccaagtgcagaggccttcccttttcctctttcttaattctgccctttcagagaatcacaaggttaaagctcttggtccagaacatcctgaagagagtggaagagcggtctgagagagagtgcaccgcactcgatgcccataaagagctggaaatggtggtcaaggcctgcaatgaaggagtcaggaagatgtcccggacagaacagatgatatcaattcagaagaagatggagtttaagattaagtctgtgcctattatctcacactctcgctggcttttgaaacagggagaactccagcaaatgtccggcccaaaaacatcgcgcaccttaaggacaaaaaaactcttccacgaaatatatctcttcttatttaatgatttgctggtgatttgtcgccagatccctggggacaagtatcaggtgtttgacagcgcccccagaggtctgctgcgggttgaggagctggaagatcagggtcaaaccttagctaacgtgttcatccttcgcctgctggagaacgccgacgatagagaggccacttatatgctgaaagcctcttcacaatctgagatgaaaaggtggatgacaagtcttgcccctaaccgacgaactaagtttgtctctttcacatctaggcttctggattgtcctcaagtccaatgtgtgcatccttatgtcgcccagcagccagatgaactaaccctggaacttgccgatatcctgaatattctcgacaagacagacgatggttggatttttggcgagcgccttcatgatcaggagagaggctggttccccagcagcatgacagaggaaattctgaaccccaagattcgaagccagaatctgaaagaatgtttccgggtccacaagatggacgaccctcaacgctcccagaacaaggacaggcgcaaattgggaagtagaaatagacagtag

SEQ ID NO: 299888 - DNA, 1494 bp, Artificial Sequence
  derived and/or modified sequence
aaaaaaacaacccaaatcaggctggaatgcacggcccagaggtccacggcgaaccctggatcataaggagaccgtgccatgttcgagctggtcacttccgaggcgtcctactacaagagtctgaacctgctcgtgtcccacttcatggagaacgagcggataaggaagatcctgcacccgtccgaggcgcacatcctcttctccaacgtcctggacgtgctggctgtcagtgagcggttcctcctggagctggagcaccggatggaggagaacatcgtcatctctgacgtgtgtgacattgtgtaccgttatgcggccgaccacttctctgtctacatcacctacgtcagcaatcagacctaccaggagcggacctataagcagctgctccaggagaaggcagctttccgggagctgatcgcgcagctagagctcgaccccaagtgcagggggctgcccttctcctccttcctcatcctgcctttccagaggatcacacgcctcaagctgttggtccagaacatcctgaagagggtagaagagaggtctgagcgggagtgcactgctttggatgctcacaaggagctggaaatggtggtgaaggcatgcaacgagggcgtcaggaaaatgagccgcacggaacagatgatcagcattcagaagaagatggagttcaagatcaagtcggtgcccatcatctcccactcccgctggctgctgaagcagggtgagctgcagcagatgtcaggccccaagacctcccggaccctgaggaccaagaagctcttccacgaaatttacctcttcctgttcaacgacctgctggtgatctgccggcagattccaggagacaagtaccaggtatttgactcagctccgcggggactgctgcgtgtggaggagctggaggaccagggccagacgctggccaacgtgttcatcctgcggctgctggagaacgcagatgaccgggaggccacctacatgctaaaggcgtcctctcagagtgagatgaagcgttggatgacctcactggcccccaacaggaggaccaagtttgtttcgttcacatcccggctgctggactgcccccaggtccagtgcgtgcacccatacgtggctcagcagccagacgagctgacgctggagctcgccgacatcctcaacatcctggacaagactgacgacgggtggatctttggcgagcgtctgcacgaccaggagagaggctggttccccagctccatgactgaggagatcttgaatcccaagatccggtcccagaacctcaaggaatgtttccgtgtccacaagatggatgaccctcagcgcagccagaacaaggaccgcaggaagctgggcagccggaatcggcaatgacccccacccagggggccagcgggagcagggcctgcatgagaccccgacagaaggtgggggggggggggctctgggaagcacaggccagcacctccccaggtggcaggatctggc

SEQ ID NO: 299889 - DNA, 1302 bp, Artificial Sequence
  derived and/or modified sequence
atgttcgaactggtgacctccgaagcatcatactataaaagcctaaacttgttagtgtcccactttatggaaaatgagcggattcggaaaattctgcaccctagcgaggctcacatcctgttttctaatgtgttagatgtgctggcggtgtctgagaggttcctgttggagctagaacacaggatggaggagaacattgtgatttccgacgtgtgcgatattgtataccgttatgctgccgaccacttctcagtgtacatcacatacgtgtctaaccagacctatcaagagcggacgtataagcagttgttgcaagaaaaggcagctttcagggaacttatagcccaactggagttggatcctaaatgtcgaggactgccgttcagctccttcctgatcctccctttccagcggatcacaagattgaagctgctcgtgcagaacatactcaaacgggttgaagaaagaagcgagcgggagtgcactgctctggatgcccacaaagagcttgaaatggtcgtgaaagcctgcaacgagggggtgaggaaaatgagtagaacagagcagatgatttcaatccagaagaaaatggaattcaagatcaagtctgtcccgatcatctctcacagtagatggctgttgaagcagggggaactccagcaaatgagcgggccaaaaacatccagaacactgcggacaaagaagctctttcacgaaatctatctctttctcttcaatgacctcttagtgatttgtaggcagattcctggagacaaatatcaagtgtttgattccgctcctagaggactgctgcgcgtggaggagcttgaagatcagggccagacgttagctaatgtgtttatcctgcgccttctggagaatgccgacgatagagaagcgacatatatgctgaaggcctcatcacagagcgaaatgaagcgatggatgactagtctggccccaaaccggagaactaaattcgtctctttcacatcaaggctgctcgactgtcctcaggttcagtgcgtgcacccctacgtggcccagcaaccagatgagctcacccttgaacttgcagacatcctcaacattctggataagactgacgatggttggattttcggtgaacggctgcatgatcaagagcggggatggttcccttcctcaatgaccgaagaaatattgaatccaaaaatcagaagccagaaccttaaggagtgcttccgggtgcataaaatggacgacccccagcgatctcagaataaggatcggaggaagttgggctcgcgaaatagacaatag

SEQ ID NO: 299890 - DNA, 1302 bp, Artificial Sequence
  derived and/or modified sequence
atgttcgagctggtgaccagcgaggccagctactacaagagcctgaacctgctggtgagccacttcatggagaacgagagaatcagaaagatcctgcaccccagcgaggcccacatcctgttcagcaacgtgctggacgtgctggccgtgagcgagagattcctgctggagctggagcacagaatggaggagaacatcgtgatcagcgacgtgtgcgacatcgtgtacagatacgccgccgaccacttcagcgtgtacatcacctacgtgagcaaccagacctaccaggagagaacctacaagcagctgctgcaggagaaggccgccttcagagagctgatcgcccagctggagctggaccccaagtgcagaggcctgcccttcagcagcttcctgatcctgcccttccagagaatcaccagactgaagctgctggtgcagaacatcctgaagagagtggaggagagaagcgagagagagtgcaccgccctggacgcccacaaggagctggagatggtggtgaaggcctgcaacgagggcgtgagaaagatgagcagaaccgagcagatgatcagcatccagaagaagatggagttcaagatcaagagcgtgcccatcatcagccacagcagatggctgctgaagcagggcgagctgcagcagatgagcggccccaagaccagcagaaccctgagaaccaagaagctgttccacgagatctacctgttcctgttcaacgacctgctggtgatctgcagacagatccccggcgacaagtaccaggtgttcgacagcgcccccagaggcctgctgagagtggaggagctggaggaccagggccagaccctggccaacgtgttcatcctgagactgctggagaacgccgacgacagagaggccacctacatgctgaaggccagcagccagagcgagatgaagagatggatgaccagcctggcccccaacagaagaaccaagttcgtgagcttcaccagcagactgctggactgcccccaggtgcagtgcgtgcacccctacgtggcccagcagcccgacgagctgaccctggagctggccgacatcctgaacatcctggacaagaccgacgacggctggatcttcggcgagagactgcacgaccaggagagaggctggttccccagcagcatgaccgaggagatcctgaaccccaagatcagaagccagaacctgaaggagtgcttcagagtgcacaagatggacgacccccagagaagccagaacaaggacagaagaaagctgggcagcagaaacagacagtag

SEQ ID NO: 299891 - DNA, 426 bp, Artificial Sequence
  derived and/or modified sequence
atgtcatcacccccacactctggccagacagttcatcctccctgcagctcaaagttacgaatggaccccactcctgcatggccagcatcctgtgaagctctgatgggaccatcctcttccgcaggacctgctagactccgcttgccaccacggcggcacagtagcctgcctccacggcgcgctagtttcctgatcgtctcgcgagcatcaaagtcctgggaatgtgcaggtccagtgccagcgctaccgggcggcgtagtagcagtccctacctctcaacaggatccccagtgtaggggatcccaggttgcacatcgacgttgcttgtcccgagccatactgcaatctggcccgcagtgtcagtcgtgcctcagtatatgggttacatccgctaggagccgggtacaggcctcaagtcgttcctag

SEQ ID NO: 299892 - DNA, 117 bp, Artificial Sequence
  derived and/or modified sequence
tagctgattgacaaggatcaatcccctaagtggaaacccgctgacctgaaggaagtgactgaagaggacttaaataaccactttaaaagcctcggctccagcgatcttaagttttag

SEQ ID NO: 299893 - DNA, 117 bp, Artificial Sequence
  derived and/or modified sequence
tgactgattgacaaggaccagagccccaagtggaagccagctgacctgaaggaggtgacagaggaggacctgaacaaccacttcaagagcctgggcagcagtgacctgaagttctag

SEQ ID NO: 299894 - DNA, 117 bp, Artificial Sequence
  derived and/or modified sequence
tgactgatcgacaaggaccagagccccaagtggaagcccgccgacctcaaggaggttacagaggaggacctaaataatcactttaagtcactcggctcctcagatctgaaattctag

SEQ ID NO: 299895 - DNA, 117 bp, Artificial Sequence
  derived and/or modified sequence
tagctgatcgataaggaccagagccctaagtggaagcccgctgatctgaaagaggtgacagaagaggatctcaataatcactttaagagcctagggagtagcgacctgaagttttag

SEQ ID NO: 299896 - DNA, 396 bp, Artificial Sequence
  derived and/or modified sequence
ttttaattgataaagaccagagtccaaaatggaaaccagctgatctaaaagaagttactgaggaagatttgaataatcactttaagtctttgggaagcagtgatttgaaattttgaggtgacaggcttttaagaccgcctatgggcagcatccagagcggaccagctccctgtgctggaggactccagtgtgaggcctgctgcttcctttctacattggcctgaaaccagcccaactcagtggtcataatcttctgggcctaccgaagagcaaaagcctacttctagttcttccagttgccagttcaagggctttatctgtcacttcctttgggaacaggtagagtgctttgatttagaatgatggcaataaatgagaaaccaatttgaaattgga

SEQ ID NO: 299897 - DNA, 117 bp, Artificial Sequence
  derived and/or modified sequence
tgactgatcgacaaggaccagagccccaagtggaagcccgccgacctgaaggaggtgaccgaggaggacctgaacaaccacttcaagagcctgggcagcagcgacctgaagttctag

SEQ ID NO: 299898 - protein, 829 aa, Artificial Sequence
  derived and/or modified sequence
MALTSINATPTQLSSSSNCLSDTNQNKQSSESAVSSTVNPVAIHKRSKVKTEPEGLRPASPLALTQGQVSGHGSCGCALPLSQEQLADLKEDLDRDDCKQEAEVVIYETNCHWEDCTKEYDTQEQLVHHINNEHIHGEKKEFVCRWQACTREQKPFKAQYMLVVHMRRHTGEKPHKCTFEGCSKAYSRLENLKTHLRSHTGEKPYVCEHEGCNKAFSNASDRAKHQNRTHSNEKPYICKIPGCTKRYTDPSSLRKHVKTVHGPDAHVTKKQRNDVHLRTPLLKENGDSEAGTEPGGPESTEASSTSQAVEDCLHVRAIKTESSGLCQSSPGAQSSCSSEPSPLGSAPNNDSGVEMPGTGPGSLGDLTALDDTPPGADTSALAAPSAGGLQLRKHMTTMHRFEQLKKEKLKSLKDSCSWAGPTPHTRNTKLPPLPGSGSILENFSGSGGGGPAGLLPNPRLSELSASEVTMLSQLQERRDSSTSTVSSAYTVSRRSSGISPYFSSRRSSEASPLGAGRPHNASSADSYDPISTDASRRSSEASQCSGGSGLLNLTPAQQYSLRAKYAAATGGPPPTPLPGLERMSLRTRLALLDAPERTLPAGCPRPLGPRRGSDGPTYGHGHAGAAPAFPHEAPGGGARRASDPVRRPDALSLPRVQRFHSTHNVNPGPLPPCADRRGLRLQSHPSTDGGLARGAYSPRPPSISENVAMEAVAAGVDGAGPEADLGLPEDDLVLPDDVVQYIKAHASGALDEGTGQVYPTESTGFSDNPRLPSPGLHGQRRMVAADSNVGPSAPMLGGCQLGFGAPSSLNKNNMPVQWNEASATWLSGT

SEQ ID NO: 299899 - DNA, 2490 bp, Artificial Sequence
  derived and/or modified sequence
atggctctaacctctatcaatgcaacgccaacacagctgtcatcgtcttcaaattgtctatccgacactaaccagaataaacagagttcggaaagcgccgtttcaagtactgtaaatccagtagcaatacacaaacgatcgaaagtcaaaactgaaccggagggcttgcgtccagctagccccctggcgctgacacagggtcaggtatcaggccatggctcttgcggctgcgcacttccactttctcaagagcaacttgctgacctcaaagaagaccttgaccgcgacgactgtaagcaggaagctgaggtagtaatatatgaaactaactgtcactgggaagattgcaccaaggaatacgatacccaggagcaactggttcatcacataaacaatgagcatatccacggcgagaagaaagaattcgtgtgcagatggcaggcctgcaccagggaacagaaaccgtttaaagcacagtacatgttggtggttcatatgagaaggcacaccggtgaaaagccccataaatgcacattcgaaggctgcagcaaggcttatagcagactcgagaatttgaagactcacttgaggagccatacaggcgagaaaccatacgtgtgcgagcatgagggttgtaacaaggccttcagcaacgcctctgaccgtgccaagcaccagaatcgcacacattccaacgaaaaaccttatatatgcaagatccccgggtgtacgaagaggtacactgatccatccagtttacggaaacacgttaagactgttcatggtcccgacgctcatgttactaagaagcagcgcaatgatgtgcacctccgaacccctctgctcaaggaaaatggcgactctgaagctgggaccgaaccaggtggccctgagagcaccgaggcctccagtacctctcaggcagtcgaagattgtctgcatgtccgggcaatcaaaactgaaagctccggcttatgtcagagttctcccggtgcccagagttcctgttctagtgagccatcacctctggggtctgctccgaacaatgatagcggcgtggaaatgcctgggaccggacccggctccttaggcgatctcactgcactggatgacacaccccccggtgccgatacttccgctctcgccgcaccatcagccggaggtctgcaactgagaaaacacatgacaacaatgcacaggttcgaacaactaaagaaagaaaagctgaagagtctgaaggactcctgcagttgggccgggccaacgcctcacacccgcaatactaagcttcccccactgcctggctctggctcaattttggaaaacttcagtggctctggaggcgggggccccgctggcctcctgccaaatccccgcctatcagaactctctgcatcagaggtcactatgttgagccaactccaggagcgccgcgattcgagtacttcaaccgtcagcagcgcatatactgtctctcgccgcagttcggggatctctccttacttttcctcacgaagatcttcagaagcctctccacttggggccggtcgtccccataacgcaagctctgccgactcgtatgacccaatctccactgatgcgtctaggaggagctcagaggccagccagtgcagtggaggcagcggcttactcaacctcacccccgcacagcagtactcgcttcgagccaagtacgccgctgctaccggtggtcccccccccacgccacttcccggcctagaaagaatgtcccttcgaacacgcctggctctgctggacgcccccgagcggacactgcccgccggctgtccccgcccactgggcccgagacggggtagcgacgggcctacatacggccacggacatgcaggggcagcaccagcgtttccccacgaggcccccggtggtggcgcaagacgtgcatccgatcctgtgaggcgaccagatgcgctgtcactgccgagggtccagaggttccactctacacataatgttaatccgggccccctacctccttgcgcggaccgccgagggctaaggcttcaaagccacccaagcactgatggcggtttggcgcggggggcttatagccctagaccgcctagcatctctgaaaacgtcgcaatggaggctgtggccgcaggtgtagacggcgccgggcccgaagctgatctgggattgccagaggatgaccttgtgctgccagatgacgtcgtgcagtacatcaaggctcacgccagtggggctttggacgaggggaccggccaggtgtatccaactgaatccacaggtttcagcgacaatccacggctcccatcccctggactccacggtcagcgacgtatggtggccgccgactccaacgtgggaccttcggcacccatgttaggagggtgtcagctaggattcggtgccccttcctcccttaataagaataatatgcccgtacaatggaatgaggcttctgcaacctggctctctgggacatag

SEQ ID NO: 299900 - DNA, 2490 bp, Artificial Sequence
  derived and/or modified sequence
atggccctgaccagcatcaatgccacccccacccagctgagcagcagcagcaactgcctgagtgacaccaaccagaacaagcagagcagcgagagcgctgtgagcagcacagtgaaccctgtggccatccacaagaggagcaaggtgaagacagagcctgagggcctgcggcctgccagccccctggccctgacccagggccaggtgtctggccacggcagctgtggctgtgccctgcccctgagccaggagcagctggccgacctgaaggaggacctggacagagatgactgcaagcaggaggccgaggtggtgatctatgagaccaactgccactgggaggactgcaccaaggagtatgacacccaggagcagctggtgcaccacatcaacaatgagcacatccacggggagaagaaggagtttgtgtgccgctggcaggcctgcacccgggagcagaagcccttcaaggcccagtacatgctggtggtgcacatgagaagacacactggagagaagccccacaagtgcacctttgagggctgcagcaaggcctacagccggctggagaacctgaagacccacctgcggagccacactggagagaagccctacgtgtgtgaacatgagggctgcaacaaggccttcagcaatgccagtgaccgggccaagcaccagaacagaacccacagcaatgagaagccctacatctgcaagatccctggctgcaccaagcgctacacagaccccagcagcctgaggaagcacgtgaagacagtgcacggcccagatgcccacgtgaccaagaagcagagaaatgatgtgcacctgcggacccccctgctgaaggaaaatggagacagcgaggccggcacagagcccggcggccctgagagcacagaggccagcagcaccagccaggccgtggaggactgcctgcacgtgcgggccatcaagacagagagcagcggcctgtgccagagcagccctggggcccagagcagctgcagcagcgagcccagccccctgggcagcgcccccaacaatgattctggagtggagatgcctggcaccggccctggcagcctgggggacctgacagccctggatgacaccccacctggagctgacaccagcgccctggccgcccccagcgctgggggcctgcagctgaggaagcacatgaccaccatgcacagatttgagcagctgaagaaggagaagctgaagagcctgaaggacagctgctcctgggccggccccaccccccacaccaggaacaccaagctgccccccctgcccggcagcggcagcatcctggagaacttcagcggcagcggcggcggcggccctgctggcctgctgcccaacccccggctgtctgagctgagcgccagcgaggtgaccatgctgagccagctgcaggagcggcgggacagcagcaccagcacagtgtcctctgcctacacagtgtccagaagaagcagcggcatcagcccctacttcagcagcagaagaagcagcgaggccagccccctgggcgccggccggccccacaatgccagcagcgctgacagctatgaccccatcagcacagatgccagccgccgcagcagcgaggccagccagtgcagcggcggcagcggcctgctgaacctgaccccagcccagcagtacagcctgcgggccaagtatgctgctgccactggaggccccccacccacccccctgcccggcctggagaggatgagcctgcggacccggctggccctgctggatgcccctgagaggaccctgcctgctggctgcccccggcccctgggcccccggcggggcagtgatggccccacctacggccacggccatgctggagctgccccagccttcccccatgaggcccctgggggcggggcccggcgggccagtgaccctgtgcggcggccagatgccctgagcctgccccgggtgcagcgcttccacagcacccacaacgtgaaccctggccccctgcccccctgtgccgaccggcggggcctgcggctgcagagccaccccagcacagatggcggcctggcccggggggcctacagcccccggccccccagcatcagtgaaaatgtggccatggaggccgtggccgccggcgtggatggagctggccctgaggccgacctgggcctgcctgaagatgacctggtgctgcctgatgatgtggtgcagtacatcaaggcccacgccagcggggccctggatgagggcaccggccaggtgtaccccacagagagcacaggcttcagtgacaacccccggctgcccagccctggcctgcacggccagaggaggatggtggccgctgacagcaatgtgggccccagcgcccccatgctgggcggctgccagctgggctttggagcccccagcagcctgaacaagaacaacatgcctgtgcagtggaatgaggccagcgccacctggctgagcggcacctag

SEQ ID NO: 299901 - DNA, 2490 bp, Artificial Sequence
  derived and/or modified sequence
atggccctgaccagcatcaacgccacccccacccagctgagcagcagttccaattgccttagtgacacaaaccaaaacaaacagagctcggagtctgcagtttcttccaccgtcaatccagtggcgatacataagcgcagcaaggtgaagacagagcctgagggcctgcgccctgcctctccgctcgcactcacacagggccaggtgtccggccacggtagctgcggctgtgcattgcctttatcccaggagcagcttgctgatttgaaggaggacctggacagagacgactgcaagcaggaggctgaggtggtgatttatgaaacgaattgtcattgggaagactgcaccaaggagtatgacacccaggagcagctcgtgcaccacattaacaacgagcatatacacggcgagaaaaaggaattcgtgtgtcgatggcaggcttgtacacgagagcagaagccattcaaggcacagtatatgctggtcgtgcatatgaggcgtcacactggtgaaaaaccacataaatgtacttttgaaggttgttctaaggcctattcacggctggagaacctcaagacccatttaagatcacatactggagaaaaaccttatgtgtgtgaacatgaagggtgcaacaaagccttctccaatgctagcgatcgagctaagcaccagaacagaacacactcaaacgaaaaaccctacatctgcaagattccagggtgcacaaagaggtacactgaccctagttcattgcgcaagcacgtcaaaacggtacacggaccagatgcccacgtgaccaagaagcagcgcaacgatgtccatctacgaacccccctcttgaaggaaaacggcgattccgaagccgggactgaaccaggcggcccagagtctactgaggcaagctctacctcccaggctgtcgaagattgcttgcacgttcgggcaattaagacagagtcctctggcctttgccagtcctcaccgggagctcagtctagctgttccagcgagccatccccactgggcagtgcccctaacaatgatagtggcgtagaaatgccaggcacaggcccaggctcattgggtgatctgaccgcactcgatgacacgccccctggggccgacacaagcgcattagcggctccatccgccggcggtcttcagttgaggaagcacatgaccaccatgcaccggttcgagcagctgaaaaaggaaaaactaaagtctcttaaagatagctgcagctgggctgggcctaccccgcacactcgtaacacaaaattacccccactccccgggtcaggtagtattctggaaaattttagtggtagcgggggcggaggccctgctggactcttacctaacccgcggctgagtgaactaagcgccagcgaagtaactatgctgagccagttacaagaaagaagagatagcagcactagtacagtttcttccgcgtacacggtcagccgaagaagcagcggtataagtccttacttcagctcacgccgttctagcgaagcctctcccttgggagccggccgtccacacaatgcttccagcgccgactcttacgatcctatttcaacggatgccagcagacgcagttcagaggcgagccagtgttccggtggatccggcctcttaaatcttacgcccgcccagcaatacagtctgagagcaaagtacgcagccgcgactggcggcccccctccaacccccctgcctggccttgaacggatgagcctacggacgcggcttgccctcctcgatgctcccgagaggaccctccccgcaggatgtccccggcctctcggccctcggcggggatcagacggtccaacctatggccacggccatgctggggctgcacctgcattccctcatgaagccccgggtggaggcgcccgacgcgcatcagaccccgtgagacgccccgacgcactgagcctgcctcgggtacagcgatttcactcaactcataacgtaaaccctggccccttgccgccatgtgccgaccgacggggattacggctgcagagccatccatcaaccgacggcggcctggcaaggggcgcctattcccctcgacccccaagtataagtgagaacgtggcaatggaggccgtcgccgcaggagtggatggagccggcccagaagccgacctggggctgcctgaggatgacctggtgcttcctgacgatgtggttcagtacatcaaagctcacgccagtggggcactggacgaaggcaccggacaggtttatcccaccgagtctacaggattttccgacaatcctaggctacctagtccagggctccatggccagcgtcgcatggtggccgcagatagtaatgtgggccctagcgcccctatgctgggtggttgccaactaggttttggagctccaagctcactgaacaaaaataacatgcccgtgcaatggaacgaagcctcagctacatggctgtctggcacctag

SEQ ID NO: 299902 - DNA, 2490 bp, Artificial Sequence
  derived and/or modified sequence
atggccttgacaagcatcaatgccactccgacacagctgtctagttcttctaactgcttgagcgatacaaaccaaaataaacagtcctccgaaagcgccgtctccagtacggtgaacccagttgccatccacaagcgctcaaaggtcaagaccgagccagaaggcctgaggcccgcttcccctctggccctgacacagggtcaagtttctggacacggctcgtgtggttgcgcccttccgctgtcccaagagcagctcgcagacctcaaggaagatcttgatcgcgacgattgcaagcaagaggcagaagtggtcatttacgaaaccaactgtcattgggaggattgtacaaaggagtatgatacccaagaacagcttgtgcaccacattaacaacgagcatatacacggcgagaaaaaagagtttgtgtgcaggtggcaagcatgcacacgggaacaaaaacctttcaaggcacaatacatgctagtggtacatatgaggagacacactggagaaaagccacacaaatgtacatttgaggggtgctcaaaggcgtattccaggttagagaatttaaaaactcaccttaggagccatactggggaaaagccctatgtatgtgaacacgaaggctgcaacaaggcctttagtaatgcgtccgaccgtgcaaaacatcagaatcgcacccattccaatgagaagccctatatctgcaaaattccgggatgcacaaagaggtacaccgatccttcgtctctacggaagcacgttaaaacagtgcatggccctgatgcacacgtgactaaaaagcagcgcaatgacgtccatctccgcacaccccttctgaaggagaatggtgattctgaagctgggacagaacccggtgggcctgagtcaaccgaggcttccagcacaagccaggcggtagaggactgcttacatgtaagggctataaagaccgaaagctctggtctttgccagagctcacctggggcacagtccagttgttcatccgagccctctcccctgggtagcgcaccaaataacgacagtggtgtcgaaatgccaggcactggcccaggatcattgggcgacttgacggcgttggacgacactccccctggggcagacaccagtgctctggctgcaccttcagccggtggcctccagctgcgtaagcatatgacgaccatgcaccgctttgaacagcttaagaaggagaagcttaagtctctgaaagatagctgcagttgggccggaccgacacctcacaccagaaacactaagctacctccgctgcccggaagcggctctatcctggaaaatttttccggatcgggagggggtggcccagcaggcttgctaccaaacccccgacttagcgaactctctgcttctgaggttactatgttgtctcagctgcaggagcgtagagacagctcaaccagcacagtatcttctgcttacactgtctctaggcggtctagtggaattagtccctactttagctctaggcggtccagtgaggcatccccattgggtgccggtcggcctcacaacgctagtagtgccgactcatatgatccaatttccactgacgcttcaaggcggagcagtgaggcctctcagtgctcaggaggatctgggctgctgaatttgacccctgcacagcagtattctttacgagccaagtacgcagccgctactgggggaccaccgcctacaccacttccgggtttagaaaggatgtcactccgaacacggctcgcattgctggacgctcccgaacgcaccctaccagccggatgcccacgtcccctaggccctcgacgagggagtgatggcccaacctacgggcacgggcatgctggtgcggctcctgcctttccgcatgaggcacccggaggcggtgctcgcagagcctccgaccctgtgcgaaggcccgatgcgttgtctttgcccagggtacagcggttccacagtacgcataacgtgaatcccggaccattgcccccatgcgccgacagacgcggacttcgcctccaaagccaccctagtactgacggaggtctggcgagaggggcttattcccctcgcccaccttctatttctgagaatgtggccatggaggccgtggccgcaggcgtggatggagctggacccgaagctgacctgggcctgccagaagatgacttagtgctgcccgacgacgtagtgcagtacataaaggcacacgcatccggggcacttgacgaaggtactggtcaggtttacccaacagagagtacgggcttcagtgataatcctaggctaccatcacccggactgcacggccagaggaggatggtcgcggcagatagcaatgttggcccatcagcacctatgctcggtgggtgtcagcttggcttcggagctccgtctagcctaaacaagaacaatatgcccgtccaatggaatgaggcgtcggccacctggctgtcagggacgtag

SEQ ID NO: 299903 - DNA, 2490 bp, Artificial Sequence
  derived and/or modified sequence
atggccctgaccagcatcaacgccacccccacccagctgagcagcagcagcaactgcctgagcgacaccaaccagaacaagcagagcagcgagagcgccgtgagcagcaccgtgaaccccgtggccatccacaagagaagcaaggtgaagaccgagcccgagggcctgagacccgccagccccctggccctgacccagggccaggtgagcggccacggcagctgcggctgcgccctgcccctgagccaggagcagctggccgacctgaaggaggacctggacagagacgactgcaagcaggaggccgaggtggtgatctacgagaccaactgccactgggaggactgcaccaaggagtacgacacccaggagcagctggtgcaccacatcaacaacgagcacatccacggcgagaagaaggagttcgtgtgcagatggcaggcctgcaccagagagcagaagcccttcaaggcccagtacatgctggtggtgcacatgagaagacacaccggcgagaagccccacaagtgcaccttcgagggctgcagcaaggcctacagcagactggagaacctgaagacccacctgagaagccacaccggcgagaagccctacgtgtgcgagcacgagggctgcaacaaggccttcagcaacgccagcgacagagccaagcaccagaacagaacccacagcaacgagaagccctacatctgcaagatccccggctgcaccaagagatacaccgaccccagcagcctgagaaagcacgtgaagaccgtgcacggccccgacgcccacgtgaccaagaagcagagaaacgacgtgcacctgagaacccccctgctgaaggagaacggcgacagcgaggccggcaccgagcccggcggccccgagagcaccgaggccagcagcaccagccaggccgtggaggactgcctgcacgtgagagccatcaagaccgagagcagcggcctgtgccagagcagccccggcgcccagagcagctgcagcagcgagcccagccccctgggcagcgcccccaacaacgacagcggcgtggagatgcccggcaccggccccggcagcctgggcgacctgaccgccctggacgacaccccccccggcgccgacaccagcgccctggccgcccccagcgccggcggcctgcagctgagaaagcacatgaccaccatgcacagattcgagcagctgaagaaggagaagctgaagagcctgaaggacagctgcagctgggccggccccaccccccacaccagaaacaccaagctgccccccctgcccggcagcggcagcatcctggagaacttcagcggcagcggcggcggcggccccgccggcctgctgcccaaccccagactgagcgagctgagcgccagcgaggtgaccatgctgagccagctgcaggagagaagagacagcagcaccagcaccgtgagcagcgcctacaccgtgagcagaagaagcagcggcatcagcccctacttcagcagcagaagaagcagcgaggccagccccctgggcgccggcagaccccacaacgccagcagcgccgacagctacgaccccatcagcaccgacgccagcagaagaagcagcgaggccagccagtgcagcggcggcagcggcctgctgaacctgacccccgcccagcagtacagcctgagagccaagtacgccgccgccaccggcggccccccccccacccccctgcccggcctggagagaatgagcctgagaaccagactggccctgctggacgcccccgagagaaccctgcccgccggctgccccagacccctgggccccagaagaggcagcgacggccccacctacggccacggccacgccggcgccgcccccgccttcccccacgaggcccccggcggcggcgccagaagagccagcgaccccgtgagaagacccgacgccctgagcctgcccagagtgcagagattccacagcacccacaacgtgaaccccggccccctgcccccctgcgccgacagaagaggcctgagactgcagagccaccccagcaccgacggcggcctggccagaggcgcctacagccccagaccccccagcatcagcgagaacgtggccatggaggccgtggccgccggcgtggacggcgccggccccgaggccgacctgggcctgcccgaggacgacctggtgctgcccgacgacgtggtgcagtacatcaaggcccacgccagcggcgccctggacgagggcaccggccaggtgtaccccaccgagagcaccggcttcagcgacaaccccagactgcccagccccggcctgcacggccagagaagaatggtggccgccgacagcaacgtgggccccagcgcccccatgctgggcggctgccagctgggcttcggcgcccccagcagcctgaacaagaacaacatgcccgtgcagtggaacgaggccagcgccacctggctgagcggcacctag

SEQ ID NO: 299904 - DNA, 2354 bp, Artificial Sequence
  derived and/or modified sequence
ccacccaggacgatgagcggctgagatggagacgtctgcctcagccactgcctccgagaagcaagaagccaaaagtgggatcctggaggccgctggcttccccgacccgggtaaaaaggcctctcctttggtggtggctgcagcggcagcagcagcggtagctgcccaaggagtgccgcagcatctcttgccaccattccatgcgcccctaccgattgacatgcgacaccaggaaggaaggtaccattacgagcctcattctgtccacggtgtgcacggtgtcccgtttctccagcccgcgggtgacgccccgcctgagccgcaagcgggcgctgtccatctccccactctcagacgccagcctggacctgcagcggatgatccgcacctcacccaactcgctagtggcctacatcaacaactcccgaagcagctcggcggccagcggttcctacgggcatctgtcagcgggtgccctcagcccagccttcaccttcccccaccccatcaaccccgtggcctaccagcagattctgagccagcagaggggtctggggtcagcctttggacacacaccacccctgatccagccctcacccaccttcctggcccagcagcccatggccctcacctccatcaatgccacgcccacccagctcagcagcagcagcaactgtctgagtgacaccaaccagaacaagcagagcagtgagtcggccgtcagcagcaccgtcaaccctgtcgccattcacaagcgcagcaaggtcaagaccgagcctgagggcctgcggccggcctcccctctggcgctgacgcaggagcagctggctgacctcaaggaagatctggacagggatgactgtaagcaggaggctgaggtggtcatctatgagaccaactgccactgggaagactgcaccaaggagtacgacacccaggagcagctggtgcatcacatcaacaacgagcacatccacggggagaagaaggagtttgtgtgccgctggcaggcctgcacgcgggagcagaagcccttcaaggcgcagtacatgctggtggtgcacatgcggcgacacacgggcgagaagccccacaagtgcacgttcgagggctgctcgaaggcctactcccgcctggagaacctgaagacacacctgcggtcccacaccggggagaagccatatgtgtgtgagcacgagggctgcaacaaagccttctccaacgcctcggaccgcgccaagcaccagaatcgcacccactccaacgagaaaccctacatctgcaagatcccaggctgcaccaagagatacacagaccccagctctctccggaagcatgtgaaaacggtccacggcccagatgcccacgtcaccaagaagcagcgcaatgacgtgcacctccgcacaccgctgctcaaagagaatggggacagtgaggccggcacggagcctggcggcccagagagcaccgaggccagcagcaccagccaggccgtggaggactgcctgcacgtcagagccatcaagaccgagagctccgggctgtgtcagtccagccccggggcccagtcgtcctgcagcagcgagccctctcctctgggcagtgcccccaacaatgacagtggcgtggagatgccggggacggggcccgggagcctgggagacctgacggcactggatgacacacccccaggggccgacaccacagccacaggcctgtcaggacagcatccagccccagcccttgccctcaccaggggtcaaccaggtgtccagcactgtggactcccagctcctggaggccccccagattgacttcgatgccatcatggatgatggcgatcactcgagtttgttctcgggtgctctgagccccagcctcctccacagcctctcccagaactcctcccgcctcaccaccccccgaaactccttgaccctgccctccatccccgcaggcatcagcaacatggctgtcggggacatgagctccatgctcaccagcctcgccgaggagagcaagttcctgaacatgatgacctagaggcccgagcgcctggtgctgagtgcacccggaggggtcatcgctgcccagagcctggggattccagctgtcttgtctttttccaaaaaagtgttaaataggcttgaggggttgttgcgcaatggccgcttcagatgacagatgttgtaagagaaggtttatgggcatcctctctggtcttttggattattcctcagaacaatgaaaaaagtctccataggacaggaaggaatgcaaaactcatttacacagtgctttccagcctttggtgcttacaggaccgcgctgttccggcttcttcacggctgaca

SEQ ID NO: 299905 - DNA, 267 bp, Artificial Sequence
  derived and/or modified sequence
atggccagctgcaccaaccgtggcggccttcccgagaagcactcaagctccaaagtctcgtctcatgcccagatgatccaaaaggctgtcgattttctggatctcctcattgggcacctgtctaaattcagtcccgtgctgatcgtgttccagtttagtcccctgggtttcctcgtcagacaatcaagcgctgacaatgtgcagttcctttcttttgctccatctttgatcttgccttcaggcacgggaaattggctcgtttggtag

SEQ ID NO: 299906 - DNA, 240 bp, Artificial Sequence
  derived and/or modified sequence
atgatcttcacccccttcctgccccccgccgacctgagcgtgttccagaacgtgaagggcctgcagaacgaccccgaggagtgggtggccgtgagcgacgccaccgaggaccccagcggcggcaccggcctgcccagagagcccgccctgctgagaggcagctggagaagcagattccagagagccctggcctgcttcaccaagtgcttcagaggcggctacagagccctgggcatctag

SEQ ID NO: 299907 - DNA, 411 bp, Artificial Sequence
  derived and/or modified sequence
gaccccctgagctggctgagcggcccctggggccaggtgcccgccggcatctgcccccccagacacagaggctggtaccacttcagagaccagatcctggccggcagccccgaggccttcttcgtgctgaacgccgacgtgtgcagcgacttccccctgagcgccatgctggaggcccacagaagacagagacaccccttcctgctgctgggcaccaccgccaacagaacccagagcctgaactacggctgcatcgtggagaacccccagacccacgaggtgctgcactacgtggagaagcccagcaccttcatcagcgacatcatcaactgcggcatctacctgttcagccccgaggccctgaagcccctgagagacgtgttccagagaaaccagcaggacggccagtag

SEQ ID NO: 299908 - DNA, 495 bp, Artificial Sequence
  derived and/or modified sequence
atgctgaaggccgtgatcctgatcggcggcccccagaagggcaccagattcagacccctgagcttcgaggtgcccaagcccctgttccccgtggccggcgtgcccatgatccagcaccacatcgaggcctgcgcccaggtgcccggcatgcaggagatcctgctgatcggcttctaccagcccgacgagcccctgacccagttcctggaggccgcccagcaggagttcaacctgcccgtgagatacctgcaggagttcgcccccctgggcaccggcggcggcctgtaccacttcagagaccagatcctggccggcagccccgaggccttcttcgtgctgaacgccgacgtgtgcagcgacttccccctgagcgccatgctggaggcccacagaagacagagacaccccttcctgctgctgggcaccaccgccaacagaacccagagcctgaactacggctgcatcgtggagaacccccagacccacgaggtgtag

SEQ ID NO: 299909 - DNA, 411 bp, Artificial Sequence
  derived and/or modified sequence
gatcccctcagctggctgtccgggccatggggccaagtacccgccggtatttgtcctcctcggcatagaggctggtaccacttcagagatcagattctcgccggcagccctgaggcatttttcgtgttaaacgctgatgtgtgctcggacttccccttgagcgcaatgttagaagcacatcgccggcaacgacaccctttccttctcctcggcacaaccgcaaaccgaacgcagtccctgaactacggatgcattgtggaaaacccacagacgcatgaggtgctgcattatgttgaaaagccgtcaacgtttatatccgacataatcaactgcggaatatatcttttttcaccggaggccctcaagccactacgagacgtgtttcaaagaaaccaacaggacggacagtag

SEQ ID NO: 299910 - DNA, 495 bp, Artificial Sequence
  derived and/or modified sequence
atgctcaaagccgtcattctgattggcggaccacaaaaaggaacacgattccggccattgtcattcgaagtacccaaacccctcttccctgtcgccggggtgcctatgatacagcatcacatcgaggcctgtgcccaggttccagggatgcaggaaatactgctgattggcttttaccagcccgacgaaccactgacacaattcctggaagccgctcagcaggaattcaacctgcccgtgcgctacctacaggagttcgctcccctgggcaccggtggcggcctgtatcatttccgcgatcagattctcgcggggtcgccagaggccttctttgtacttaacgctgatgtttgctcagattttccgttgtcggcaatgctggaggctcacagacggcagagacatccatttctattattgggtaccactgccaatcggacccagtcattgaattacggctgtatcgtcgaaaacccccagacccatgaggtttag

SEQ ID NO: 299911 - DNA, 411 bp, Artificial Sequence
  derived and/or modified sequence
gaccccctgtcctggctgagcggcccctggggccaggtgcctgctggcatctgccccccaagacaccggggctggtaccacttccgggaccagatcctggccggcagccctgaggccttctttgtgctgaatgctgatgtgtgcagcgacttccccctgagcgccatgctggaggcccaccggcggcagaggcaccccttcctgctgctgggcaccacagccaacagaacccagagcctgaactacggctgcatcgtggagaacccccagacccatgaggtgctgcactacgtggagaagcccagcaccttcatcagtgacatcatcaactgtggcatctacctgttcagccctgaggccctgaagcccctgagagatgtgttccagaggaaccagcaggacggccagtag

SEQ ID NO: 299912 - DNA, 495 bp, Artificial Sequence
  derived and/or modified sequence
atgctgaaggccgtcatcctgattggaggcccccagaagggcacccgcttccggcccctgagctttgaggtgcccaagcccctcttccctgtggccggcgtgcccatgatccagcaccacatcgaggcctgtgcccaggtgcccggcatgcaggagatcctgctgattggcttctaccagccagatgagcccctgacccagttcctggaggccgcccagcaggagttcaacctgcctgtgcgctacctgcaggagtttgcccccctgggcactggaggcggcctgtaccacttccgggaccagatcctggccggcagccctgaggccttctttgtgctgaatgctgatgtgtgcagcgacttccccctgagcgccatgctggaggcccaccggcggcagaggcaccccttcctgctgctgggcaccacagccaacagaacccagagcctgaactacggctgcatcgtggagaacccccagacccatgaggtgtag

SEQ ID NO: 299913 - DNA, 411 bp, Artificial Sequence
  derived and/or modified sequence
gaccccctgagctggctgagcggcccctggggccaggtgcccgccggcatctgcccacctagacaccgcggctggtaccacttccgtgaccagatactggccggttcccccgaggccttcttcgttcttaatgccgacgtgtgtagcgattttcctctctctgccatgctggaagcgcaccggcgacaacgtcatccatttcttctgctggggacaactgcaaatcgtacgcagtcccttaactatggttgtatagtcgagaaccctcagactcacgaagtcctccattatgtggaaaagcccagtacattcatttcagacatcataaattgcggcatctacctgttttctcctgaagctctcaaaccgctgcgggatgtgttccaacggaaccaacaggacggtcagtag

SEQ ID NO: 299914 - DNA, 495 bp, Artificial Sequence
  derived and/or modified sequence
atgctgaaggccgtgatcctgatcggcggcccccagaagggcacccgatttaggccgctgtcttttgaggttccaaaaccactgttcccagtagctggagtgcctatgatacaacatcatatcgaggcatgcgcgcaggtgccgggcatgcaggaaattctcttaatcggattctaccagccagacgagcccctgacacagttcttggaagcggcccagcaagagttcaacctaccggtaagatacctgcaggagtttgcacccctaggcacaggtgggggcctgtatcactttcgagaccagatcttggccggttcgccagaggcgttttttgtgcttaacgcagacgtgtgtagcgatttccccctgtccgccatgctggaagcacatcggaggcagcgtcatccattcttgctcctgggaacgaccgctaaccgaacacagtcactaaactacggatgtattgttgaaaatccccaaacacacgaagtatag

SEQ ID NO: 299915 - DNA, 411 bp, Artificial Sequence
  derived and/or modified sequence
gatccactcagctggctctctgggccatggggccaagtgccagccggaatctgcccgccaagacatcgtggttggtatcacttcagggatcagatcctggcgggtagcccagaagctttctttgtgctcaacgccgacgtatgcagtgacttccccctctctgccatgctggaagcccacaggcggcagcgacacccttttctgctcctgggaacaactgcaaatagaactcaatcactcaattatggctgtatcgtggaaaatccccaaactcacgaggtgctgcattatgtagaaaagcctagcacctttatcagcgacattataaattgtggaatttacctgttcagcccagaggccctgaaacctctgagggatgtgtttcaacgcaaccagcaggatggtcagtag

SEQ ID NO: 299916 - DNA, 495 bp, Artificial Sequence
  derived and/or modified sequence
atgcttaaggccgtgatcctgattggcggtcctcagaaaggcactagatttagaccactctccttcgaagttcctaaacccctgttcccagtggccggagtcccaatgattcagcatcacatagaggcctgtgcccaggtcccaggaatgcaagaaatattactgattggtttctaccagcccgacgaacccctcacccagtttctcgaagccgcacagcaggagttcaatctacctgtgcgctaccttcaggagtttgcgccactggggaccggtggaggactgtaccactttcgggaccaaatcctcgccggatctccagaagcattttttgtgctcaatgccgatgtgtgtagcgacttccctctgagtgcaatgctggaggcgcacagacgacaaagacatccttttctgctgctgggaacaactgctaacagaactcagtctctaaattacgggtgcatcgtcgagaatccacagacacatgaagtgtag

SEQ ID NO: 299917 - DNA, 859 bp, Artificial Sequence
  derived and/or modified sequence
gggcggcagagctggagtgaagggagctagtggtaaagggagctggtggaggggtggcggcaggggtaaggggcaggggacaccctctagacggagagcgggctccgaggtcctggctggccctcggtgcgcccgcccctgtgttggtcccacaatccctggcaatgagaggccagggtttattggacagagtcagttgtggggttcagagggtcagcaatcaatcaatcctccgaatccagagatttagacccagtcgtccgtattaggactggaggggggtcaataggttcagtgtttgagatgccaagggaacctgtcttttgatttggggttcaacatacagagtttaggtagcagtcaccattatgctcaaagcggtgatcctgattggaggccctcaaaagggaactcgcttcagacctttgtcttttgaggtgcccaaaccattgtttcctgtggcaggggtccctatgatccaacaccatattgaagcctgtgcccaggtccctggaatgcaggagattctgctcattggcttctaccaacctgatgagcccctcacccagttcctagaagccgcccagcaggagtttaaccttccagtcaggtacctgcaggaatttgcccccctaggcacagggggtggtctttaccattttcgagaccagatcctggctgggagccccgaggcattcttcgtgctcaatgctgatgtctgctccgacttccccttgagtgctatgttggaagcccaccgacgccagcgtcaccctttcttactccttggcactacggctaacaggacgcaatccctcaactacggctgcatcgttgagaatccacagacacacgaggt

SEQ ID NO: 299918 - DNA, 640 bp, Artificial Sequence
  derived and/or modified sequence
ccggcttgggcctctagctctcccgtgtgtagctggaggctctgagtttactgaagatgagcgggggtgggggtggggcaggtgggattgggaaaagatctggatacctgggaaggtctatgtcagcacgcagaaggtttgaggagcattgcttctcatacagtaaggtttcccaacagtgatgtcacaagattgaccacattgatcacaatatggagtctggagaacggttaccatcctcagcagcctcctctactacaccaacttcatcttcgacaccttctgtggcttcagtagtttcaaaaggtggcctttccactggagttgcttcacttagctctacaatcaacccatgtggacatttattcagaacagctggggatcaaccgtttaacctgtccacagtgtcgagtgccttcccaatggtcagccacccagtctttggtctacattcagccagctcagggcattcagaatttggtggtttggggacacttggtacacccacagccttagccgcacatccccaactagcatcttttccaggtgcagaatggtggcgaacaactgatgctcatactcgtacaggagcaaccttctttccaccattactgggaattccaccactatttgctccccc

SEQ ID NO: 299919 - protein, 520 aa, Artificial Sequence
  derived and/or modified sequence
MESGERLPSSAASSTTPTSSSTPSVASVVSKGGLSTGVASLSSTINPCGAEWWRTTDAHTRTGATFFPPLLGIPPLFAPPAQNHDSSSFHSRTSGKSNRNGPEKGVNGSINGSNTSSVIGINTSVLSTTASSSMGQTKSTSSGGGNRKCNQEQSKNQPLDARVDKIKDKKPRKKAMESSSNSDSDSGTSSDTSSEGISSSDSDDLEEDEEEEDQSIEESEDDDSDSESEAQHKSNNQVLLHGISDPKADGQKATEKAQEKRIHQPLPLASESQTHSFQSQQKQPQVLSQQLPFIFQSSQAKEESVNKHTSVIQSTGLVSNVKPLSLVNQAKKETYMKLIVPSPDVLKAGNKNTSEESSLLTSELRSKREQYKQAFPSQLKKQESSKSLKKVIAALSNPKATSSSPAHPKQTLENNHPNPFLTNALLGNHQPNGVIQSVIQEAPLALTTKTKMQSKINENIAAASSTPFSSPVNLSTSGRRTPGNQTPVMPSASPILHSQGKEKAVSNNVNPRKMMKKKMR

SEQ ID NO: 299920 - DNA, 1563 bp, Artificial Sequence
  derived and/or modified sequence
atggaatctggagaacgcctgccatctagcgccgctagctccacaactccaaccagttctagtaccccttcggtcgcttctgttgtcagcaagggcggcctcagcactggggtggcaagcctttcatctacaatcaatccctgcggggcagagtggtggaggacgactgacgcgcacacacggacaggcgccactttttttcccccattgctgggtatcccacctctgtttgccccaccagcacaaaaccacgactcaagctctttccacagccgaacctcagggaagtcaaaccgaaatgggcctgaaaaaggggttaatgggtctattaatgggtctaatacttcttcagtgatcggaatcaacacttccgttctgtccacaactgcgtcgagtagcatggggcaaaccaaatccacaagctccggcgggggaaaccgcaaatgtaaccaggaacaaagtaaaaatcagccattggacgctcgagtagataagattaaggacaaaaaaccacgaaaaaaggccatggaatcatcatccaattccgatagcgacagcggtacgtcttctgatacttctagcgaaggaattagctctagtgatagcgacgacttagaagaggacgaggaggaggaggaccagtcgatagaagaatcggaagatgacgactcagacagcgaaagcgaagcacagcacaaatctaacaatcaagtgctgctgcatggaatcagcgaccccaaggcagatggtcaaaaggctaccgagaaggcgcaggagaaaagaattcatcagccacttcctttggcatctgagtctcagacccattcctttcaatctcaacagaagcagccccaggtgttgagccaacagctgccattcattttccagtccagccaggccaaagaggagtcagtgaataagcacacctccgttatccagtccactggattggtatcaaacgtgaaacctctaagcctcgtgaatcaggctaaaaaggaaacctatatgaagttaatagtgccctcacccgatgttctcaaagcaggtaataaaaataccagtgaagaaagcagcctcctgacctcagagctgcggtcaaaaagagagcagtataaacaagcgtttccatcacagctaaagaagcaagagtcatccaaaagcttgaagaaggtgatagctgccctttccaacccaaaagctacttcctccagcccagcacacccaaaacaaaccctggagaacaaccatcccaaccccttcttgacaaatgcactgctgggtaatcaccagccaaacggtgtcatccagagtgtgattcaggaggcacctctagcgttgactactaaaacaaaaatgcaatcaaagatcaatgaaaatatagcagcggccagtagcaccccattttcctctccagtgaatctgagtaccagcggcaggcgcacccctgggaatcagaccccagtgatgccatcagcgtcaccaattctgcatagccaggggaaggaaaaggctgtatctaacaacgtaaacccccgtaaaatgatgaagaagaaaatgcggtag

SEQ ID NO: 299921 - DNA, 1563 bp, Artificial Sequence
  derived and/or modified sequence
atggagagcggggagcggctgcccagcagcgctgccagcagcaccacccccaccagcagcagcacccccagcgtggcctctgtggtgtccaaaggaggcctgagcactggagtggccagcctgagcagcaccatcaacccctgtggggctgagtggtggaggaccacagatgcccacaccaggactggagccaccttcttcccccccctgctgggcatcccccccctgtttgcccccccagcccagaaccacgacagcagcagcttccacagcaggaccagcggcaagagcaacagaaatggacctgagaagggcgtgaatggcagcatcaatggcagcaacaccagctctgtgattggcatcaacacctctgtgctgagcaccacagccagcagctccatgggccagaccaagagcaccagcagcggcggcggcaacaggaagtgcaaccaggagcagagcaagaaccagcccctggatgcccgggtggacaagatcaaggacaagaagcccaggaagaaggccatggagagcagcagcaacagcgacagcgacagcggcaccagcagtgacaccagcagcgagggcatcagcagcagtgacagtgatgacctggaggaggatgaggaggaggaggaccagagcattgaggagagtgaagatgatgacagcgacagcgagagcgaggcccagcacaagagcaacaaccaggtgctgctgcacggcatcagtgaccccaaggcagatggccagaaggccacagagaaggcccaggagaagaggatccaccagcccctgcccctggccagcgagagccagacccacagcttccagagccagcagaagcagccccaggtgctgagccagcagctgcccttcatcttccagagcagccaggccaaggaggagagcgtgaacaagcacaccagcgtcatccagagcacaggcctggtgtccaatgtgaagcccctgagcctggtgaaccaggccaagaaggagacctacatgaagctgattgtgcccagcccagatgtgctgaaggccggcaacaagaacaccagcgaggagagcagcctgctgaccagcgagctgcggagcaagcgggagcagtacaagcaggccttccccagccagctgaagaagcaggagagcagcaagagcctgaagaaggtgattgctgccctgagcaaccccaaggccaccagcagcagccctgcccaccccaagcagaccctggagaacaaccaccccaaccccttcctgaccaatgccctgctgggcaaccaccagcccaacggggtcatccagagcgtcatccaggaggcccccctggccctgaccaccaagaccaagatgcagagcaagatcaatgaaaatattgctgctgccagcagcacccccttcagcagccctgtgaacctgagcaccagcggccgccgcaccccaggcaaccagacccctgtgatgcccagcgccagccccatcctgcacagccagggcaaggagaaggctgtgagcaacaacgtgaaccccaggaagatgatgaagaagaagatgaggtag

SEQ ID NO: 299922 - DNA, 1563 bp, Artificial Sequence
  derived and/or modified sequence
atggagagcggcgagcggctgcccagcagcgccgccagcagcaccaccccgacatccagctcaacccccagcgtcgcttctgtggtaagcaagggtggactgagcacaggggttgcctcgctctcgagcacgatcaatccttgtggggcagaatggtggcggacgaccgatgcgcatacgaggaccggcgctaccttcttccctccccttttaggaatccccccactctttgctccgcccgcacagaaccatgacagttcctcgttccatagtcggacttccgggaagagcaaccggaacggccctgaaaaaggtgtaaatgggagcatcaacggctctaatacttccagtgtaatcggcatcaacacctccgtcttgtctacgactgccagctctagcatgggtcagactaagagcacttcatcgggtggcgggaatagaaagtgcaaccaggagcagtccaaaaatcagcctctcgatgcacgcgtagataagataaaagataagaaacccagaaagaaggcgatggagtcgtcctcaaactccgattcagacagcgggacatcctccgatactagcagtgaaggaatcagcagctccgacagtgacgatctggaggaagacgaggaagaagaggatcaaagcatcgaggaatcagaagacgacgactctgattcggaatcagaggcacagcataagtctaacaaccaggtgcttctgcacggtatcagtgaccctaaggctgacggccagaaggctacggagaaggcccaggagaaacgcatccaccaacctctgcccctggcatccgagagtcagactcattcctttcagtcacagcaaaagcagcctcaggtgctgagtcagcagctgccgtttattttccaatcttctcaggctaaagaggagtccgttaacaagcacacaagtgtgattcaatctacggggttagtttcaaacgtgaaacccctgtcacttgtgaaccaagcaaaaaaggagacttatatgaagctcatcgtcccaagccctgacgtcctcaaggctgggaacaaaaatacaagtgaggagtcaagcctccttacttccgagcttcgatcaaagcgtgagcagtacaagcaggccttccctagccagctgaaaaaacaggagagttcaaagagccttaagaaagtcattgctgcactgagcaacccgaaagccaccagttcatcccccgcccatcccaagcagactctggagaacaaccaccctaatccctttcttactaacgcgctgttagggaatcatcagcccaacggcgtgatccagtctgtaattcaggaagcgccactcgccttaaccacaaaaacgaaaatgcagagcaaaatcaatgaaaacatagcagccgcatcctctactcctttttccagtccagtcaatctcagcacctctggaagacgtactcccggaaaccaaacaccagtgatgcccagtgctagtcctatcctgcacagccagggcaaggagaaagccgtgtccaacaatgtgaatccccgcaagatgatgaagaaaaagatgcgctag

SEQ ID NO: 299923 - DNA, 1563 bp, Artificial Sequence
  derived and/or modified sequence
atggaaagcggcgagagactcccatccagcgccgcatcctcaacaacccccactagctcctccacgcccagcgtggcaagtgtggtgtcaaagggcggactctctacgggcgtcgcgagcttgtcctccaccatcaatccttgcggcgcagaatggtggcgaacaactgatgcccatactaggaccggtgccactttctttcccccattgttaggcattccaccactcttcgccccaccagcacagaaccatgatagcagctcgtttcacagtaggacctccggaaaaagcaatcgtaacggaccggagaagggagtgaacggctctataaacggaagcaacacctcatcggtgatcggcattaacacgagtgtcttatcaaccacagctagttcttctatgggtcagaccaagtcaaccagcagtggaggcggaaacaggaaatgtaaccaggaacagagcaaaaatcagccgcttgatgcacgcgtggacaagatcaaggataaaaagccgcgtaagaaggctatggaaagctcctcaaattcagactccgactctggcacatcatcagatacatcctctgaaggaatatcctcatctgacagcgacgacctggaagaggatgaggaagaagaggaccagtctattgaagagtcagaagatgatgatagcgattccgaaagtgaagcccagcacaaatccaacaaccaggttctgctgcatgggatctcagatccaaaggccgacggacaaaaggcaacagagaaggcccaggagaagcggattcaccagccactgcccctcgcctcagaatcccagacacacagcttccagtctcaacaaaagcagccccaggtgctgtcccagcagctgccatttatcttccagtcttctcaagctaaggaagagagtgtcaataagcacacttcagttattcagagcacaggcctggtgtcgaatgtgaagccccttagtctggtcaatcaggctaaaaaggagacatatatgaaactaatcgtgccctctcctgacgtgctgaaggccggaaataagaatacctccgaagaaagctccttactgacatcagagttgcgaagtaaacgcgagcaatacaagcaggccttcccgagtcagctgaaaaaacaggaaagtagtaagtctttgaagaaagttatagctgctctctcgaatcccaaagcaacttcctccagtcctgcacatcccaagcaaaccctcgaaaacaaccacccgaacccctttttaacaaacgctttgttgggaaaccatcagccaaacggggtgattcaatctgtcattcaggaagctcccctcgccctgactacaaagacaaagatgcaaagcaagattaacgaaaatatcgctgcagcctcatccaccccctttagctctcctgttaacctctccacgtctgggaggcgaactcccggaaaccagacgcctgtcatgccctcagcgagcccaattttgcattctcagggcaaagaaaaggccgtttcaaataacgtcaacccccgtaaaatgatgaaaaagaaaatgcgctag

SEQ ID NO: 299924 - DNA, 1912 bp, Artificial Sequence
  derived and/or modified sequence
acttggttcatgaagccttcgcctagaagtgaagctgctgaacaaaccttgagaagaatcatctcctgcttcaatctgctgctggataggaactaatcagagagagagaggcggaagacggagaaggagggagtcgaaggctttcccgatcacaaatctcacctccactacaactctctttatacttttcttgcagaaataataatagaaataaggaggtggtggggtttccaaaaatcttaaccttcaaccatctggggaaaaggcaaaaatcccatctaccgcaactctcagttcgagagtaaaggtttcccaacagtgatgtcacaagattgaccacattgatcacaatatggagtctggagaacggttaccatcctcagcagcctcctctactacaccaacttcatcttcgacaccttctgtggcttcagtagtttcaaaaggtggcctttccactggagttgcttcacttagctctacaatcaacccatgtggtgcagaatggtggcgaacaactgatgctcatactcgtacaggagcaaccttctttccaccattactgggaattccaccactatttgctcccccagcccagaatcatgattcttcttcattccattcaaggacttcgggaaaaagtaatcgaaatggtcccgaaaaaggtgtaaatgggtcaataaatggaagtaatacatcatctgtaattggtatcaacacatctgtactatccactactgcttcaagttccatgggacaaactaaaagtacaagctcaggtggaggaaatcgaaaatgtaatcaggaacaaagcaaaaaccagcctttggatgctagagttgacaaaatcaaagataagaaaccaaggaagaaagcaatggaaagttctagcaacagtgatagtgattcaggcacatcatcagacacctcaagtgaaggcattagtagcagtgattcagatgatctagaagaagatgaagaagaagaagatcaaagtattgaagaaagtgaagatgatgattctgattcagagagtgaagcacaacataaaagtaacaaccaggtgctattacatggtatttcagacccaaaagcagatggacagaaagcaactgaaaaagcccaggaaaaaagaatacaccagccattacctcttgcgtctgaatcccagactcactcattccaatcccagcagaagcagcctcaggttttgtcacagcagcttccatttattttccaaagctctcaggcaaaggaggaatctgtgaacaaacacaccagtgtaatacagtctacgggattggtgtccaatgtgaaacctttatctttggtaaatcaagccaaaaaggaaacttacatgaaactcatagttccttctcctgatgttcttaaagcagggaataaaaatacctctgaagaatctagtttattgaccagtgaattgagatccaaacgggaacaatataaacaggcattcccatcacagttaaagaaacaagagtcatcgaagagcctgaagaaggttattgcagctttgtcaaatccaaaagcaacctctagttcaccagcacatccaaaacaaacattagaaaacaaccacccaaatccattcttgacaaatgcacttttaggtaatcaccaaccaaatggagttattcaaagtgtcattcaagaagctcctctagcacttactaccaaaactaaaatgcagagcaagattaatgaaaacattgctgctgcaagtagcacccctttttcctcacctgtaaatctgagtacaagtgggagaagaacccctggcaatcagacacctgtaatgccctctgcctctcccatcctgcatagtcaagggaaggaaaaagcagttagcaataatgtaaacccaaggaagatgatgaagaagaagatgagg

SEQ ID NO: 299925 - DNA, 1563 bp, Artificial Sequence
  derived and/or modified sequence
atggagagcggcgagagactgcccagcagcgccgccagcagcaccacccccaccagcagcagcacccccagcgtggccagcgtggtgagcaagggcggcctgagcaccggcgtggccagcctgagcagcaccatcaacccctgcggcgccgagtggtggagaaccaccgacgcccacaccagaaccggcgccaccttcttcccccccctgctgggcatcccccccctgttcgccccccccgcccagaaccacgacagcagcagcttccacagcagaaccagcggcaagagcaacagaaacggccccgagaagggcgtgaacggcagcatcaacggcagcaacaccagcagcgtgatcggcatcaacaccagcgtgctgagcaccaccgccagcagcagcatgggccagaccaagagcaccagcagcggcggcggcaacagaaagtgcaaccaggagcagagcaagaaccagcccctggacgccagagtggacaagatcaaggacaagaagcccagaaagaaggccatggagagcagcagcaacagcgacagcgacagcggcaccagcagcgacaccagcagcgagggcatcagcagcagcgacagcgacgacctggaggaggacgaggaggaggaggaccagagcatcgaggagagcgaggacgacgacagcgacagcgagagcgaggcccagcacaagagcaacaaccaggtgctgctgcacggcatcagcgaccccaaggccgacggccagaaggccaccgagaaggcccaggagaagagaatccaccagcccctgcccctggccagcgagagccagacccacagcttccagagccagcagaagcagccccaggtgctgagccagcagctgcccttcatcttccagagcagccaggccaaggaggagagcgtgaacaagcacaccagcgtgatccagagcaccggcctggtgagcaacgtgaagcccctgagcctggtgaaccaggccaagaaggagacctacatgaagctgatcgtgcccagccccgacgtgctgaaggccggcaacaagaacaccagcgaggagagcagcctgctgaccagcgagctgagaagcaagagagagcagtacaagcaggccttccccagccagctgaagaagcaggagagcagcaagagcctgaagaaggtgatcgccgccctgagcaaccccaaggccaccagcagcagccccgcccaccccaagcagaccctggagaacaaccaccccaaccccttcctgaccaacgccctgctgggcaaccaccagcccaacggcgtgatccagagcgtgatccaggaggcccccctggccctgaccaccaagaccaagatgcagagcaagatcaacgagaacatcgccgccgccagcagcacccccttcagcagccccgtgaacctgagcaccagcggcagaagaacccccggcaaccagacccccgtgatgcccagcgccagccccatcctgcacagccagggcaaggagaaggccgtgagcaacaacgtgaaccccagaaagatgatgaagaagaagatgagatag

SEQ ID NO: 299926 - protein, 143 aa, Artificial Sequence
  derived and/or modified sequence
MESGERLPSSAASSTTPTSSSTPSVASVVSKGGLSTGVASLSSTINPCGHLFRTAGDQPFNLSTVSSAFPMVSHPVFGLHSASSGHSEFGGLGTLGTPTALAAHPQLASFPGAEWWRTTDAHTRTGATFFPPLLGIPPLFAPP

SEQ ID NO: 299927 - protein, 2068 aa, Artificial Sequence
  derived and/or modified sequence
MESGERLPSSAASSTTPTSSSTPSVASVVSKGGLSTGVASLSSTINPCGHLFRTAGDQPFNLSTVSSAFPMVSHPVFGLHSASSGHSEFGGLGTLGTPTALAAHPQLASFPEWWRTTDAHTRTGATFFPPLLGIPPLFAPPAQNHDSSSFHSRTSGKSNRNGPEKGVNGSINGSNTSSVIGINTSVLSTTASSSMGQTKSTSSGGGNRKCNQEQSKNQPLDARVDKIKDKKPRKKAMESSSNSDSDSGTSSDTSSEGISSSDSDDLEEDEEEEDQSIEESEDDDSDSESEAQHKSNNQVLLHGISDPKADGQKATEKAQEKRIHQPLPLASESQTHSFQSQQKQPQVLSQQLPFIFQSSQAKEESVNKHTSVIQSTGLVSNVKPLSLVNQAKKETYMKLIVPSPDVLKAGNKNTSEESSLLTSELRSKREQYKQAFPSQLKKQESSKSLKKVIAALSNPKATSSSPAHPKQTLENNHPNPFLTNALLGNHQPNGVIQSVIQEAPLALTTKTKMQSKINENIAAASSTPFSSPVNLSTSGRRTPGNQTPVMPSASPILHSQGKEKAVSNNVNPVKTQHHSHPAKSLVEQFRGTDSDIPSSKDSEDSNEDEEEDDEEEDEEDDEDDESDDSQSGTSKRRRVTDERELRIPLEYGWQRETRIRNFGGRLQGEVAYYAPCGKKLRQYPEVIKYLSRNGIMDISRDNFSFSAKIRVGDFYEARDGPQGMQWCLLKEEDVIPRIRAMEGRRGRPPNPDRQRAREESRMRRRKGRPPNVGNAEFLDNADAKLLRKLQAQEIARQAAQIKLLRKLQKQEQARVAKEAKKQQAIMAAEEKRKQKEQIKIMKQQEKIKRIQQIRMEKELRAQQILEAKKKKKEEAANAKLLEAEKRIKEKEMRRQQAVLLKHQERERRRQHMMLMKAMEARKKAEEKERLKQEKRDEKRLNKERKLEQRRLELEMAKELKKPNEDMCLADQKPLPELPRIPGLVLSGSTFSDCLMVVQFLRNFGKVLGFDVNIDVPNLSVLQEGLLNIGDSMGEVQDLLVRLLSAAVCDPGLITGYKAKTALGEHLLNVGVNRDNVSEILQIFMEAHCGQTELTESLKTKAFQAHTPAQKASVLAFLINELACSKSVVSEIDKNIDYMSNLRRDKWVVEGKLRKLRIIHAKKTGKRDTSGGIDLGEEQHPLGTPTPGRKRRRKGGDSDYDDDDDDDSDDQGDEDDEDEEDKEDKKGKKTDICEDEDEGDQAASVEELEKQIEKLSKQQSQYRRKLFDASHSLRSVMFGQDRYRRRYWILPQCGGIFVEGMESGEGLEEIAKEREKLKKAESVQIKEEMFETSGDSLNCSNTDHCEQKEDLKEKDNTNLFLQKPGSFSKLSKLLEVAKMPPESEVMTPKPNAGANGCTLSYQNSGKHSLGSVQSTATQSNVEKADSNNLFNTGSSGPGKFYSPLPNDQLLKTLTEKNRQWFSLLPRTPCDDTSLTHADMSTASLVTPQSQPPSKSPSPTPAPLGSSAQNPVGLNPFALSPLQVKGGVSMMGLQFCGWPTGVVTSNIPFTSSVPSLGSGLGLSEGNGNSFLTSNVASSKSESPVPQNEKATSAQPAAVEVAKPVDFPSPKPIPEEMQFGWWRIIDPEDLKALLKVLHLRGIREKALQKQIQKHLDYITQACLKNKDVAIIELNENEENQVTRDIVENWSVEEQAMEMDLSVLQQVEDLERRVASASLQVKGWMCPEPASEREDLVYFEHKSFTKLCKEHDGEFTGEDESSAHALERKSDNPLDIAVTRLADLERNIERRIEEDIAPGLRVWRRALSEARSAAQVALCIQQLQKSIAWEKSIMKVYCQICRKGDNEELLLLCDGCDKGCHTYCHRPKITTIPDGDWFCPACIAKASGQTLKIKKLHVKGKKTNESKKGKKVTLTGDTEDEDSASTSSSLKRGNKDLKKRKMEENTSINLSKQESFTSVKKPKRDDSKDLALCSMILTEMETHEDAWPFLLPVNLKLVPGYKKVIKKPMDFSTIREKLSSGQYPNLETFALDVRLVFDNCETFNEDDSDIGRAGHNMRKYFEKKWTDTFKVS

SEQ ID NO: 299928 - DNA, 6207 bp, Artificial Sequence
  derived and/or modified sequence
atggagtctggagagcggctgccttcttcagcagcttctagtaccacgcctactagcagctctactccctccgttgcatctgtagtgtcaaaggggggactgagcactggagtagcttccctgtcttccacgattaatccatgcgggcacctcttcagaactgccggcgaccagccattcaatttgtccacggttagcagcgcattccctatggtgtcccatcctgtgtttggactgcatagcgctagcagcggccactcagagtttggtggtttgggcacactgggtacacccaccgctttggcagctcatcctcaattggcctcatttccggagtggtggcggacgacggatgctcatacccgcacaggtgcaacattctttcccccactcttggggatcccacccctcttcgcgccccccgcccagaatcacgattccagctcttttcactcaaggaccagcgggaaatcaaaccgaaacggacccgagaaaggcgtgaatgggtctatcaatgggtccaacacttcaagcgtcattggcattaatacctccgtgctgagcacaacagcatcaagctctatgggccaaacaaagtccactagctcaggtggcgggaatagaaagtgtaatcaggaacagagtaaaaatcaacctctggacgctcgggttgataaaattaaggacaaaaagccccggaagaaagctatggaatcgagctctaatagcgatagtgacagcgggactagcagcgatacctcctccgagggaattagctcaagtgattccgacgacctggaggaggatgaagaggaagaggatcagagtatagaggagtccgaagatgatgactcagactcagaaagtgaggcccagcacaaaagcaacaatcaggtgctgctgcacggtatcagcgaccccaaagccgacggtcagaaagcgacagagaaagctcaggagaagagaattcatcagcctctgcctttggcctcagaaagccaaactcacagctttcagtcccagcagaaacaaccacaagtccttagtcagcagcttcccttcatattccagtcttctcaagcaaaagaggagtccgtaaataaacacacttctgttatacagtcaacaggtctggtctctaatgtcaaacccctgtccctcgtgaaccaggctaagaaggagacttacatgaagttaattgtccccagcccagacgttctgaaagccgggaataagaatacctccgaagagagttctttactcacgtcagagttaagatccaagcgcgaacagtacaagcaagcctttcctagtcaactgaaaaaacaggagtcatcaaaatccctcaagaaagtcatcgcagctctaagcaaccccaaagcaacaagctcctctcccgctcaccccaagcagaccttggaaaataatcacccaaacccattcctgacaaatgctctgctcggcaaccaccagcccaatggagttatccagtcagtgatccaggaggcacctctcgcgctaacaacaaaaaccaagatgcagtcaaagataaacgagaacatagccgcagcctctagcacacctttttccagtccagtaaatctgtccacctctggacgacggacacccggtaatcagacaccggtgatgccctcggcgtctcccatcctgcactcccaaggaaaagagaaggcagtctctaacaacgtgaaccctgtaaaaacccaacatcacagccacccggcaaagtctctggtcgagcagtttagaggcaccgactccgacatcccaagcagcaaagactccgaagattccaatgaggatgaggaagaagatgatgaggaggaggacgaggaggacgacgaagacgatgaaagcgacgatagccaatcaggaactagcaagagacgccgggtgacggacgagcgcgaactgcgtataccactggagtacgggtggcagcgggaaacacgaattcggaacttcggcggcaggctccagggagaagtagcgtactacgctccgtgcggcaaaaagttaagacagtaccccgaggtcatcaagtacctgtcccggaatggcattatggacatcagcagggacaacttctctttctccgccaaaatacgggtgggggatttctacgaagcgagagacgggccgcaaggcatgcagtggtgtcttctgaaagaggaggacgtgatccctcgcatcagggctatggaaggaagaaggggaagaccccccaaccccgatcgacagcgcgcacgggaagaatctagaatgagacgtaggaaaggacggcctcctaacgtcggaaatgccgaattccttgataatgcggatgctaagctcctgcgtaaattgcaggcacaggagatcgctagacaggcggctcagataaagctcttaagaaaactgcagaagcaggagcaagcacgcgtcgcaaaagaggcgaagaagcagcaggctatcatggctgctgaagagaagagaaaacagaaggagcagattaagattatgaaacagcaggagaagattaagcgcatccagcagatcaggatggagaaagagctccgggcccagcaaatactcgaagcaaagaagaaaaagaaggaggaggctgcaaatgccaaactcttggaggctgaaaaacggattaaggagaaagagatgcgtaggcagcaggctgtgttactcaagcatcaggaaagagaacgtcggcggcagcacatgatgctgatgaaggctatggaggctcggaaaaaggcggaagagaaagagaggctcaaacaggagaagagggatgagaaacggctgaataaagagcgcaaactggaacagcgtcggttggaactggagatggcaaaggaactgaagaagcccaatgaggatatgtgcctggccgatcagaagccactgccggagcttcctagaatccccggacttgtcctgagcggttccaccttcagcgattgtctcatggttgtgcaatttctcaggaattttgggaaagtgctggggtttgacgtaaatatcgacgtgcccaatctgtccgtgctgcaagaaggactgctgaacatcggcgattcaatgggcgaggtgcaggatctcttagtgaggctactcagtgccgccgtgtgcgaccccggcctgattactgggtacaaggctaaaacagcactcggcgagcatttgctgaacgtgggcgttaaccgggacaatgtgagcgagatcttgcagatttttatggaagcccattgtgggcagacagaacttaccgaaagccttaaaacaaaagccttccaggctcatacccctgctcagaaagcctctgtcctggcctttctaatcaacgaacttgcttgcagcaaatccgtcgtgagcgagatagacaaaaacattgattatatgtccaatttgaggagggataaatgggttgtcgaaggaaagctccgcaagctccgaatcattcatgcgaaaaaaaccggcaaacgcgacacctccgggggcatagatctgggcgaagagcagcatccgctggggacgccaacgccaggccgaaagcggcgaagaaaagggggggacagcgactacgatgatgatgatgacgatgattccgacgatcagggtgacgaagacgatgaagacgaggaagataaggaagataagaaagggaagaagacagatatctgtgaagacgaggatgaaggggatcaggctgcatcggtcgaggaacttgagaagcagattgagaagctatcaaagcagcaatctcaatacaggaggaagctgtttgacgcaagccatagccttaggtcagtgatgttcgggcaggaccgatacaggcgtagatactggattcttcctcagtgcggtggcatttttgtggaagggatggagagtggagagggtttggaagaaatagccaaggaacgcgagaaattgaagaaggctgagtccgttcagataaaggaagagatgtttgagacttcgggggactctctgaattgtagcaacacagaccattgtgagcaaaaggaggatctcaaagagaaggacaacaccaacctgtttctccagaagcctgggtcatttagcaaattatccaaactgctagaagtggccaagatgccacccgagtcagaggttatgactcccaagcctaatgccggtgctaatggctgcaccctttcctaccagaattccggaaagcacagcctgggatcagtccagtctacggccactcagagcaacgtcgagaaggccgactctaataatctattcaacacaggaagctccggtcctgggaaattctacagtccactgcctaatgaccagttgctgaagactctgactgagaagaacagacaatggttctccttacttccacgtaccccatgtgatgacacctccttgacccacgctgatatgtcaacagctagtcttgtgaccccccaatcgcagcctccctctaagtcaccatctcctactccggcccctcttgggagcagtgcccagaatccggtgggcctgaatccttttgccctctctcccctgcaggtgaagggtggagtttccatgatgggcctccagttctgcggttggccaacaggcgtggtgacctctaatatccctttcacatcgtctgtgccttcactgggttcgggcctgggcctgagcgaggggaacgggaattcgttcctcacatctaacgttgcaagctcaaagagtgaatctccagtgccccagaatgaaaaagccacctccgcacagcccgcagcagtagaagtggccaagcccgttgattttccttcgcccaaacctatccctgaagagatgcagtttggctggtggcgcatcatcgatcctgaggacctgaaagccctattgaaagttctgcatctgagagggatcagggagaaggcactgcagaaacagatccagaagcatctcgactatatcacccaggcctgcctgaaaaacaaggacgtcgctattatcgagctgaacgagaacgaagaaaaccaagtcactcgtgatattgtggagaattggtccgtggaggagcaagccatggaaatggacttatccgtccttcaacaagtagaggatcttgaaaggagggtggcttccgcctccttacaagtcaaaggatggatgtgccccgagccagcctcggaaagggaagacctggtttactttgagcacaagagtttcaccaaactttgtaaggaacacgacggagaatttacaggtgaagatgaatcctccgctcatgctctggagcgtaagagtgacaatccattagacattgcggtgacgagattagcagatctggagcggaacattgagcggcgcatcgaggaggatatcgccccgggtcttcgggtttggagaagagcactgtccgaagcgagatccgccgcgcaggtggcactttgcatccagcagctgcagaaatcaattgcttgggagaagagtataatgaaggtgtattgtcagatctgccggaagggggacaacgaggagctgctgttgctgtgcgatgggtgcgacaaaggatgtcacacatactgccatcggcccaagatcacaacgattccagatggggactggttttgccccgcctgcattgccaaagcttccgggcagactctgaaaattaagaagctgcacgttaagggtaagaagactaacgaatcaaagaaaggtaaaaaggtaacactgaccggagataccgaagacgaagattcagcgagcacatcgagcagtctcaagcgtggcaataaggatcttaaaaagagaaaaatggaggagaatacttcaatcaatttatccaaacaggagtcattcacctctgttaagaagcccaagagagatgactctaaagatttggctttatgcagtatgatactcacagagatggaaacccatgaagacgcgtggccttttctgttgccagttaaccttaagctggttcccggttacaagaaagtcatcaaaaagcccatggatttctcaactatacgtgagaagctcagtagtggacaataccccaacctggagacattcgccctggatgttagactcgtgttcgataattgtgaaacatttaatgaggatgacagcgacattggcagagccggacataatatgagaaagtattttgaaaagaaatggacagatacatttaaggtctcttag

SEQ ID NO: 299929 - DNA, 6207 bp, Artificial Sequence
  derived and/or modified sequence
atggagagcggggagcggctgcccagcagcgctgccagcagcaccacccccaccagcagcagcacccccagcgtggcctctgtggtgtccaaaggaggcctgagcactggagtggccagcctgagcagcaccatcaacccctgtggccacctgttcagaacagctggggaccagcccttcaacctgagcacagtgtcctctgccttccccatggtgagccaccctgtgtttggcctgcacagcgccagcagcggccacagcgagtttggaggcctgggcaccctgggcacccccacagccctggccgcccacccccagctggccagcttccctgagtggtggaggaccacagatgcccacaccaggactggagccaccttcttcccccccctgctgggcatcccccccctgtttgcccccccagcccagaaccacgacagcagcagcttccacagcaggaccagcggcaagagcaacagaaatggacctgagaagggcgtgaatggcagcatcaatggcagcaacaccagcagcgtcatcggcatcaacacctctgtgctgagcaccacagccagcagctccatgggccagaccaagagcaccagcagcggcggcggcaacaggaagtgcaaccaggagcagagcaagaaccagcccctggatgcccgggtggacaagatcaaggacaagaagcccaggaagaaggccatggagagcagcagcaacagcgacagcgacagcggcaccagcagtgacaccagcagcgagggcatcagcagcagtgacagtgatgacctggaggaggatgaggaggaggaggaccagagcattgaggagagtgaagatgatgacagcgacagcgagagcgaggcccagcacaagagcaacaaccaggtgctgctgcacggcatcagtgaccccaaggcagatggccagaaggccacagagaaggcccaggagaagaggatccaccagcccctgcccctggccagcgagagccagacccacagcttccagagccagcagaagcagccccaggtgctgagccagcagctgcccttcatcttccagagcagccaggccaaggaggagagcgtgaacaagcacaccagcgtcatccagagcacaggcctggtgtccaatgtgaagcccctgagcctggtgaaccaggccaagaaggagacctacatgaagctgattgtgcccagcccagatgtgctgaaggccggcaacaagaacaccagcgaggagagcagcctgctgaccagcgagctgcggagcaagcgggagcagtacaagcaggccttccccagccagctgaagaagcaggagagcagcaagagcctgaagaaggtgattgctgccctgagcaaccccaaggccaccagcagcagccctgcccaccccaagcagaccctggagaacaaccaccccaaccccttcctgaccaatgccctgctgggcaaccaccagcccaatggagtcatccagagcgtcatccaggaggcccccctggccctgaccaccaagaccaagatgcagagcaagatcaatgaaaatattgctgctgccagcagcacccccttcagcagccctgtgaacctgagcaccagcggccgccgcaccccaggcaaccagacccctgtgatgcccagcgccagccccatcctgcacagccagggcaaggagaaggctgtgagcaacaacgtgaaccctgtgaagacccagcaccacagccacccagccaagagcctggtggagcagttccggggcacagacagcgacatccccagcagcaaggacagcgaggacagcaatgaagatgaggaggaggatgatgaggaggaggatgaagaagatgatgaagatgatgaaagtgatgacagccagagcggcaccagcaagagaagaagagtgacagatgagcgggagctgcgcatccccctggagtatggctggcagcgggagacccgcatccggaactttggaggccgcctgcagggcgaggtggcctactatgccccctgtgggaagaagctgcggcagtacccagaggtgatcaagtacctgagcagaaatggcatcatggacatcagccgggacaacttctccttcagcgccaagatccgggtgggggacttctatgaggccagagatggcccccagggcatgcagtggtgcctgctgaaggaggaggatgtgatcccccgcatccgggccatggagggccggcggggccggccccccaacccagaccggcagagggcccgggaggagagcaggatgagaagaaggaagggccggcccccaaatgtgggcaatgctgagttcctggacaatgctgatgccaagctgctgaggaagctgcaggcccaggagatcgcccggcaggccgcccagatcaagctgctgaggaagctgcagaagcaggagcaggcccgggtggccaaggaggccaagaagcagcaggccatcatggctgctgaggagaagaggaagcagaaggagcagatcaagatcatgaagcagcaggagaagatcaagaggatccagcagatccgcatggagaaggagctgcgggcccagcagatcctggaggccaagaagaagaagaaggaggaggccgccaatgccaagctgctggaggccgagaagaggatcaaggagaaggagatgaggcggcagcaggccgtgctgctgaagcaccaggagcgggagcggcggcggcagcacatgatgctgatgaaggccatggaggccaggaagaaggccgaggagaaggagcggctgaagcaggagaagagagatgagaagaggctgaacaaggagaggaagctggagcagaggcggctggagctggagatggccaaggagctgaagaagcccaatgaagacatgtgcctggccgaccagaagcccctgcctgagctgccccgcatccctggcctggtgctgagcggcagcaccttcagtgactgcctgatggtggtgcagttcctgaggaactttgggaaggtgctgggctttgatgtgaacattgatgtgcccaacctgtctgtgctgcaggagggcctgctgaacatcggggacagcatgggagaggtgcaggacctgctggtgcggctgctgtctgctgctgtgtgtgaccccggcctcatcaccggctacaaggccaagacagccctgggggagcacctgctgaatgtgggcgtgaacagagacaacgtgtctgagatcctgcagatcttcatggaggcccactgcggccagacagagctgacagagagcctgaagaccaaggccttccaggcccacaccccagcccagaaggcctctgtgctggccttcctgatcaatgagctggcctgcagcaagtctgtggtgtctgaaattgacaagaacatcgactacatgagcaacctgcggcgggacaagtgggtggtggagggcaagctgaggaagctgcgcatcatccacgccaagaagacaggcaagagggacaccagcggcggcatcgacctgggggaggagcagcaccccctgggcacccccaccccaggcaggaagagaagaagaaaaggaggagacagcgactatgatgatgatgatgatgatgacagtgatgaccagggagatgaagatgatgaagatgaggaggacaaggaggacaagaagggcaagaagacagacatctgtgaagatgaagatgaaggagaccaggccgcctctgtggaggagctggagaagcagatcgagaagctgagcaagcagcagagccagtacagaaggaagctgtttgatgccagccacagcctgcggtctgtgatgtttggccaggaccgctacagaagacgctactggatcctgccccagtgtggcggcatctttgtggagggcatggagagcggggagggcctggaggagatcgccaaggagcgggagaagctgaagaaggccgagagcgtgcagatcaaggaggagatgtttgagaccagcggggacagcctgaactgcagcaacacagaccactgtgagcagaaggaggacctgaaggagaaggacaacaccaacctcttcctgcagaagccaggcagcttcagcaagctgagcaagctgctggaggtggccaagatgcctcctgagagcgaggtgatgacccccaagcccaatgctggggccaacggctgcaccctgagctaccagaacagcggcaagcacagcctgggctctgtgcagagcacagccacccagagcaatgtggagaaggctgacagcaacaacctcttcaacacaggcagcagcggccctgggaagttctacagccccctgcccaatgaccagctgctgaagaccctgacagagaagaaccggcagtggttcagcctgctgcccaggaccccctgtgatgacaccagcctgacccacgccgacatgagcacagccagcctggtgaccccccagagccagccccccagcaagagccccagccccaccccagcccccctgggcagcagcgcccagaaccctgtgggcctgaacccctttgccctgagccccctgcaggtgaagggcggcgtgtccatgatgggcctgcagttctgtggctggcccaccggggtggtgaccagcaacatccccttcaccagctctgtgcccagcctgggcagcggcctgggcctgtctgagggcaatggaaacagcttcctgaccagcaatgtggccagcagcaagtctgagagccctgtgccccagaatgagaaggccaccagcgcccagcctgctgctgtggaggtggccaagcctgtggacttccccagccccaagcccatccctgaggagatgcagtttggctggtggaggatcatcgaccctgaggacctgaaggccctgctgaaggtgctgcacctgcggggcatccgggagaaggccctgcagaagcagatccagaagcacctggactacatcacccaggcctgcctgaagaacaaggatgtggccatcatcgagctgaatgaaaatgaggagaaccaggtgacccgggacatcgtggagaactggagcgtggaggagcaggccatggagatggacctgtctgtgctgcagcaggtggaggacctggagcggcgggtggccagcgccagcctgcaggtgaagggctggatgtgcccagagcccgccagcgagcgggaggacctggtgtactttgagcacaagagcttcaccaagctgtgcaaggagcatgatggagagttcaccggggaggatgagagcagcgcccacgccctggagaggaagagtgacaaccccctggacattgctgtgacccggctggccgacctggagaggaacatcgagcggcgcatcgaggaggacatcgcccctggcctgcgggtgtggaggcgggccctgtctgaggcccggtctgctgcccaggtggccctgtgcatccagcagctgcagaagagcatcgcctgggagaagagcatcatgaaggtgtactgccagatctgcaggaaaggagacaatgaggagctgctgctgctgtgtgatggctgtgacaagggctgccacacctactgccaccggcccaagatcaccaccatcccagatggagactggttctgcccagcctgcatcgccaaggccagcggccagaccctgaagatcaagaagctgcacgtgaagggcaagaagaccaatgaaagcaagaagggcaagaaggtgaccctgactggagacacagaagatgaagattctgccagcaccagcagcagcctgaagaggggcaacaaggacctgaagaagaggaagatggaggagaacaccagcatcaacctgagcaagcaggagagcttcacctctgtgaagaagcccaagagagatgacagcaaggacctggccctgtgcagcatgatcctgacagagatggagacccatgaagatgcctggcccttcctgctgcctgtgaacctgaagctggtgcccggctacaagaaggtgatcaagaagcccatggacttcagcaccatccgggagaagctgagcagcggccagtaccccaacctggagacctttgccctggatgtgcggctggtgtttgacaactgtgagaccttcaatgaagatgacagcgacatcggccgggccggccacaacatgaggaagtactttgagaagaagtggacagacaccttcaaggtgtcctag

SEQ ID NO: 299930 - DNA, 6207 bp, Artificial Sequence
  derived and/or modified sequence
atggagagcggcgagcggctgcccagcagcgccgccagcagcaccaccccaacttcatcttctactcccagcgtcgcatctgtggtctctaagggcgggctatcaactggtgtggcttctttgtcctcaaccattaacccgtgcgggcacctcttcagaactgcaggagatcaaccttttaatctctccacagtgagttccgccttcccaatggtgtcccaccccgtgttcggcctgcattccgcgtcctctggccactcggagtttggcggcctgggaacgctggggaccccgactgctttggctgcgcatccccaattggcttcgttccccgaatggtggagaacgactgatgcacatacgagaacgggagcaaccttcttcccgccactcctcgggatacctccactgttcgctccccccgcgcaaaatcacgacagtagcagcttccactccaggacctcgggtaagtccaatagaaatggaccagaaaaaggggtgaacggcagcatcaatgggagcaacactagctctgtcattggcatcaatacgtcggtgctgtctacaaccgcctcaagttcgatgggacagactaaaagcacctccagtggcggcggcaacagaaagtgcaatcaggagcaaagcaagaatcagcccttagatgcccgggtggataagattaaggacaagaagcccagaaaaaaggccatggagagcagttccaattcagactccgatagtgggaccagcagtgacacaagttccgagggtatctcaagttctgactcagacgacctcgaggaagacgaggaggaagaagaccagtctattgaggagtctgaagatgacgacagtgatagtgaatcggaggcacagcataaaagcaataatcaggtgctcctgcatggaatatccgatcctaaagctgatggacagaaagcaacagagaaggcacaggagaaacggatacaccagcccctgccgctggccagcgagtctcagactcacagttttcagtcccagcaaaaacagcctcaggttctctcccaacagcttccttttatctttcaatccagccaagcaaaagaggagtctgttaataagcatactagcgtgatccagtcgacaggtttagttagtaatgtcaaaccactgtcattagtgaatcaggctaagaaggagacttatatgaagctgattgtgcccagtccagatgtattaaaagcaggcaacaagaacacttcggaagaatcttccctattaaccagcgagttaaggtcgaaacgagaacagtataaacaggcgttcccaagccagctcaaaaaacaagaatccagcaaatctctgaagaaagtgatagctgcactgagcaacccaaaggctacctcttcctcccctgctcatcccaagcagaccctggagaacaaccatccaaacccattcttgacaaacgctttgctcggaaaccaccagcctaatggagtgatacagagcgttattcaagaggccccgcttgcattgactaccaaaacgaaaatgcagagcaagattaacgagaatatcgccgcagccagttccacccctttctcctcccctgtgaacctttctaccagcggtaggcgcactcctggcaatcagactcccgttatgccaagcgccagtcccatcttgcatagtcaaggcaaagagaaagccgtgtccaacaacgtgaacccagtcaaaacacagcaccactctcacccagcaaagagtcttgttgaacagtttagggggactgactctgatattcccagttccaaggacagtgaagactccaacgaagatgaagaggaagacgatgaagaggaggatgaggaagatgatgaggatgacgagtcagatgactctcagagcggcacttctaaacgaaggcgcgttaccgacgaacgggagcttaggatccctcttgagtacggctggcagcgcgagactcggatcaggaacttcggaggccgacttcagggcgaagtcgcgtattatgcaccttgcggtaaaaaactgaggcagtaccccgaggtgataaagtatcttagtagaaacgggattatggatatctcacgcgacaattttagcttctctgcaaagatccgcgtgggagacttttatgaggcgcgggacggcccacaggggatgcagtggtgtctgctcaaagaagaggacgtaattccaagaatcagggctatggaaggaaggcgcggccgccctcctaaccccgataggcaaagggctagagaagagtccaggatgaggaggagaaaggggcgccctccgaatgtggggaacgcagagtttctagacaacgcagacgctaagcttctgcgcaaattgcaggcccaggagatcgcacgccaggcagcccaaatcaagctcctccggaagctgcagaaacaggaacaggctagggtggctaaggaggccaaaaagcagcaggctattatggccgctgaggagaagagaaagcaaaaggagcaaattaaaataatgaaacagcaagagaaaatcaaacgcatacagcagattaggatggagaaggagctaagggcccaacagatcctggaggctaagaaaaaaaaaaaagaggaggcggccaacgccaaacttctggaagccgaaaagaggatcaaggaaaaagagatgcggaggcagcaagccgtgctgctgaagcaccaggagcgtgagaggcgccgacaacatatgatgctaatgaaggccatggaggcgcggaagaaagcagaggagaaagaacggctgaaacaggaaaaacgcgatgagaagcggctgaacaaggaacggaagcttgaacagaggcggctggagctggaaatggccaaggaactcaaaaaacccaatgaagatatgtgccttgctgatcagaaacccctgccagagttaccgcggatacctggactggtcctgtctggcagtacattttcagactgcctcatggtagtccagtttcttcggaatttcggcaaggtgttgggcttcgacgttaacatagatgtacctaacctgagcgtactgcaggaaggccttcttaacataggagactcaatgggggaggttcaggatctcttggttcggctgctaagtgccgctgtttgtgatcccgggctgatcactggatacaaagccaaaacagcgctaggcgagcatctacttaatgtgggcgtgaaccgggataatgtgtctgagatattacaaatttttatggaggcacattgtggccagactgaactgactgagtcgcttaagacaaaggcctttcaggcccacacccctgcccaaaaggcctcagttctggccttcttgattaacgagctcgcttgcagtaagagtgtcgtcagtgagatagataaaaacatcgattatatgagcaatcttaggcgggataagtgggtagtggagggtaaactgaggaagctgaggataatacacgcaaaaaagaccgggaagcgtgacactagcggagggattgacctcggagaggagcagcacccacttggcactccgacacccgggcgcaagaggcggcgcaaaggaggggactcagactacgacgatgacgatgacgacgatagtgatgaccagggcgatgaggacgacgaggatgaggaggataaggaagataagaaaggtaaaaagacagatatttgtgaagacgaggacgagggtgaccaggcagctagcgtggaagagctggagaagcagatcgagaagctgtcaaaacaacagtcccagtatcgtcgaaagctgtttgacgcaagtcacagcctcagatccgtcatgttcggacaagaccgttaccggcgcagatattggattttaccacagtgcgggggtatctttgtagagggcatggaaagcggcgagggcctggaagaaattgccaaagagagagagaaactgaagaaggccgaatctgtgcagattaaggaagagatgttcgaaacttcaggcgattctttgaattgttctaataccgatcattgcgaacagaaggaggacctgaaggagaaagacaataccaatctcttcttgcagaagcctggaagtttctcgaagctttccaagctcctggaggtggccaagatgcctcctgagtctgaagtaatgacccctaaacccaacgccggcgccaatggctgcacgttgtcttatcagaacagtggaaagcactcactcggatcagtgcagtcaaccgcaactcagtcaaatgtggagaaagctgattccaacaatttatttaatacaggttcttctggtcccggcaagttctattccccactgccaaatgaccaacttctgaagactctgactgaaaaaaaccggcagtggtttagcttattgccccgcactccttgcgatgatacttccctgacccacgcggatatgagcaccgcttcactggttaccccccagtcccagccccctagcaagagtccctcacccacaccggccccgctcggatcctctgctcagaaccccgtcggattaaacccattcgccttatctcctttacaggtaaaggggggcgtatcaatgatgggattgcagttctgtggctggccaactggggtagtcacttcaaacatcccttttacttcctcagttccctccctcggcagtggcctgggactcagcgagggtaacggaaactcttttttaaccagcaatgtggcttctagcaagtctgaaagtccggtgccccagaacgagaaagccacttctgcgcaacccgctgctgtggaggtggcaaagccagtcgactttccttcgcccaaaccgatcccagaagaaatgcaattcggctggtggagaattattgacccagaggatttgaaggccctcctgaaagtactgcatctgcgcggcataagggagaaagcactccaaaaacaaattcagaagcatctagactacataacccaggcatgcctgaagaacaaggacgttgccatcattgagctgaacgagaatgaggaaaatcaggtgaccagggacatcgtggagaattggtccgtggaagaacaagccatggagatggatctgtctgtcctgcagcaagtggaagacctggaacgacgggtggctagtgcctctctccaggtcaaaggatggatgtgtccagaaccagccagcgagagagaggatcttgtgtatttcgagcataagtcatttaccaagctgtgtaaggaacacgatggcgagttcaccggtgaggatgaatcatcagcccacgcgttggagaggaagtccgataatccactcgacattgccgttacgaggctagccgacctggaaaggaatatcgaacggcgtattgaagaggatattgcacccgggcttcgcgtctggcgacgcgccctgagtgaagccagatccgcagctcaggtggcattgtgcattcagcagctccagaaatccattgcttgggagaagagcataatgaaagtgtattgtcaaatctgcaggaaaggcgataacgaagaactccttttgctgtgcgatggctgtgataagggatgccacacgtattgccatcggcccaagatcactactatccctgatggagattggttttgtcctgcctgtattgccaaggccagtggccaaacactgaagataaaaaagctgcatgtgaaaggcaaaaagacaaacgagagcaagaagggaaagaaggtcaccctgaccggggatacggaagacgaagattcagctagtacgtcatcctctctcaagcgaggaaacaaggaccttaagaaacgaaaaatggaagaaaatactagcattaacctgagcaaacaagaatctttcacgtctgtgaagaagccgaaacgagacgactccaaagatctcgctctctgttccatgatcctgacagagatggaaacgcatgaggatgcatggcccttcctgctcccggttaatctcaagctcgtccccggctataagaaagtgatcaagaagcccatggacttttcaacaataagggaaaagctgtcctccggacagtaccccaacttagagacttttgccctcgatgtcaggctggtattcgacaattgcgaaacattcaacgaagacgatagcgatatcgggcgcgcaggtcacaacatgcgcaaatatttcgagaagaagtggaccgataccttcaaggtatcttag

SEQ ID NO: 299931 - DNA, 6206 bp, Artificial Sequence
  derived and/or modified sequence
atggaatcaggtgaaagactgccgtcaagcgccgcatcctccaccactccaacgtctagctcaactccctccgtggctagcgtggtctcaaaaggcggtctgtctaccggagtggcttctctgagctctaccataaatccatgtgggcacttatttaggactgcaggagaccagccctttaacctcagtaccgtcagctccgcctttccaatggttagccatcctgtgttcggtctgcactccgctagctcaggccatagtgaatttggcggactgggtactctgggcacaccaacagccctggctgcacacccccagctagcttcattccctgaatggtggaggaccacagacgcacacacacgaactggagccacgttcttcccacccctgctgggcattcccccattattcgcacccccagcccaaaaccacgacagtagctcattccactctaggacctcaggtaagtctaatagaaacggtcccgagaagggtgtcaacgggtcaattaatggttcaaacacgagctctgttatcggtatcaatacctccgtactgtccaccactgcttcctcttctatgggccaaaccaagtcaacatcttcggggggaggaaatcgcaagtgtaaccaggagcaatccaaaaaccagccactggacgcacgggtagacaaaatcaaggataagaagcctcgcaagaaggcaatggagagctcatcaaattctgattctgacagcggcacttccagcgacacctcaagcgagggaattagctcctccgattctgatgacctggaggaagacgaagaggaagaggatcagtccatcgaggaatccgaggatgacgattcagacagtgaaagtgaggcccagcataaaagcaacaaccaggtcctacttcatggaatctcagatcccaaggctgatggacagaaggccaccgaaaaagcacaagaaaaacgaatccaccagcctctgccactagccagtgagtcacagacccattctttccagtctcagcagaagcagccccaggtgctctcacaacagctgccattcatcttccagtcaagccaggccaaggaggagtccgtcaataagcatacgtcggtgattcagtccacggggctggtgagtaatgtgaagcccctttcgttggtgaaccaggctaaaaaggaaacctatatgaaactcattgtgccctcccctgacgttctgaaagctggcaacaagaacactagcgaagagagttctttgctgacctcagagctgagatccaaacgggagcagtataaacaggccttcccatcgcagctcaaaaagcaggagtccagcaagtccctgaaaaaagtgatcgcagccctgagcaaccctaaggcaacttccagctcacctgcccaccccaagcagacactcgagaataatcatccaaatccgtttcttacaaacgccctattaggaaaccaccagcccaatggagtgatacagagcgttatccaggaggctccgttggccctgaccacgaaaaccaagatgcaaagtaagataaacgagaacattgctgctgcgtcctccaccccattttctagtcccgtcaacctcagcaccagcgggaggaggacccctgggaaccagacacccgtgatgcctagcgcttcccccatcctgcactctcagggcaaagagaaggccgtgtcaaataatgtaaaccccgtgaagacccagcatcattcccatcctgccaaatccctagtcgagcagttcaggggaaccgattccgacatcccttcctctaaggattcggaggactccaacgaagatgaagaggaggatgatgaggaggaagatgaggaggatgacgaggatgatgagtccgatgactcccagtccgggacgtcaaagaggcgacgggtcactgatgaaagagagttgcggatccccctcgagtatggctggcagagagagactcgaatcaggaactttggtgggagactgcaaggagaggttgcctactatgctccttgcgggaagaagctgcggcagtatcccgaggttatcaagtacttgagcagaaatggaattatggacatttcacgggataacttcagcttttcagccaagatacgcgttggggacttttatgaagctagagatggaccccagggcatgcagtggtgcctgcttaaggaagaagatgtgataccacgcatcagggccatggagggcaggagagggcgtccaccgaaccctgatcgccagcgagctcgtgaggagtcaaggatgcggcgtagaaagggcaggcctccgaacgtgggcaacgccgaattcctcgataacgctgacgctaagctgctgcggaagcttcaggcacaagagatcgcccgacaagccgctcaaattaagcttctgcgtaagctgcagaagcaggagcaggcccgagtagcaaaagaggcaaaaaagcagcaagctataatggccgctgaggaaaaaaggaaacagaaggaacagatcaagataatgaaacagcaggaaaagatcaagagaatccaacagatcaggatggagaaagaattgcgggcacagcagatactggaggccaagaagaagaaaaaggaagaggccgcaaacgccaagctactggaggcagagaaaagaatcaaagaaaaggagatgagacgacagcaagctgtcctgctgaaacaccaagaacgagagcgcagacgccagcatatgatgttgatgaaagcaatggaagctaggaagaaggcagaggagaaggagcgcctcaagcaggagaaacgagatgaaaaaaggctaaataaagaacgcaagctggaacagaggagactggagttggagatggccaaggaactgaaaaagccaaatgaggacatgtgtctagcagatcagaagcccctccccgagctgcctaggattccgggattagtcctgtccggcagcaccttctccgactgcctgatggtggtccagtttctgaggaacttcggtaaagtgctcggattcgatgtgaatattgatgtcccaaatctgtccgtactgcaggaaggacttctgaacattggggacagtatgggggaggttcaagacctattggtgcgactcttgagtgcagcggtctgtgaccctggattgattactgggtataaggctaaaacggctctgggcgaacatttgctaaacgttggagtgaatcgggacaatgtctcggagattctgcagatatttatggaggcacactgcggccagactgagttgacagaaagtctcaaaactaaagcctttcaggcacacacgccagcccaaaaggcctccgtgctggctttcttgattaatgagctcgcctgcagcaaaagcgtcgtcagcgagatcgataagaatattgattatatgtcaaacctccgtagggacaagtgggtcgttgagggcaaactgagaaaacttcgtattatacatgcaaaaaagactggtaagagggatacctctggcggtatcgacttgggtgaagaacagcaccccctgggaaccccaactcccggacgcaagagaaggcgcaagggcggagacagcgattacgatgatgacgacgacgatgacagtgatgatcagggggacgaggatgatgaggatgaagaggataaggaggataagaaaggcaagaaaaccgatatctgcgaggatgaggacgaaggcgatcaggccgcaagcgtcgaggagctggagaaacagattgagaagttgagcaagcagcaatctcagtataggagaaaactcttcgatgctagtcactcgctgaggagcgttatgtttgggcaggatagatatcgccgtagatattggattcttccacagtgtggcggtatcttcgtggaaggtatggagtccggggagggtctcgaggagatcgctaaggagcgcgagaagttgaaaaaagccgagtctgtgcagataaaggaagagatgttcgagaccagtggtgatagcctgaactgctcaaacacagaccactgcgagcagaaggaagatcttaaagagaaagataacaccaacctgtttcttcagaagcctggatcgttcagcaagctctctaaacttttggaggtagctaagatgcccccagagagtgaggtgatgactcctaaaccaaatgcgggtgctaatggctgcacattgagttatcagaactcaggaaagcattcactggggtcagttcaaagcactgctacccaatcgaacgtggagaaggctgattccaataacttgttcaatacggggtccagcggccctggtaagttctactcacctcttcctaacgaccagctgctcaagacattaactgaaaagaataggcagtggttttcacttctgcctcgcacaccatgtgacgacacatctctcacacacgctgatatgtccaccgcctcactggttacaccacaaagtcaacctccatcaaaatccccctctcccacccctgcaccccttggatcatccgcccagaacccagtgggcctgaacccattcgcgttatcccctcttcaggtgaaaggaggtgtatccatgatgggcctacagttctgtgggtggcccacaggcgtggttacttccaatattccgttcaccagctcagtgcctagcctgggctctggtctcggcctcagtgagggaaacggaaactctttccttacttccaacgtggccagctccaaaagcgaatctcctgtgccacagaacgagaaagccacttcagctcagccggcagctgttgaggtggcgaaacccgtggattttccttcccccaaacccattccagaggagatgcagttcggttggtggaggataattgatcctgaagatctgaaagccctgttaaaagtgctgcatttgagaggtatccgggagaaggccctgcagaagcagattcagaagcacttagactatatcacacaagcctgcctcaaaaataaggacgtcgctattattgagctgaacgagaacgaggaaaaccaggtgacaagagacattgttgagaattggtccgttgaagagcaggctatggagatggacctttctgtgcttcagcaggtggaagatctggagcgacgggtcgcatctgctagcctgcaggtaaaagggtggatgtgcccagaaccagctagcgaaagagaggatctcgtatatttcgagcacaagagcttcactaagctttgcaaggagcacgacggagagttcactggtgaagatgaatcatctgcccatgctctcgagcgcaaaagcgataatcctctggacatcgctgttacaagactcgccgacctggagcggaacattgagaggagaattgaggaggacatagcccctgggctcagggtttggaggagagctctcagcgaggcgagaagcgccgctcaggtggctctgtgtattcaacaactgcaaaagtctattgcatgggagaagagcatcatgaaagtgtattgtcaaatatgcagaaaaggggataacgaggaactcctcttgctatgcgacggatgtgataagggctgtcacacctattgccatagaccgaagatcactaccatcccagatggagattggttttgccctgcatgtatcgcgaaggcttccggccagaccctcaaaatcaaaaagctacatgttaaaggcaaaaaaacaaacgagtccaagaagggtaagaaagtcaccctgaccggtgatactgaagatgaagattctgcctccacttctagctccctgaaaaggggaaacaaggatctcaagaagaggaagatggaggagaatacgtctatcaacttgtccaaacaggaatcttttacctccgtgaaaaaaccaaaaagggacgattccaaagacctcgctctctgctctatgatactgaccgaaatggaaactcacgaggatgcctggccgtttctactgcctgtgaacctgaaattggtgccgggttacaaaaaagtaatcaaaaaaccgatggatttctctacaatccgcgaaaagctgtcatcagggcagtacccaaatctggaaacattcgcgctggatgtcaggctggttttcgataactgcgaaacattcaacgaagacgacagtgacatcggaagagccggacacaatatgcgcaagtactttgaaaaaaagtggacagacacttttaaagtatctta

SEQ ID NO: 299932 - DNA, 7845 bp, Artificial Sequence
  derived and/or modified sequence
acttggttcatgaagccttcgcctagaagtgaagctgctgaacaaaccttgagaagaatcatctcctgcttcaatctgctgctggataggaactaatcagagagagagaggcggaagacggagaaggagggagtcgaaggctttcccgatcacaaatctcacctccactacaactctctttatacttttcttgcagaaataataatagaaataaggaggtggtggggtttccaaaaatcttaaccttcaaccatctggggaaaaggcaaaaatcccatctaccgcaactctcagttcgagagtaaaggtttcccaacagtgatgtcacaagattgaccacattgatcacaatatggagtctggagaacggttaccatcctcagcagcctcctctactacaccaacttcatcttcgacaccttctgtggcttcagtagtttcaaaaggtggcctttccactggagttgcttcacttagctctacaatcaacccatgtggacatttattcagaacagctggggatcaaccgtttaacctgtccacagtgtcgagtgccttcccaatggtcagccacccagtctttggtctacattcagccagctcagggcattcagaatttggtggtttggggacacttggtacacccacagccttagccgcacatccccaactagcatcttttccagaatggtggcgaacaactgatgctcatactcgtacaggagcaaccttctttccaccattactgggaattccaccactatttgctcccccagcccagaatcatgattcttcttcattccattcaaggacttcgggaaaaagtaatcgaaatggtcccgaaaaaggtgtaaatgggtcaataaatggaagtaatacatcatctgtaattggtatcaacacatctgtactatccactactgcttcaagttccatgggacaaactaaaagtacaagctcaggtggaggaaatcgaaaatgtaatcaggaacaaagcaaaaaccagcctttggatgctagagttgacaaaatcaaagataagaaaccaaggaagaaagcaatggaaagttctagcaacagtgatagtgattcaggcacatcatcagacacctcaagtgaaggcattagtagcagtgattcagatgatctagaagaagatgaagaagaagaagatcaaagtattgaagaaagtgaagatgatgattctgattcagagagtgaagcacaacataaaagtaacaaccaggtgctattacatggtatttcagacccaaaagcagatggacagaaagcaactgaaaaagcccaggaaaaaagaatacaccagccattacctcttgcgtctgaatcccagactcactcattccaatcccagcagaagcagcctcaggttttgtcacagcagcttccatttattttccaaagctctcaggcaaaggaggaatctgtgaacaaacacaccagtgtaatacagtctacgggattggtgtccaatgtgaaacctttatctttggtaaatcaagccaaaaaggaaacttacatgaaactcatagttccttctcctgatgttcttaaagcagggaataaaaatacctctgaagaatctagtttattgaccagtgaattgagatccaaacgggaacaatataaacaggcattcccatcacagttaaagaaacaagagtcatcgaagagcctgaagaaggttattgcagctttgtcaaatccaaaagcaacctctagttcaccagcacatccaaaacaaacattagaaaacaaccacccaaatccattcttgacaaatgcacttttaggtaatcaccaaccaaatggagttattcaaagtgtcattcaagaagctcctctagcacttactaccaaaactaaaatgcagagcaagattaatgaaaacattgctgctgcaagtagcacccctttttcctcacctgtaaatctgagtacaagtgggagaagaacccctggcaatcagacacctgtaatgccctctgcctctcccatcctgcatagtcaagggaaggaaaaagcagttagcaataatgtaaacccagtaaaaacacagcatcactcccatcctgcaaaatctttagtggaacaattcagaggaacagattcagacattcccagtagtaaagattctgaagattcaaatgaggatgaagaggaagatgatgaagaagaagatgaggaagatgatgaagatgatgaatctgatgacagccaatcaggcacttccaaaagaagaagagtaacagatgaacgtgaactgcgtattccattggaatatggctggcagagagagacaagaataagaaactttggagggcgccttcaaggagaagtagcatattatgctccatgtggaaagaaacttaggcagtaccctgaagtaataaagtatctcagcagaaatggaataatggatatctcaagggacaatttcagcttcagtgcaaaaataagagtgggtgacttctatgaagccagagatggaccgcagggaatgcagtggtgtcttttgaaagaagaggatgtcattcctcgtatcagggcaatggaaggtcgtagaggaagaccaccaaatccagatagacaacgagcaagagaggaatccaggatgagacgtcggaaaggtcgacctccaaatgttggcaatgctgaattcctagataacgcagatgcaaagttgctaagaaaactgcaagctcaagaaatagccaggcaagcagcacaaataaagcttttgagaaaacttcaaaagcaggaacaggctcgggttgctaaagaagccaaaaaacaacaagcaataatggctgctgaggagaagcggaagcaaaaagaacagataaagattatgaaacagcaggaaaaaattaagagaatacagcaaatcagaatggaaaaagaacttcgagctcagcaaattctagaggctaaaaagaaaaagaaggaagaagcggcaaatgccaaattattggaggccgagaaacgaataaaggaaaaagaaatgagaagacaacaagctgttcttctgaaacatcaggaacgagagcgaaggcgacaacacatgatgcttatgaaagctatggaagctcgtaaaaaagcagaagaaaaagagcggttgaaacaagaaaaacgtgatgagaaaagattaaataaagagcgtaaactagagcagcgaagattagaattagaaatggcaaaggaactaaagaagcctaatgaagacatgtgcttagcagaccaaaagcctttgccagagttgcctcgtattccaggacttgttctctctggaagtacattttcagactgtctcatggtggtgcagttcttacgaaactttggtaaagttttgggctttgatgtgaatattgatgttccaaacctgagtgttcttcaagagggattgctaaatataggggacagcatgggtgaagtacaagacttgcttgtgaggctcctctcagctgctgtatgtgatccaggtctaataacaggatacaaggctaaaacagctcttggagaacatttgctgaatgttggtgtgaatcgagacaatgtttccgagattttacagatatttatggaagcccactgtggacaaactgagcttactgaaagtctgaagaccaaagcttttcaggctcacactccagcacagaaagcttcagtcctggctttcctgatcaatgaactggcatgcagcaagagtgtggtcagtgaaatcgacaagaacattgattatatgtcaaacttgaggagagataaatgggtggtagaaggtaaactccgcaagctcagaatcattcatgctaagaaaacaggcaaaagagacacttcaggtggcattgatctgggagaagagcagcatcccttgggcacacccactccaggacgcaagcgaagaaggaagggaggagacagtgattatgacgatgatgatgacgatgacagtgatgaccaaggggatgaagatgatgaggatgaagaagataaagaagacaaaaaaggaaaaaagactgatatctgtgaagatgaggatgaaggtgaccaagcagcaagtgttgaagagctggaaaaacagattgaaaaactgagtaaacaacagagtcagtacagaaggaagctctttgatgcgtctcactcattgcgttcagtgatgtttggccaagatcgttacagacgccggtactggattcttccccaatgtggggggatttttgtagaaggcatggagagtggtgaaggactagaagaaattgcaaaagaaagagaaaaactgaaaaaggcagaaagtgtccagatcaaagaagaaatgtttgagacttctggggacagtttaaattgttcaaatacagatcactgtgaacaaaaggaagatcttaaagaaaaagataacacaaatctattccttcagaaacctggctctttttccaaattaagcaagcttttggaagtagctaagatgcctcctgagtcagaggttatgacccccaaaccaaatgctggtgcaaatgggtgcacgttgtcttatcagaacagtggaaaacattcactgggcagcgttcagtcaacagcaacgcaaagcaatgtggaaaaggcagactctaataatctgtttaatactggttcaagtggtccagggaagttctacagtcctctccccaatgaccagttactaaaaacgctgactgaaaagaatagacaatggtttagtcttttgccacgaacaccctgtgatgacacttcacttactcatgccgatatgtcaactgcttctttggtgactcctcagtctcagccaccatctaagtcaccttcacctaccccagctcctcttggatcttctgctcagaatcctgttggcttaaatccatttgctttatcacctcttcaggtgaaaggtggagtatctatgatgggacttcagttttgtggatggcccactggtgtggttacttctaatattccatttacatcatctgtacctagtctaggatcggggttagggttatcagaaggaaatggtaattcattcttgacttccaatgttgcttcaagtaaaagtgaatctccagtaccacagaatgaaaaggccacttcagctcaacctgcagctgttgaagtagcaaaaccagtagattttcctagtccaaaacctattccagaagaaatgcagtttggttggtggagaattattgacccagaggacctaaaagctttgctcaaagtgctgcatctcagaggaataagagaaaaggcattacaaaaacaaattcagaaacatttggattatattactcaagcctgcctcaagaataaggatgttgctattattgaactgaatgaaaatgaagaaaaccaagtaactcgagatattgtggagaactggtcagtagaagaacaagcaatggaaatggatttgagtgtccttcaacaggtagaagatctagaaaggagagttgcatcagcaagtttgcaagtgaagggttggatgtgtccagagcctgcatcagaaagggaggacttggtatattttgaacataaatcatttactaaattgtgcaaggagcatgatggagaatttactggcgaagacgaaagcagtgcacatgcactagaacggaagagtgacaaccccctagatatagctgtaaccaggctggctgatttggagcggaacattgaaagaagaattgaagaggatattgctccagggctcagggtatggagaagggcattatcagaagctcgcagtgctgcacaggtagctctgtgcattcagcaattacagaaatcaatagcatgggaaaaatcaattatgaaagtttactgccaaatctgtcgaaagggagataatgaagaactgcttcttctttgtgatggctgtgacaaaggctgtcatacctactgccatagacccaagattacaacaatcccagatggagactggttttgtccagcttgcattgctaaggcaagtggtcaaactctaaaaatcaaaaaacttcatgtcaaaggaaaaaagactaatgagtcaaagaaaggcaagaaggtaactttaacaggagatactgaagatgaagactctgcatctacaagtagttcactaaaaagaggaaacaaagacctcaagaaaagaaaaatggaggaaaacacttctattaacttgtcaaaacaagaaagttttacttcagttaagaaacctaaaagagatgactccaaggacctagctctttgcagtatgattctgactgaaatggaaactcatgaggatgcatggccttttctacttcctgtaaacttgaaacttgttcctggttataagaaagttattaagaagcctatggatttttccacaattagagagaaactaagtagtggacagtatccaaaccttgaaacctttgctctagatgtcaggcttgtttttgacaactgtgaaacatttaatgaagatgattctgatataggcagagctggccacaatatgaggaagtattttgaaaaaaagtggacagatactttcaaagtgagctgaagttataataatctctttatttttttccttctaaacaaggacaaatgagaccagcaatgtgaactgtatttacataaacgtgcaaggcacatacataatgactttctttttccttaagtataaaaaaaaagtatcagaagaatgataccatttttaaaggcttcattcctacaacaaccaaggccctcggttattggtttgtgtgatttatcagctaatttaggtagaacagggaagcacacccaaagaattttcaaaggaaagggtgttatagtgcaatagcaattaaaatatatcaaatcgcactgaatactcaacaccagagctctaatgtgggaaatggttctcctttccctctcaataaatatctatttttcatttttttactttgtagtttattttttagtgaatgtatttaattttatgaattatttatgattaaaccacatccagaatcttcgttttctgtgaaaaggaagaactagaaaattgctttaaatcttgaaaatacaaggaatgttttaaaatataaaacaaagccaagttaaactgtttacactgatgtgctataaaagcaccaaaaagaaactttactgtagagttacaagtacatttatatatatatgttgctgcatcacttgtgtagttaaattgtatttcaaaacagtgaaaaaattgacatgtatatactgttcattcttgtttatattaagtcttgttttaaatatgtattatgtgtatatattgtttgcagacattattgttcatgccttagaggattgtagcattttattttcgtctgaaggtaatgatagctatacagtctgtacagtaattatcctctaccaacactgtggcgtctccttaatcttggtagtgcctgcctttgaaacagggtgtaggggatattagttttccatttttctattttgttatataattttaagccaccagggcctaaattaaagtataatcatttgtatccatgtggaataaaattgtgacaatttcctacgcacacagtattttttcatagaaacatttccctcccatttgccttgcctcagaaataaatttaaaagacgtttgtaaccactgtgttttatctactgtgtgttgtggtggcctgttggaggcaaatagatcagattttttttgtacctacgtaagagtacttgaagttttatttaaaataaaatgttgtggaaaaggtagcattctttttttaggagtgttatttttcactatgtgtggcacggatacaataaaagacttttacaaactaa

SEQ ID NO: 299933 - DNA, 6207 bp, Artificial Sequence
  derived and/or modified sequence
atggagagcggcgagagactgcccagcagcgccgccagcagcaccacccccaccagcagcagcacccccagcgtggccagcgtggtgagcaagggcggcctgagcaccggcgtggccagcctgagcagcaccatcaacccctgcggccacctgttcagaaccgccggcgaccagcccttcaacctgagcaccgtgagcagcgccttccccatggtgagccaccccgtgttcggcctgcacagcgccagcagcggccacagcgagttcggcggcctgggcaccctgggcacccccaccgccctggccgcccacccccagctggccagcttccccgagtggtggagaaccaccgacgcccacaccagaaccggcgccaccttcttcccccccctgctgggcatcccccccctgttcgccccccccgcccagaaccacgacagcagcagcttccacagcagaaccagcggcaagagcaacagaaacggccccgagaagggcgtgaacggcagcatcaacggcagcaacaccagcagcgtgatcggcatcaacaccagcgtgctgagcaccaccgccagcagcagcatgggccagaccaagagcaccagcagcggcggcggcaacagaaagtgcaaccaggagcagagcaagaaccagcccctggacgccagagtggacaagatcaaggacaagaagcccagaaagaaggccatggagagcagcagcaacagcgacagcgacagcggcaccagcagcgacaccagcagcgagggcatcagcagcagcgacagcgacgacctggaggaggacgaggaggaggaggaccagagcatcgaggagagcgaggacgacgacagcgacagcgagagcgaggcccagcacaagagcaacaaccaggtgctgctgcacggcatcagcgaccccaaggccgacggccagaaggccaccgagaaggcccaggagaagagaatccaccagcccctgcccctggccagcgagagccagacccacagcttccagagccagcagaagcagccccaggtgctgagccagcagctgcccttcatcttccagagcagccaggccaaggaggagagcgtgaacaagcacaccagcgtgatccagagcaccggcctggtgagcaacgtgaagcccctgagcctggtgaaccaggccaagaaggagacctacatgaagctgatcgtgcccagccccgacgtgctgaaggccggcaacaagaacaccagcgaggagagcagcctgctgaccagcgagctgagaagcaagagagagcagtacaagcaggccttccccagccagctgaagaagcaggagagcagcaagagcctgaagaaggtgatcgccgccctgagcaaccccaaggccaccagcagcagccccgcccaccccaagcagaccctggagaacaaccaccccaaccccttcctgaccaacgccctgctgggcaaccaccagcccaacggcgtgatccagagcgtgatccaggaggcccccctggccctgaccaccaagaccaagatgcagagcaagatcaacgagaacatcgccgccgccagcagcacccccttcagcagccccgtgaacctgagcaccagcggcagaagaacccccggcaaccagacccccgtgatgcccagcgccagccccatcctgcacagccagggcaaggagaaggccgtgagcaacaacgtgaaccccgtgaagacccagcaccacagccaccccgccaagagcctggtggagcagttcagaggcaccgacagcgacatccccagcagcaaggacagcgaggacagcaacgaggacgaggaggaggacgacgaggaggaggacgaggaggacgacgaggacgacgagagcgacgacagccagagcggcaccagcaagagaagaagagtgaccgacgagagagagctgagaatccccctggagtacggctggcagagagagaccagaatcagaaacttcggcggcagactgcagggcgaggtggcctactacgccccctgcggcaagaagctgagacagtaccccgaggtgatcaagtacctgagcagaaacggcatcatggacatcagcagagacaacttcagcttcagcgccaagatcagagtgggcgacttctacgaggccagagacggcccccagggcatgcagtggtgcctgctgaaggaggaggacgtgatccccagaatcagagccatggagggcagaagaggcagaccccccaaccccgacagacagagagccagagaggagagcagaatgagaagaagaaagggcagaccccccaacgtgggcaacgccgagttcctggacaacgccgacgccaagctgctgagaaagctgcaggcccaggagatcgccagacaggccgcccagatcaagctgctgagaaagctgcagaagcaggagcaggccagagtggccaaggaggccaagaagcagcaggccatcatggccgccgaggagaagagaaagcagaaggagcagatcaagatcatgaagcagcaggagaagatcaagagaatccagcagatcagaatggagaaggagctgagagcccagcagatcctggaggccaagaagaagaagaaggaggaggccgccaacgccaagctgctggaggccgagaagagaatcaaggagaaggagatgagaagacagcaggccgtgctgctgaagcaccaggagagagagagaagaagacagcacatgatgctgatgaaggccatggaggccagaaagaaggccgaggagaaggagagactgaagcaggagaagagagacgagaagagactgaacaaggagagaaagctggagcagagaagactggagctggagatggccaaggagctgaagaagcccaacgaggacatgtgcctggccgaccagaagcccctgcccgagctgcccagaatccccggcctggtgctgagcggcagcaccttcagcgactgcctgatggtggtgcagttcctgagaaacttcggcaaggtgctgggcttcgacgtgaacatcgacgtgcccaacctgagcgtgctgcaggagggcctgctgaacatcggcgacagcatgggcgaggtgcaggacctgctggtgagactgctgagcgccgccgtgtgcgaccccggcctgatcaccggctacaaggccaagaccgccctgggcgagcacctgctgaacgtgggcgtgaacagagacaacgtgagcgagatcctgcagatcttcatggaggcccactgcggccagaccgagctgaccgagagcctgaagaccaaggccttccaggcccacacccccgcccagaaggccagcgtgctggccttcctgatcaacgagctggcctgcagcaagagcgtggtgagcgagatcgacaagaacatcgactacatgagcaacctgagaagagacaagtgggtggtggagggcaagctgagaaagctgagaatcatccacgccaagaagaccggcaagagagacaccagcggcggcatcgacctgggcgaggagcagcaccccctgggcacccccacccccggcagaaagagaagaagaaagggcggcgacagcgactacgacgacgacgacgacgacgacagcgacgaccagggcgacgaggacgacgaggacgaggaggacaaggaggacaagaagggcaagaagaccgacatctgcgaggacgaggacgagggcgaccaggccgccagcgtggaggagctggagaagcagatcgagaagctgagcaagcagcagagccagtacagaagaaagctgttcgacgccagccacagcctgagaagcgtgatgttcggccaggacagatacagaagaagatactggatcctgccccagtgcggcggcatcttcgtggagggcatggagagcggcgagggcctggaggagatcgccaaggagagagagaagctgaagaaggccgagagcgtgcagatcaaggaggagatgttcgagaccagcggcgacagcctgaactgcagcaacaccgaccactgcgagcagaaggaggacctgaaggagaaggacaacaccaacctgttcctgcagaagcccggcagcttcagcaagctgagcaagctgctggaggtggccaagatgccccccgagagcgaggtgatgacccccaagcccaacgccggcgccaacggctgcaccctgagctaccagaacagcggcaagcacagcctgggcagcgtgcagagcaccgccacccagagcaacgtggagaaggccgacagcaacaacctgttcaacaccggcagcagcggccccggcaagttctacagccccctgcccaacgaccagctgctgaagaccctgaccgagaagaacagacagtggttcagcctgctgcccagaaccccctgcgacgacaccagcctgacccacgccgacatgagcaccgccagcctggtgaccccccagagccagccccccagcaagagccccagccccacccccgcccccctgggcagcagcgcccagaaccccgtgggcctgaaccccttcgccctgagccccctgcaggtgaagggcggcgtgagcatgatgggcctgcagttctgcggctggcccaccggcgtggtgaccagcaacatccccttcaccagcagcgtgcccagcctgggcagcggcctgggcctgagcgagggcaacggcaacagcttcctgaccagcaacgtggccagcagcaagagcgagagccccgtgccccagaacgagaaggccaccagcgcccagcccgccgccgtggaggtggccaagcccgtggacttccccagccccaagcccatccccgaggagatgcagttcggctggtggagaatcatcgaccccgaggacctgaaggccctgctgaaggtgctgcacctgagaggcatcagagagaaggccctgcagaagcagatccagaagcacctggactacatcacccaggcctgcctgaagaacaaggacgtggccatcatcgagctgaacgagaacgaggagaaccaggtgaccagagacatcgtggagaactggagcgtggaggagcaggccatggagatggacctgagcgtgctgcagcaggtggaggacctggagagaagagtggccagcgccagcctgcaggtgaagggctggatgtgccccgagcccgccagcgagagagaggacctggtgtacttcgagcacaagagcttcaccaagctgtgcaaggagcacgacggcgagttcaccggcgaggacgagagcagcgcccacgccctggagagaaagagcgacaaccccctggacatcgccgtgaccagactggccgacctggagagaaacatcgagagaagaatcgaggaggacatcgcccccggcctgagagtgtggagaagagccctgagcgaggccagaagcgccgcccaggtggccctgtgcatccagcagctgcagaagagcatcgcctgggagaagagcatcatgaaggtgtactgccagatctgcagaaagggcgacaacgaggagctgctgctgctgtgcgacggctgcgacaagggctgccacacctactgccacagacccaagatcaccaccatccccgacggcgactggttctgccccgcctgcatcgccaaggccagcggccagaccctgaagatcaagaagctgcacgtgaagggcaagaagaccaacgagagcaagaagggcaagaaggtgaccctgaccggcgacaccgaggacgaggacagcgccagcaccagcagcagcctgaagagaggcaacaaggacctgaagaagagaaagatggaggagaacaccagcatcaacctgagcaagcaggagagcttcaccagcgtgaagaagcccaagagagacgacagcaaggacctggccctgtgcagcatgatcctgaccgagatggagacccacgaggacgcctggcccttcctgctgcccgtgaacctgaagctggtgcccggctacaagaaggtgatcaagaagcccatggacttcagcaccatcagagagaagctgagcagcggccagtaccccaacctggagaccttcgccctggacgtgagactggtgttcgacaactgcgagaccttcaacgaggacgacagcgacatcggcagagccggccacaacatgagaaagtacttcgagaagaagtggaccgacaccttcaaggtgagctag

SEQ ID NO: 299934 - DNA, 432 bp, Artificial Sequence
  derived and/or modified sequence
atggagtccggggagagacttccttcctccgcagccagctccaccacccccacaagctcctcgactccctccgttgcaagtgtggtttctaaaggtggactatccactggggtcgctagcctgtcttcaacaatcaacccgtgcggacacctctttcgcactgctggcgatcagccatttaatctgagcactgtgtccagcgccttcccaatggtttctcacccggtgttcggattgcactccgcttctagcggccatagtgaatttggcggtctgggaacactcggcaccccaacagcactggcagctcaccctcagctggccagctttcctggagctgagtggtggagaacaaccgatgcacacacccggacaggtgctacatttttcccaccactcctgggaatacctccactgtttgccccaccatag

SEQ ID NO: 299935 - DNA, 432 bp, Artificial Sequence
  derived and/or modified sequence
atggagagcggggagcggctgcccagcagcgctgccagcagcaccacccccaccagcagcagcacccccagcgtggcctctgtggtgtccaaaggaggcctgagcactggagtggccagcctgagcagcaccatcaacccctgtggccacctgttcagaacagctggggaccagcccttcaacctgagcacagtgtcctctgccttccccatggtgagccaccctgtgtttggcctgcacagcgccagcagcggccacagcgagtttggaggcctgggcaccctgggcacccccacagccctggccgcccacccccagctggccagcttccctggagctgagtggtggaggaccacagatgcccacaccaggactggagccaccttcttcccccccctgctgggcatcccccccctgtttgccccaccctag

SEQ ID NO: 299936 - DNA, 432 bp, Artificial Sequence
  derived and/or modified sequence
atggagagcggcgagcggctgcccagcagcgccgccagcagcaccacacccacctcgtcctctacaccttcagttgccagtgtggttagtaaaggaggcctcagcactggggtggcctctctctcttccaccataaacccgtgtgggcacctgtttcggactgccggggatcagcccttcaacctctctactgtgtcatcggcctttcccatggttagccacccggtgtttggcctgcactcagctagcagtggccacagtgaattcggcggactggggacacttgggactcctactgccctggccgcccacccacaattggcttctttccccggagctgaatggtggcgcacaaccgatgcgcatacaaggaccggcgcaaccttttttcctccactactagggataccacccctcttcgcccctccttag

SEQ ID NO: 299937 - DNA, 432 bp, Artificial Sequence
  derived and/or modified sequence
atggaatctggtgaaagactaccaagttccgccgctagcagtaccacaccaactagttcttctactcccagcgttgccagcgtcgtcagtaagggtggactctcgacaggggtggcctcactctcttcgactattaacccttgcggacacctgtttcgtacggcaggagatcagccttttaacctgtctaccgtctctagcgctttccccatggtttcacatcccgtgtttgggcttcattccgcctcctcaggccactctgagtttggtggtcttggcacactggggacacccacagcccttgccgcacacccccaactggcttccttccctggtgcagagtggtggcgcactaccgatgcccatacacggacgggggctacatttttccccccactcctcggcattcccccacttttcgcacccccttag

SEQ ID NO: 299938 - DNA, 432 bp, Artificial Sequence
  derived and/or modified sequence
atggagagcggcgagagactgcccagcagcgccgccagcagcaccacccccaccagcagcagcacccccagcgtggccagcgtggtgagcaagggcggcctgagcaccggcgtggccagcctgagcagcaccatcaacccctgcggccacctgttcagaaccgccggcgaccagcccttcaacctgagcaccgtgagcagcgccttccccatggtgagccaccccgtgttcggcctgcacagcgccagcagcggccacagcgagttcggcggcctgggcaccctgggcacccccaccgccctggccgcccacccccagctggccagcttccccggcgccgagtggtggagaaccaccgacgcccacaccagaaccggcgccaccttcttcccccccctgctgggcatcccccccctgttcgcccccccctag

SEQ ID NO: 299939 - protein, 82 aa, Artificial Sequence
  derived and/or modified sequence
MSSVAVLTQESFAEHRSGLVPQQIKVATLNSEEESDPPTYKDAFPPLPEKAACLESAQEPSGAWGNKIRPIKASVITQVFHV

SEQ ID NO: 299940 - protein, 69 aa, Artificial Sequence
  derived and/or modified sequence
MSSVAVLTQESFAEHRSGLVPQQIKVATLNSEEESDPPTYKDAFPPLPEKAACLESAQEPSGAWGNKIR

SEQ ID NO: 299941 - protein, 54 aa, Artificial Sequence
  derived and/or modified sequence
MSSVAVLTQESFAEHRSGLVPQQIKVATLNSEEESDPPTYKDAFPPLPEKAACL

SEQ ID NO: 299942 - protein, 224 aa, Artificial Sequence
  derived and/or modified sequence
MSSVAVLTQESFAEHRSGLVPQQIKVATLNSEEESDPPTYKDAFPPLPEKAACLESAQEPSGAWGNKIRPIKASVITQVFHVPLEERKYKDMNQFGEGEQAKICLEIMQRTGAHLELSLAKDQGLSIMVSGKLDAVMKARKDIVARLQTQASATVAIPKEHHRFVIGKNGEKLQDLELKTATKIQIPRPDDPSNQIKITGTKEGIEKARHEVLLISAEQDKRAV

SEQ ID NO: 299943 - protein, 81 aa, Artificial Sequence
  derived and/or modified sequence
MSSVAVLTQESFAEHRSGLVPQQIKVATLNSEEESDPPTYKDAFPPLPEKAACLESAQEPSGAWGNKIRPIKASVITQVFH

SEQ ID NO: 299944 - protein, 79 aa, Artificial Sequence
  derived and/or modified sequence
MSSVAVLTQESFAEHRSGLVPQQIKVATLNSEEESDPPTYKDAFPPLPEKAACLESAQEPSGAWGNKIRPIKASVITQV

SEQ ID NO: 299945 - protein, 96 aa, Artificial Sequence
  derived and/or modified sequence
MSSVAVLTQESFAEHRSGLVPQQIKVATLNSEEESDPPTYKDAFPPLPEKAACLESAQEPSGAWGNKIRPIKASVITQVFHVPLEERKYKDMNQFG

SEQ ID NO: 299946 - protein, 221 aa, Artificial Sequence
  derived and/or modified sequence
MSSVAVLTQESFAEHRSGLVPQQIKVATLNSEEESDPPTYKDAFPPLPEKAACLESAQEPSGAWGNKIRPIKASVITQVFHVPLEERKYKDMNQFGEGEQAKICLEIMQRTGAHLELSLAKDQGLSIMVSGKLDAVMKARKDIVARLQTQASATVAIPKEHHRFVIGKNGEKLQDLELKTATKIQIPRPDDPSNQIKITGTKEGIEKARHEVLLISAEQDK

SEQ ID NO: 299947 - protein, 141 aa, Artificial Sequence
  derived and/or modified sequence
MSSVAVLTQESFAEHRSGLVPQQIKVATLNSEEESDPPTYKDAFPPLPEKAACLESAQEPSGAWGNKIRPIKASVITQVFHVPLEERKYKDMNQFGEGEQAKICLEIMQRTGAHLELSLAKDQGLSIMVSGKLDAVMKARK

SEQ ID NO: 299948 - protein, 126 aa, Artificial Sequence
  derived and/or modified sequence
MSSVAVLTQESFAEHRSGLVPQQIKVATLNSEEESDPPTYKDAFPPLPEKAACLESAQEPSGAWGNKIRPIKASVITQVFHVPLEERKYKDMNQFGEGEQAKICLEIMQRTGAHLELSLAKDQGLS

SEQ ID NO: 299949 - protein, 147 aa, Artificial Sequence
  derived and/or modified sequence
MSSVAVLTQESFAEHRSGLVPQQIKVATLNSEEESDPPTYKDAFPPLPEKAACLESAQEPSGAWGNKIRPIKASVITQVFHVPLEERKYKDMNQFGEGEQAKICLEIMQRTGAHLELSLAKDQGLSIMVSGKLDAVMKARKDIVARL

SEQ ID NO: 299950 - protein, 17 aa, Artificial Sequence
  derived and/or modified sequence
MSSVAVLTQESFAEHRS

SEQ ID NO: 299951 - protein, 164 aa, Artificial Sequence
  derived and/or modified sequence
MSSVAVLTQESFAEHRSGLVPQQIKVATLNSEEESDPPTYKDAFPPLPEKAACLESAQEPSGAWGNKIRPIKASVITQVFHVPLEERKYKDMNQFGEGEQAKICLEIMQRTGAHLELSLAKDQGLSIMVSGKLDAVMKARKDIVARLQTQASATVAIPKEHHRF

SEQ ID NO: 299952 - protein, 47 aa, Artificial Sequence
  derived and/or modified sequence
MSSVAVLTQESFAEHRSGLVPQQIKVATLNSEEESDPPTYKDAFPPL

SEQ ID NO: 299953 - protein, 151 aa, Artificial Sequence
  derived and/or modified sequence
MLLPYLRKKLRLTGTKYGCGGGGCGACTVMISRYNPITKRIRHHPANACLIPICSLYGAAVTTVEGIGSTHTRIHPVQERIAKCHGTQCGFCTPGMVMSIYTLLRNHPEPTLDQLTDALGGNLCRCTGYRPIIDACKTFCKTSGCCQSKEN

SEQ ID NO: 299954 - DNA, 195 bp, Artificial Sequence
  derived and/or modified sequence
atggtgatcatccccacaatcggaggaaacacgctcgttatcttagccgtcagcttggagaagaagctccagtatgccaccaattacttcttgatgtctctggccgtggctgaccttctggtgggcctattcgtgatgcccattgctctgctcacaatcatgttcggcattgcaatcccagtgcccatcaagtag

SEQ ID NO: 299955 - DNA, 195 bp, Artificial Sequence
  derived and/or modified sequence
atggtgatcatccccaccatcggcggcaacaccctggtgatcctggccgtgtccctggagaagaagctgcagtatgccaccaactacttcctgatgagcctggccgtggccgacctgctggtgggcctgtttgtgatgcccatcgccctgctgaccatcatgtttggaattgccatccctgtgcccatcaagtag

SEQ ID NO: 299956 - DNA, 195 bp, Artificial Sequence
  derived and/or modified sequence
atggtgatcatccccaccatcggcggcaacaccctggtgatcctggccgtcagcctcgagaaaaagctgcagtatgcgacaaactacttcttaatgagtctcgctgtggcagacctcttggtcgggctgtttgtgatgccaatcgcactgctgacaatcatgttcggcatcgccattcccgtgccaatcaagtag

SEQ ID NO: 299957 - DNA, 195 bp, Artificial Sequence
  derived and/or modified sequence
atggtaattattcccacgattgggggaaataccctggtcatcctagctgtcagcctcgaaaagaagcttcagtacgctaccaattacttcctgatgtctctggccgtagctgacctcctcgttgggctcttcgtgatgcctatcgcactgctgaccattatgtttggaattgcaattcccgtgcctataaagtag

SEQ ID NO: 299958 - DNA, 195 bp, Artificial Sequence
  derived and/or modified sequence
atggtgatcatccccaccatcggcggcaacaccctggtgatcctggccgtgagcctggagaagaagctgcagtacgccaccaactacttcctgatgagcctggccgtggccgacctgctggtgggcctgttcgtgatgcccatcgccctgctgaccatcatgttcggcatcgccatccccgtgcccatcaagtag

SEQ ID NO: 299959 - protein, 476 aa, Artificial Sequence
  derived and/or modified sequence
MMERIRKEMILMERGLHSPTAGKRFSNLSNSAGNAVLEALENSQHPARLSPRLPSAPLHSALGELPAKGKFEIDTLFNLQHTGSESTVSSEISSAAESRKKPGHYSEAAAEADMSSDVEVGCSALRSPGGLGAAQLKENNGKGYAESGSAAGTTTSASGSGLGSLHGGSGGSGGSAALGGSGSGADQVRRYRTAFTREQIARLEKEFYRENYVSRPRRCELAAALNLPETTIKVWFQNRRMKDKRQRLAMSWPHPADPSFYTYMMTHAAATGSLPYPFHSHVPLHYYPHVGVTAAAAAAAASGAAAAASSPFATSIRPLDTFRALSHPYSRPELLCSFRHPGLYQAPAAAAGLNSAASAAAAAAAAAAAASSAAAAGAPPSGGSAPCSCLSCHSSQSAAAAAAAAAAALGSRGGGGGGGGGGGGGGGGAGAGGGSDFGCSAAAPRSESGFLPYSAAVLSKTAVSPPDQRDEAPLTR

SEQ ID NO: 299960 - DNA, 356 bp, Artificial Sequence
  derived and/or modified sequence
cagctgggagaccacagggtactcggggttgggcttggtcggagagaagtagaccaagcccattcagaggtccggaaggggcagaggtcctgggacacgagctgggaacacggggcgctccctaacccaggctgcggcgcgtctctccccgcaggtgtggttccagaaccggcgcatgaaggacaagcggcagcgcctggccatgtcctggccgcacccagccgaccccagcttctacacctacatgatgacgcacgcggccgccaccggaagcctgccctaccccttccactcgcacgtgccgctgcactactacccgcacgtgggcgtcacggcggcggcggccgcggctgcag

SEQ ID NO: 299961 - DNA, 92 bp, Artificial Sequence
  derived and/or modified sequence
acttgaatcgaatggaaaggaatttaatgaacttaaatcgaatggaatataatggtatggaatggactcatggaatggaatggaaaggaatc

SEQ ID NO: 299962 - DNA, 4203 bp, Artificial Sequence
  derived and/or modified sequence
caatttttccgcctccctccgaaagcgataataatatttagaggcgttcgctggggctgaatgagaattagccctaggcgcagcctatcattaggacgggacagcagggccactgtgacatttttaagaaagctgagatgatggaaagaataagaaaagagatgattctgatggagagagggctgcacagccctacggcgggcaagagattctccaatttgtccaactcggctggcaatgctgtgctcgaggccctggaaaattcgcagcacccggctcgcctaagcccgcgcctgccgtctgcccccctgcacagcgctctgggagaactccccgccaagggcaaattcgaaatagacactttgttcaacctgcagcacacgggcagcgaaagcaccgtctcctccgaaatctcctccgccgccgagagccgcaagaagccgggccattattcagaggcggccgctgaggccgacatgagcagcgacgtggaggtgggctgctccgcgcttcgctcccccgggggcctcggcgccgctcagcttaaggaaaacaatggcaaagggtacgcagagagcggctcggctgccggcaccacgacgtcggcgtcgggctcaggcctcggaagcctgcatggaggcagcggaggcagcggcgggagcgcggcgctgggtggctccggctctggcgcggatcaagtgcggcgctaccgtacggcgttcacccgcgagcagatcgcgcgcctggagaaggagttctaccgggagaactatgtgtcgcggccccgccggtgcgagctggccgcggcactcaacctgcccgaaaccaccatcaaggtgtggttccagaaccggcgcatgaaggacaagcggcagcgcctggccatgtcctggccgcacccagccgaccccagcttctacacctacatgatgacgcacgcggccgccaccggaagcctgccctaccccttccactcgcacgtgccgctgcactactacccgcacgtgggcgtcacggcggcggcggccgcggctgcagcctcaggcgcggcggccgcggcttcgtcgcccttcgctacttccatccggccactggacaccttccgcgccctctcgcacccctactctcggccggagctgctgtgtagcttccgccaccctggtctctaccaggctcccgcggccgccgcggggctcaacagcgcggcctctgccgcggcagccgcggcagccgcagcggctgcggcctcctcggcggcggcggccggcgcgccccccagcggcggctctgcaccctgctcgtgcctcagttgccacagcagtcagtcggcggcggcagccgcggcagcagctgccgcagccctgggttcccggggtggcggtggcggcggcggtggtggtggtggcggcggcggcgggggcgccggggccgggggaggctcggacttcggctgcagcgcggcggcgccgcgttccgagagcggcttcctgccctactcggccgcggtgcttagtaagacggccgtgagcccgccggaccagagggacgaggctccgctcaccagataactacgtcgccaccgccagggggccgcgcccgcctctctgagtgtgcccgggagtcccctgtgcgccccctgagccctccgcgcgttgcccgctgctgccgctgccgccagggggcgccccggggcgcgggaggccgaagggaacctgctccgaattgggggagaaggagcaggcgcaaaagcctggcgggcatccccctaaattatttctatttttgtatttgccacccagccgtctgcccttctctctcttttctggctcccgggacccactttccacctctgtcctgagcgcttggtttcccaaagaccaacccctcgccccctaagctagtcctggctgtgcactctcaggtccgggttgcttggctgaacggcgtggcccgaagcaacggagaaccacaacaaagacagagggggatgctgtgcgctggtgcttgggggcgggggaggagtcgccccggaggtttctcgctgctgctgtttttcttccttttctttcaacgagggtgggggaggtggcaaacgttctttcagcctgagcttattagggaccctgcccgaagagtgcgggagaacggaggtctgataaggccgggaggacggatggagagcgtgggcagcggtggttgtttgtgagattgtttactacgttcaggagcaaggcgggtagggatgtggccgccttccccgggaaggacaaagccgaggtgctggaaggggtggccgttgcgccgcctccttttcggtccaacacctttctctcttttggtctttggtttcagtgctgatggaatggaagcatcttgcatattttatgcaaaaagtgatggcaaaagaggttgccacggccagggaagggaaaggaagggagttggggtaggggtaagactgatagatcgctgtagtatttggagaggcgttttcagctcagttttccaactaccgggttccactcgatctgggaaatacttgaatctctagatatattaatattatcctaaagcatttccttagacacttttctaagttagaactctctatgtccctcgtccccttctctcctcgctttccttttcctcgggtgaaatggttcttggcatatttctcacgcatgtctattgcgccttcgcctctgcaaagccaccgctgggttgctgagacccgctctgccaacccggctactggaggggtttccttgaacttgaagaaaggtacatcaaaacccactagtgttaactgccacgtcaagtttgatgctaataatgtgcagattatgacgaaaattgccaatcatgctctctgatggacctcctttgaatgtggaattggagaaaagttccccgcacggagacctgctgtcaagtactaacaacccgctaagggaagtcattaggagagacggataagagactcggtacataaaacattgttcttggtgcatagaatgtatgttatttaatgttatctctgttacctgaagtgatttcgcagaagaaagccacgttcttatcatctcaattgccgattttcattttggtaacttggacgccctgggtagacttttctctgttaagttgatattccaccagtgtgaacagcctcattaaatcaagcccagatatttccataatgctccccgcagagccacttggctcctcacataatgagattttctgaagagttgaagccctaaaataacttgctagtgcatgtttagacccagcgaagtgggtatgtgtgtgtacgtgtattaaaatgtaggtaggctacctacatgtgtttgtgtatgtgtatatatatgtatatgtatgtatatgcatatatatatccgtgctcttaaatacatatgtaagagatacacacatattcatgtatacatacacattggcactattttctgtggtttatttcagatttgtgtcctgccatcatattgttattttaaagacactggattttaaaatatcatttcctaaatataggctttcagtaaacttttgaaagaattagttttccaggagaaattatttccatcaaatggaaaatacataaaggggaaacagtatttcgaaattcctggggtctattaaaatattaccataaaatattagagaactttccaatgaaatagcaatgatctaaaacttaagtttttgtttttgtttttaaaaacatgagactacttatgtaaaatattgattataccagctcttattcactgagtttacatttttaaaaatattaatatataatttaaggctaaataaaataaaccaaaatatggtaccctttatcagctttacctatttagattgttaaagtcctttgttatgatcagctaacagatgtatataaggtactttaggcagtaatgtttacatttcccccaaaaaatatatatgattgatgagaacgctggttggtaaaattaacataaattcatcatttgttgggtccattggatctggttattatattgaaataaaattgtaaataaagtcttcgtgctttaaatattgctggatgtatgaactcactgtaagatattttacaaatgtgcaataattataaagccttgtatattacgttatttattgtgtttggtcatgtaaaataaatgttatttaaatcaa

SEQ ID NO: 299963 - DNA, 1431 bp, Artificial Sequence
  derived and/or modified sequence
atgatggagagaatcagaaaagagatgattctgatggagagggggttacattcgcccacagccggtaagcgcttctccaatctttctaacagcgccggcaacgcagtcctggaagccctagagaatagccagcatcccgctaggctgtcacctcgacttcccagtgctcccctccattcagcactgggagaactcccagcaaaagggaaatttgaaatagataccctcttcaacttacagcacactggcagcgagtcaaccgtgtcctccgagattagctcggccgccgaatccagaaagaaaccaggtcactattcagaggctgctgccgaagccgatatgtccagcgacgtggaagtcggttgtagtgcgctccggtcacccggcggactgggagccgcgcagttaaaggagaataacggtaaaggctatgcagaaagtggctcagccgcaggtactaccacctcagcaagtgggtccggcctggggagtctgcacggcggaagtggagggtcgggtgggtctgccgccctaggcggtagcggaagcggtgcagatcaagtgaggcgatatcgcacggctttcacgagggaacagatagcccgcctcgaaaaagagttctatcgagaaaactatgtgagtcgtcctcggagatgcgagcttgccgcagcgctcaacttaccagaaacaaccatcaaggtatggtttcaaaaccgtagaatgaaagacaagcgccagaggctggctatgagttggccgcaccccgccgaccccagcttctacacatatatgatgactcatgcagccgctaccggaagtctgccataccccttccatagccacgtgcctctgcattactaccctcacgtgggcgtgaccgcagccgctgcggccgcagccgctagcggggcagccgccgcagcctcttccccctttgccacgagcatcaggcccctggatacatttcgagctctcagtcacccttattcaaggcccgaactgttgtgctctttccgtcatcccgggctttatcaggccccagcagctgccgcaggactcaacagcgcggcaagcgccgccgccgctgctgccgccgccgccgccgcagccagctcagccgcagctgccggggcccctccctccggagggtctgccccctgcagttgcctaagttgtcattcctctcagtctgctgccgccgcagcagctgcagccgcggccgcactcggatcacggggaggcggagggggcggaggtggtggcggaggagggggtgggggcggggctggagccggaggaggtagtgactttgggtgttcagcggcagcgcctagaagcgagtcaggctttcttccctacagcgccgccgttctatccaagacagccgtaagtccaccggaccaacgggatgaggcccctctgactcgatag

SEQ ID NO: 299964 - DNA, 1431 bp, Artificial Sequence
  derived and/or modified sequence
atgatggagcgcatcaggaaggagatgatcctgatggagcggggcctgcacagccccacagctgggaagcgcttcagcaacctgagcaacagcgctggaaatgctgtgctggaggccctggagaacagccagcacccagcccggctgagcccccggctgcccagcgcccccctgcacagcgccctgggggagctgcctgccaagggcaagtttgaaattgacaccctcttcaacctgcagcacacaggcagcgagagcacagtgagcagcgagatcagcagcgctgctgagagcaggaagaagccaggccactacagcgaggccgctgctgaggccgacatgagcagtgatgtggaggtgggctgcagcgccctgcggagccctgggggcctgggcgccgcccagctgaaggagaacaacgggaagggctatgcagagagcggcagcgctgctggcaccaccaccagcgccagcggcagcggcctgggcagcctgcacggcggcagcggcggcagcggcggcagcgctgccctgggcggcagcggcagcggggctgaccaggtgcggcgctacagaacagccttcacccgggagcagatcgcccggctggagaaggagttctaccgggagaactacgtgtcccggccccggcgctgtgagctggccgccgccctgaacctgcctgagaccaccatcaaggtgtggttccagaacagaaggatgaaggacaagaggcagaggctggccatgtcctggccccaccctgctgaccccagcttctacacctacatgatgacccacgccgccgccaccggcagcctgccctaccccttccacagccacgtgcccctgcactactacccccacgtgggcgtgacagctgctgctgctgctgctgctgccagcggggctgctgctgctgccagcagcccctttgccaccagcatccggcccctggacaccttccgggccctgagccacccctacagcaggcctgagctgctgtgcagcttccgccaccctggcctgtaccaggccccagctgctgctgctggcctgaacagcgctgccagcgctgctgctgctgctgctgctgctgctgctgctgccagcagcgctgctgctgctggggcccctccttctgggggcagcgccccctgcagctgcctgagctgccacagcagccagagcgctgctgctgctgctgctgctgctgctgctgccctgggcagcagaggaggcggcggcggcggcggcggcggcggcggcggcggcggcggcggggccggggccggcggcggcagtgactttggctgcagcgctgctgcccccaggtctgagagcggcttcctgccctacagcgctgctgtgctgagcaagacagctgtgtccccaccagaccagagagatgaggcccccctgaccaggtag

SEQ ID NO: 299965 - DNA, 1431 bp, Artificial Sequence
  derived and/or modified sequence
atgatggagcggatccggaaggagatgatcctgatggagcggggcctgcacagtcctactgctggcaaacggttttctaatctgtccaactccgcggggaatgccgtgctggaagccctggagaattcacagcatcccgctagattatccccgcgtctgccctccgcgcccctccactcggccttgggggaattacccgctaagggtaagtttgagatagatacactttttaatctgcagcacacagggagtgagagcacagtgtcttccgaaatttcatcagctgctgaatcccgaaagaaacctggccattatagcgaggccgcagcagaggctgacatgtcctccgacgtggaggtcgggtgctccgccctgcggtcgcctggtggactgggggccgcacagttgaaggagaataacggcaagggatatgccgaatccggcagtgccgccggcacaaccacttccgcctcaggcagtgggttaggttctctgcatggaggttcagggggcagcggaggcagtgccgcactgggtggctctggctcaggcgcggatcaagtccgcagataccgaaccgcctttacccgagagcagattgctcgcctggaaaaggaattttacagagaaaattatgtctcgagaccacgccggtgtgagctggccgccgcactcaacttacccgaaactaccattaaagtctggttccagaaccgaagaatgaaggacaagcggcagagactggcgatgtcatggccccaccctgctgacccctctttctacacttacatgatgactcacgctgccgccactggttcactaccatatcctttccacagccacgtgccattacactactatccccacgtgggagtaaccgctgctgccgccgctgcagctgcaagcggagctgctgccgcggcgagctccccattcgcgacaagcattaggcctctggacacttttagggccctgagccatccctactcccgcccagagctgctatgtagctttcgtcatcccggtctgtaccaggcccccgcagccgccgccggccttaactcagctgccagcgcggctgctgctgcagctgccgccgctgcggcggcatccagcgccgccgctgccggggccccaccgagcggaggctctgctccatgctcatgcctgtcgtgccattccagccaaagcgcagcagctgctgctgcggctgctgctgccgctcttgggagccgcgggggaggaggtggaggaggtggcgggggaggcggcggcggcgggggcgccggagcagggggtgggtcagattttggttgcagtgcggcagcaccccggagtgagtccggattccttccctacagcgctgccgttttgtctaaaacagccgtgtccccgcccgaccagagagacgaagcccctctgaccaggtag

SEQ ID NO: 299966 - DNA, 1431 bp, Artificial Sequence
  derived and/or modified sequence
atgatggagaggatccgtaaagaaatgatcttgatggagcgcggactgcacagcccgaccgctgggaagcggtttagcaatctatcaaacagcgccggaaacgccgtactggaagccctcgaaaattcacagcaccctgcccgactctcccctaggttacctagcgccccattacactccgctttgggagagctgccagccaaagggaagttcgagattgatacactcttcaacctacagcataccggaagcgaatccactgtgtccagcgagatctcgtccgctgccgaatcccgaaaaaagcccggtcattacagcgaggcagcagccgaggcagacatgagtagcgatgtggaggtgggttgctccgctctgcgtagccctggcggtcttggggctgcacagctaaaagaaaataacggaaagggatatgcagagagtggctcggccgctggcactacaacatctgcatctggttcaggacttggaagtttgcacggaggaagcggcggatctggcggatcagccgctctcggcggatccgggtccggagctgaccaggttaggcggtatcgaactgcatttacccgcgagcaaatcgcaagactggagaaggaattttatagagaaaactacgtctctcggcctagaaggtgtgagcttgccgcagcactcaacctgcccgaaactaccattaaggtatggtttcagaaccgacgtatgaaagataaacgtcagcgtctcgccatgtcatggcctcatccagcagacccatctttttacacatacatgatgacacacgctgccgctacaggaagcctaccttacccttttcacagccatgtacccctgcattattacccccacgtgggagtaacagccgcagcagccgcagccgcagcaagcggcgcagcagccgcagctagttccccgtttgccacatctataaggccgcttgacacattcagagcactttctcacccgtattccaggcctgaactcctgtgttcatttcgccatcccggtctgtaccaggcccctgccgctgctgctggtttgaatagtgctgccagcgccgctgcagccgcagccgcagccgcagctgccgcatccagcgcagctgcagccggagcaccacctagtggcggatcagccccttgcagttgcctcagctgccatagcagtcagtccgcagccgcagcagcagccgctgccgctgccgctctcggttcaagaggagggggagggggaggagggggaggtggaggaggtggcggaggcggagcaggagcaggcggtggatcagacttcggctgctcagcggctgcaccccgtagtgaaagcggattcttgccatactcggcggcagtgctctctaagactgccgtgagcccacccgaccagcgggatgaagcacccttgactcgctag

SEQ ID NO: 299967 - DNA, 1431 bp, Artificial Sequence
  derived and/or modified sequence
atgatggagagaatcagaaaggagatgatcctgatggagagaggcctgcacagccccaccgccggcaagagattcagcaacctgagcaacagcgccggcaacgccgtgctggaggccctggagaacagccagcaccccgccagactgagccccagactgcccagcgcccccctgcacagcgccctgggcgagctgcccgccaagggcaagttcgagatcgacaccctgttcaacctgcagcacaccggcagcgagagcaccgtgagcagcgagatcagcagcgccgccgagagcagaaagaagcccggccactacagcgaggccgccgccgaggccgacatgagcagcgacgtggaggtgggctgcagcgccctgagaagccccggcggcctgggcgccgcccagctgaaggagaacaacggcaagggctacgccgagagcggcagcgccgccggcaccaccaccagcgccagcggcagcggcctgggcagcctgcacggcggcagcggcggcagcggcggcagcgccgccctgggcggcagcggcagcggcgccgaccaggtgagaagatacagaaccgccttcaccagagagcagatcgccagactggagaaggagttctacagagagaactacgtgagcagacccagaagatgcgagctggccgccgccctgaacctgcccgagaccaccatcaaggtgtggttccagaacagaagaatgaaggacaagagacagagactggccatgagctggccccaccccgccgaccccagcttctacacctacatgatgacccacgccgccgccaccggcagcctgccctaccccttccacagccacgtgcccctgcactactacccccacgtgggcgtgaccgccgccgccgccgccgccgccgccagcggcgccgccgccgccgccagcagccccttcgccaccagcatcagacccctggacaccttcagagccctgagccacccctacagcagacccgagctgctgtgcagcttcagacaccccggcctgtaccaggcccccgccgccgccgccggcctgaacagcgccgccagcgccgccgccgccgccgccgccgccgccgccgccgccagcagcgccgccgccgccggcgccccccccagcggcggcagcgccccctgcagctgcctgagctgccacagcagccagagcgccgccgccgccgccgccgccgccgccgccgccctgggcagcagaggcggcggcggcggcggcggcggcggcggcggcggcggcggcggcggcgccggcgccggcggcggcagcgacttcggctgcagcgccgccgcccccagaagcgagagcggcttcctgccctacagcgccgccgtgctgagcaagaccgccgtgagcccccccgaccagagagacgaggcccccctgaccagatag

SEQ ID NO: 299968 - protein, 716 aa, Artificial Sequence
  derived and/or modified sequence
MLLGASWLCASKAAAAAAQSEGDEDRPGERRRRRAAATAAGAGEDMDESSLLDLLECSVCLERLDTTAKVLPCQHTFCRRCLESIVCSRHELRCPECRILVGCGVDELPANILLVRLLDGIRQRPRAGTSPGGSPPARPIPGQSAAPTLAGGGGGAAGSTPGSPVFLSAAAGSTAGSLRELATSRTAPAAKNPCLLPYGKALYSYEGKEPGDLKFNKGDIIVLRRKVDEQWYHGELHGTQGFLPASYIQCIQPLPHAPPQGKALYDFEMKDKDQDKDCLTFTKDEILTVLRRVDENWAEGMLGDKIGIFPLLYVELNDSAKQLIEMDKPCPAAASSCNASLPSDSGAVASVAPSPTLSSSGAVSAFQRRVDGKKNTKKRHSFTALSVTHRSSQAASHRHSMEISAPVLISSSDPRAAARIGDLAHLSCAAPTQDVSSSAGSTPTAVPRAASVSGEQGTPPKVQLPLNVYLALYAYKPQKSDELELHKGEMYRVLEKCQDGWFKGASLRTGVSGVFPGNYVTPVSRVPAGGAGPPRNNVVGGSPLAKGITTTMHPGSGSLSSLATATRPALPITTPQAHAQHPTASPPTGSCLRHSAQPTASQARSTISTAAHSAAQAQDRPTATVSPLRTQNSPSRLPATSLRPHSVVSPQHSHQPPVQMCPRPAIPLTSAASAITPPNVSAANLNGEAGGGPIGVLSTSSPTNTGCKLDEKKSEK

SEQ ID NO: 299969 - DNA, 2151 bp, Artificial Sequence
  derived and/or modified sequence
atgctgctgggcgccagctggctgtgcgccagcaaggccgccgccgccgccgcccagagcgagggcgacgaggacagacccggcgagagaagaagaagaagagccgccgccaccgccgccggcgccggcgaggacatggacgagagcagcctgctggacctgctggagtgcagcgtgtgcctggagagactggacaccaccgccaaggtgctgccctgccagcacaccttctgcagaagatgcctggagagcatcgtgtgcagcagacacgagctgagatgccccgagtgcagaatcctggtgggctgcggcgtggacgagctgcccgccaacatcctgctggtgagactgctggacggcatcagacagagacccagagccggcaccagccccggcggcagcccccccgccagacccatccccggccagagcgccgcccccaccctggccggcggcggcggcggcgccgccggcagcacccccggcagccccgtgttcctgagcgccgccgccggcagcaccgccggcagcctgagagagctggccaccagcagaaccgcccccgccgccaagaacccctgcctgctgccctacggcaaggccctgtacagctacgagggcaaggagcccggcgacctgaagttcaacaagggcgacatcatcgtgctgagaagaaaggtggacgagcagtggtaccacggcgagctgcacggcacccagggcttcctgcccgccagctacatccagtgcatccagcccctgccccacgcccccccccagggcaaggccctgtacgacttcgagatgaaggacaaggaccaggacaaggactgcctgaccttcaccaaggacgagatcctgaccgtgctgagaagagtggacgagaactgggccgagggcatgctgggcgacaagatcggcatcttccccctgctgtacgtggagctgaacgacagcgccaagcagctgatcgagatggacaagccctgccccgccgccgccagcagctgcaacgccagcctgcccagcgacagcggcgccgtggccagcgtggcccccagccccaccctgagcagcagcggcgccgtgagcgccttccagagaagagtggacggcaagaagaacaccaagaagagacacagcttcaccgccctgagcgtgacccacagaagcagccaggccgccagccacagacacagcatggagatcagcgcccccgtgctgatcagcagcagcgaccccagagccgccgccagaatcggcgacctggcccacctgagctgcgccgcccccacccaggacgtgagcagcagcgccggcagcacccccaccgccgtgcccagagccgccagcgtgagcggcgagcagggcaccccccccaaggtgcagctgcccctgaacgtgtacctggccctgtacgcctacaagccccagaagagcgacgagctggagctgcacaagggcgagatgtacagagtgctggagaagtgccaggacggctggttcaagggcgccagcctgagaaccggcgtgagcggcgtgttccccggcaactacgtgacccccgtgagcagagtgcccgccggcggcgccggcccccccagaaacaacgtggtgggcggcagccccctggccaagggcatcaccaccaccatgcaccccggcagcggcagcctgagcagcctggccaccgccaccagacccgccctgcccatcaccaccccccaggcccacgcccagcaccccaccgccagcccccccaccggcagctgcctgagacacagcgcccagcccaccgccagccaggccagaagcaccatcagcaccgccgcccacagcgccgcccaggcccaggacagacccaccgccaccgtgagccccctgagaacccagaacagccccagcagactgcccgccaccagcctgagaccccacagcgtggtgagcccccagcacagccaccagccccccgtgcagatgtgccccagacccgccatccccctgaccagcgccgccagcgccatcaccccccccaacgtgagcgccgccaacctgaacggcgaggccggcggcggccccatcggcgtgctgagcaccagcagccccaccaacaccggctgcaagctggacgagaagaagagcgagaagtag

SEQ ID NO: 299970 - DNA, 2151 bp, Artificial Sequence
  derived and/or modified sequence
atgctcctaggggccagttggttgtgtgcgtctaaggccgctgctgctgccgcccaatcagagggagacgaggacaggcccggtgagcgacggcgtaggcgagccgcagcgacagccgctggggcaggggaagatatggatgagtccagtctgctggacctcctggaatgttccgtttgcctggagcgtctggacactacagcaaaagtgctgccatgccagcacacgttctgccgacggtgtctggaatccatagtatgtagccgtcatgagctccggtgcccagagtgccgcattctcgtgggctgtggggtcgacgaattacctgctaacatactactggtccgacttcttgacggtatccgccagcggcctcgcgccgggacctcacctggtggcagtcctccagcccggcctattcccgggcaatcagccgcacctactctggctggcgggggggggggcgcagccggaagtactcctgggagcccagtcttcctctccgctgcagccggaagtactgcgggctcccttcgggagttggcaactagtcgcacagcacctgctgctaaaaatccttgcctcctgccatatgggaaggcactatatagttacgaaggcaaagaacctggagacctcaagttcaataagggcgatattatcgttctgaggcggaaagtcgatgagcagtggtaccatggagagctgcatgggacacagggtttcttgccggcgagctacatccagtgcatacagcccttaccccatgctcctcctcagggcaaagcactgtacgatttcgaaatgaaggacaaggatcaggacaaggattgccttaccttcacaaaggatgagatcctaacggtgcttcgacgtgtggatgaaaattgggccgagggcatgttgggagacaaaatcggcatattccccctgctatacgtcgaacttaacgatagcgcgaagcaactgatcgaaatggacaagccttgtcctgctgccgccagttcttgtaacgcctcccttccgagcgacagcggagctgtagcatctgtcgctccgagtccaactttgtcttcctctggcgccgttagtgccttccagcggcgagtcgacggcaagaagaacaccaagaagaggcactcattcactgctctttctgttacccaccgctcctctcaagctgcgtctcacaggcacagcatggagatctctgcacccgtgctgataagttcgtcggacccccgggctgcggcccgaataggagacctcgctcaccttagctgcgccgcccccacccaggatgtctcgagttcagcgggaagtacgcctaccgccgtgccgcgggccgcttctgtatcaggagaacaggggacaccccctaaggtgcagctcccattaaatgtatatttagctctttatgcatacaaacctcagaaatcagatgagctggagcttcacaagggcgagatgtatcgtgtgttggaaaagtgtcaggacggatggttcaaaggcgcaagcctgcggacaggagtttcaggtgtattccctggaaactacgtcacaccggtttctagagttcccgctggaggagcaggcccgcctcggaataacgtggtgggtggttctcctctagcaaaggggatcaccaccaccatgcatccgggcagcggctctctgagttctttagccaccgcgactcggcccgccctgccaatcacgacccctcaggcccacgcacaacatcctaccgcttctcctcccactgggtcatgtctccgccattctgcccagcccacagccagccaagccagatctactatctcaactgctgcacattctgccgcccaagcacaagacaggccaaccgcaacagtttctcctctgcgcactcagaactcccccagtcgactgcctgccaccagcctgaggccccacagcgtggtatcacctcagcacagccaccagccccctgtccaaatgtgtcctcgacctgctattcccctgacctcggccgccagtgcgattacgccccctaacgtgtcggccgcaaatcttaacggtgaggcaggaggtgggccaattggcgttctaagtacaagctctcctacaaataccgggtgcaagttggacgagaaaaagagcgagaagtag

SEQ ID NO: 299971 - DNA, 2151 bp, Artificial Sequence
  derived and/or modified sequence
atgctgctgggcgcctcctggctgtgtgccagcaaggctgctgctgctgctgcccagagtgaaggagatgaggacaggcctggagagaggagaagaagaagagctgctgccacagctgctggggccggggaggacatggatgagagcagcctgctggacctgctggagtgcagcgtgtgcctggagcggctggacaccacagccaaggtgctgccctgccagcacaccttctgccgccgctgcctggagagcatcgtgtgcagcagacatgagctgcgctgcccagagtgccgcatcctggtgggctgcggcgtggatgagctgcctgccaacatcctgctggtgcggctgctggatggcatccggcagaggcccagggctggcaccagccctgggggcagccccccagcccggcccatccctggccagagcgctgcccccaccctggccggcggcggcggcggcgctgctggcagcaccccaggcagccctgtgttcctgtctgctgctgctggcagcacagctggcagcctgcgggagctggccaccagcaggacagccccagctgccaagaacccctgcctgctgccctacggcaaggccctgtacagctatgagggcaaggagcccggggacctgaagttcaacaagggggacatcatcgtgctgcggaggaaggtggatgagcagtggtaccatggagagctgcacggcacccagggcttcctgcctgccagctacatccagtgcatccagcccctgccccacgccccaccccagggcaaggccctgtatgactttgagatgaaggacaaggaccaggacaaggactgcctgaccttcaccaaggatgagatcctgactgtgctgcggcgggtggatgagaactgggccgagggcatgctgggggacaagattggcatcttccccctgctgtatgtggagctgaatgattctgccaagcagctgattgagatggacaagccctgcccagctgctgccagcagctgcaatgccagcctgcccagcgacagcggggctgtggcctctgtggcccccagccccaccctgagcagcagcggggctgtgtctgccttccagaggagagtggatggcaagaagaacaccaagaagaggcacagcttcaccgccctgtctgtgacccacaggagcagccaggccgccagccaccgccacagcatggagatcagcgcccctgtgctgatcagcagcagtgaccccagggctgctgcccgcatcggggacctggcccacctgagctgtgccgcccccacccaggatgtgagcagcagcgctggcagcacccccacagctgtgcccagggctgcctctgtgtctggagagcagggcaccccacccaaggtgcagctgcccctgaatgtgtacctggccctgtatgcctacaagccccagaagagtgatgagctggagctgcacaagggggagatgtacagagtgctggagaagtgccaggacggctggttcaagggggccagcctgaggactggagtgtctggagtcttccctggcaactacgtgacccctgtgtcccgggtgcctgctgggggcgccggccccccaagaaataatgtggtgggcggcagccccctggccaagggcatcaccaccaccatgcaccctggcagcggcagcctgagcagcctggccacagccaccaggcctgccctgcccatcaccaccccccaggcccacgcccagcaccccacagccagcccccccaccggcagctgcctgcggcacagcgcccagcccacagccagccaggcccggagcaccatcagcacagctgcccacagcgctgcccaggcccaggaccggcccacagccaccgtgagccccctgcggacccagaacagccccagccggctgcctgccaccagcctgcggccccacagcgtggtgagcccccagcacagccaccagccccctgtgcagatgtgccccaggcctgccatccccctgaccagcgctgccagcgccatcaccccaccaaatgtgtctgctgccaacctgaatggagaggccggcggcggccccatcggcgtgctgagcaccagcagccccaccaacacaggctgcaagctggatgagaagaagtctgagaagtag

SEQ ID NO: 299972 - DNA, 2151 bp, Artificial Sequence
  derived and/or modified sequence
atgctgctgggcgccagctggctgtgcgccagcaaggccgccgccgcagctgcccaatcagaaggcgatgaggatagacccggcgagcggaggcgcagaagggccgctgcaaccgccgccggcgctggtgaagacatggacgagtcctcactgctcgatctgttggaatgctcagtttgcctggagagactcgatactactgccaaggtacttccctgtcagcacaccttctgccggcggtgcctggagtcaattgtttgctcaaggcatgaactccgctgtccggaatgtcgcatcttggtcggctgcggcgtggacgaactgccagcaaatattctgctggttcgtttgctcgacgggatcagacaacgcccccgggcaggtacgtccccgggcgggagccctcctgcacggcctattccaggtcaaagcgccgcacccacactcgcaggcggtggcgggggagccgcaggctcaactcctggtagtccagtctttctgtctgctgcggctggatctaccgccgggagcctccgtgagctggctacttccaggactgcccccgcagctaaaaacccgtgtctcctcccctacggtaaagcactctattcttacgaaggaaaagagccaggcgatctgaaatttaataagggtgatattattgtgctcagaaggaaagtcgacgagcaatggtatcatggagaactgcatggtacacaagggttcctgccagccagctacatccaatgcatccaacccctgccccacgcacctccccagggaaaagcactgtacgattttgagatgaaggacaaggaccaggacaaggactgtctgacctttacaaaggacgaaattctgacagtccttcggagggtggacgaaaattgggctgagggaatgctgggagataaaatcggaatctttccgcttctgtacgtggagctgaatgatagcgcaaaacaacttatagagatggacaagccttgcccagcagctgcctcttcctgcaatgcgtctctcccctctgactcgggagctgttgcctcagtggccccatcacctaccttaagtagctccggcgctgtaagcgcctttcagcgaagagtggacgggaagaaaaatacgaaaaagaggcattcttttaccgctctatcagtcacacacaggagttctcaggcagccagccaccgccattccatggagatctcggcacccgtgctcatctcatcatctgatccccgtgcagccgctaggatcggggatcttgctcacctatcctgtgcggcacccacacaagacgtgtcctcttctgcggggtctacccctacagccgttccgcgcgctgcaagtgtctccggcgaacaggggacaccgcccaaggtgcaactcccactaaatgtctacttggccctgtatgcctacaagcctcagaagtcagatgagcttgaactccacaaaggagagatgtaccgcgtgttagaaaagtgccaggatgggtggtttaagggcgcttccctccgcaccggagtgagcggcgtctttcccggaaattacgtcaccccagttagccgtgtgccagccggcggggccggaccacctcgcaataacgtggtgggagggagccctctggccaaagggattacaaccacaatgcaccccggcagcgggtctctgtcctcactggccacagccaccaggcccgcattgccaatcacgacacctcaggcgcatgcacagcatcccactgcctccccacccacaggatcctgtcttagacatagcgctcagcctaccgcctcacaggcccgcagcacaattagcaccgctgcacacagcgcagctcaggctcaggatcgacccacagccacagtttctcctctacgcacccagaactcccccagtagattgccggccacatctctgcgcccccactctgtggttagtccccagcattcgcaccaaccccccgtgcaaatgtgtccgcggcccgcgattccgttaacaagcgccgcaagtgcaatcacgcctccaaatgtttccgctgctaaccttaacggggaggccggcggtggaccaattggagttttgtcaactagttcacccacaaacactgggtgcaaactcgacgagaagaaatccgagaagtag

SEQ ID NO: 299973 - DNA, 2151 bp, Artificial Sequence
  derived and/or modified sequence
atgttgctcggggcaagttggctgtgtgcttctaaagccgcagccgctgcggcacagagcgagggcgatgaagaccggccaggcgaacgacgaagaaggagggccgctgctaccgcagctggcgcaggggaagatatggacgaaagcagtctgctcgacctcctggagtgctccgtgtgtctcgaaagattagacaccacggctaaagttctgccttgccaacacaccttttgccgcagatgcctggagtctatcgtgtgtagccgccatgaattgcgctgcccagagtgtcgtatcctggtgggctgcggcgtggatgagcttcctgctaacatcctcctcgtgcgtctgctagacggaatcaggcagcgaccccgtgctggtaccagcccagggggaagcccaccggctaggcctattcccggacagagtgccgcaccaacattggccggaggcggtggcggagcggctggctccacaccaggaagccccgtgtttctgagcgcggctgcgggtagtactgctggttccctgcgcgaactcgccacctctaggactgcgcctgccgcaaagaatccttgccttctcccgtatgggaaggcactgtactcttatgagggcaaggagcctggagatctcaagtttaataaaggcgacatcattgtgctccgcaggaaagtcgatgagcagtggtaccacggagaactgcacggcacgcaaggcttcctgccagcttcctatattcagtgtatccagcctctgccacacgcacccccacaaggaaaagctctttatgactttgagatgaaggacaaagaccaggacaaagattgcctgactttcacaaaggacgaaatcttaaccgtgctaaggagggtggacgagaactgggccgaaggaatgctgggagataaaatcggaatctttccactgctatacgtggagctaaatgatagtgccaagcagctcatagagatggataagccatgtcctgccgctgcgtcatcgtgtaacgcaagcctcccaagcgattcaggggctgtagccagcgtcgcacctagtccaactctgtcctccagtggggctgtttcagcattccaacggcgtgttgacggtaaaaaaaatacaaaaaaaagacattcctttactgctctcagtgttacccaccgctcttcacaggctgccagtcaccgccatagtatggagattagcgctcccgtcctcatctctagttccgacccaagggcggctgcgcgtatcggcgaccttgctcacctgagctgtgctgcgccaacacaggacgtcagtagtagtgccggtagcacccctaccgcagtgcctcgcgctgcgagtgtatcaggggaacaagggacccccccaaaggtgcaactgcccctgaacgtgtacctggccctgtatgcgtacaagcctcagaaatcagatgagctggaattacataagggggagatgtatcgtgtgctcgagaagtgccaggatgggtggttcaagggcgcttcattgcggaccggcgttagcggcgttttccctgggaattacgtgacccccgtttcacgcgtgcccgctggcggagccggtcccccacgtaataatgtggtgggcggatcacctctggctaaggggatcacaaccaccatgcaccccggatccggcagccttagctcgctggccacagcaacaaggcccgcattacctattactacgcctcaagctcatgctcagcaccccaccgcttcacctcctactggtagttgcttaagacactccgcacaaccaactgcaagccaagcacgttccaccatatccaccgctgcccactctgccgctcaggcacaggatcggcctaccgccactgtctctcctctgcgaacccaaaactccccatctcgactcccggctactagtttaaggcctcactccgtggtttccccacaacattcccaccaaccacccgtgcagatgtgcccacgcccagcaatcccactgacctccgctgcttcagcgataaccccacccaatgtatcagctgccaatttgaacggcgaagctggtggaggcccaataggcgtcctttccacgagttccccgaccaatacaggctgtaagcttgacgagaagaaaagtgagaaatag

SEQ ID NO: 299974 - DNA, 2341 bp, Artificial Sequence
  derived and/or modified sequence
ccggtccccgccacgcaggccggtcggtgagccacttcgcaccgccacagccctagcatcgggccaccagccggggtgaagaaagtcacggcggagcccggctccccagtcctgatgctggctgccggtggcgggctccacgccggccccgggacctaggcagccgcgcgagaccgctgcgggcgcctcccccatgctgctcggagcgtcctggctgtgcgcatccaaggcggccgccgctgctgcgcagagcgagggcgacgaggacaggccaggcgagcgacggcggcgtcgggcggcggccaccgccgcgggggcgggcgaggacatggacgagtcgtcgctgctggacctgctggagtgctccgtgtgtctggagcgcctggacaccacggccaaggtgctgccatgccaacacactttctgccgccgctgcctggagagcatcgtgtgctcgcgccacgagctgcgctgccccgagtgccgcatcctggtgggctgcggcgtggacgaactgcccgccaacatcttgctggtgcgactgctggacggcatccgtcagcggccccgcgcgggcaccagccccggcggcagcccgcccgcgcgtcccatcccaggccagagtgcggcccccacgctcgcgggcggcgggggcggcgcggcaggcagcaccccgggttccccggttttcctctccgcggccgcgggcagcaccgccggcagtctgcgggagctggcgaccagcaggaccgcgccggcggcaaagaatccctgcctgcttccctatggcaaggccctctacagctacgaggggaaggaacctggtgacctcaagttcaacaagggggacatcatcgtcctgcggcgcaaggtggatgaacagtggtaccacggcgagctgcacggcacacagggcttcctcccagccagctatatccagtgcatccagcccttgccacacgccccgccccagggaaaagcactttatgatttcgagatgaaggacaaagaccaagacaaggactgtctgaccttcaccaaggacgagattctgacggtgctcaggagagtggatgagaactgggcggaaggcatgctgggagacaagatcgggatcttcccgctcctgtacgtggagctcaatgactccgccaagcagctcattgagatggacaagccatgcccagccgctgcatccagctgcaatgcctccctgccctctgactccggcgctgtggccagcgtggccccaagtcccactttaagcagctcaggggcggtcagtgcctttcagcggcgtgtggatggcaagaagaacaccaagaaacgccactccttcaccgcgctcagtgtgacgcacagatcctcccaggctgccagccacaggcattccatggaaattagtgctccagtgttgatcagctccagcgatccccgagccgcggccaggattggagaccttgctcatctgtcgtgcgctgctcccacccaggatgtctcctcctcggcgggatctacccccacggctgtcccacgggctgcctcggtgtctggagagcagggcacgcctcccaaggtccagctgcccctcaacgtgtacctggcgctctacgcctacaagccccagaagagtgacgagctggagctgcacaagggagagatgtaccgggtcctcgagaagtgtcaggatggctggttcaagggggcgtctctgaggaccggggtctctggggtgttccccggaaactacgtgacacccgtttccagggtgcctgcaggaggggcagggccgccccggaataatgtagtcggagggtctccactggccaaagggataaccacaaccatgcacccaggcagtgggagtctgagcagcctggccactgccaccaggcccgccctgcccatcaccactccccaggcccacgcccagcaccccacagcctcgcccccaacaggcagctgtctacggcactcagcccagccaacggccagccaagcccggagcaccatttcaacagctgcccactctgcagcccaggctcaggaccggccaactgccaccgtgtcacccctgcgcacccagaactctccatcccgcctgcctgccaccagcctcaggccccactcggtggtgtccccgcagcacagccaccagcccccggtgcagatgtgcccacggccggccatccccctcacatcagcagcatcagccatcacacctcccaacgtcagtgccgcaaacctcaacggggaggctggaggggggcccatcggtgttctgtccacatccagccccaccaacacgggatgcaaactagacgagaagaaaagtgaaaag

SEQ ID NO: 299975 - DNA, 171 bp, Artificial Sequence
  derived and/or modified sequence
tgatacagagtggtggtgagctaccccccccagagcgaggccgagatcgagctgaaggagggcgacatcgtgttcgtgcacaagaagagagaggacggctggtacaagggcaccctgcagagaaacggcagaaccggcctgttccccggcagcttcgtggagagcttctag

SEQ ID NO: 299976 - DNA, 171 bp, Artificial Sequence
  derived and/or modified sequence
taataccgggtggtcgtgtcatatcctccacagtccgaggcagagatagagctcaaagaaggggatatcgtgttcgttcataaaaaacgcgaagatgggtggtacaaggggacactgcagaggaacggacgcactggacttttcccgggttctttcgtggaaagcttctag

SEQ ID NO: 299977 - DNA, 171 bp, Artificial Sequence
  derived and/or modified sequence
tgatacagagtggtggtgtcctacccaccccagagcgaggccgagattgagctgaaggagggggacatcgtgtttgtgcacaagaagagagaagatggctggtacaagggcaccctgcagagaaatggccgcacaggcctcttccctggcagctttgtggagagcttctag

SEQ ID NO: 299978 - DNA, 171 bp, Artificial Sequence
  derived and/or modified sequence
tgataccgggtggtggtgagctaccccccccagagcgaggccgagatcgagctgaaggagggtgatattgtgttcgtacataagaagagagaggacggatggtataagggtactctgcagcgcaacggaagaaccggcctcttccctgggtcattcgttgagtcgttctag

SEQ ID NO: 299979 - DNA, 171 bp, Artificial Sequence
  derived and/or modified sequence
taataccgagtggtggtgagctatcctcctcagagtgaagctgagattgagctcaaggaaggcgacatcgttttcgtgcacaagaaaagagaagatggctggtacaagggcaccctccagaggaatgggcgaaccggcttattccccggttcgttcgtcgagtcattctag

SEQ ID NO: 299980 - DNA, 3128 bp, Artificial Sequence
  derived and/or modified sequence
gtaccgcgtggtggtctcgtacccaccccagagtgaggcggagatcgagctgaaggaaggcgacatcgtctttgtgcacaagaagcgtgaggacggctggtacaaggggaccctgcagcggaacggccgcacaggcctcttcccgggcagcttcgtcgagagcttctgagaactggtgctccctgcacccagctcacagagggggaggccgcctgggaagctccacggcacacagagagggagccatggcgccccaagggttccaggtcatctccaaggcacctggcgggggataccctggcccagggtgggggccagggactgtggaggtcgtgccttctcccaaaacccccaaacggagagcacacctgggatgttcttcaaggaaatgcccaccccctctgtggaaactgcaaagaaagcaccttgaggaagagaggcaggtgccggcgcaggcaggcctgtggctgtggtttgcagccatggcagcgttctcatttaccacctaagcagggttggaggttgcaggaggtctgcaggcgaggtgggtggcatgggggccaggagcgctggagatcatctttctgggctgccctgggcttcccgcggggcccaggttgctctgtcaccattctatatacctcagtcacctgccgcccggctgctcagcaggggtgtttgtgaggccctgggggtgccccggaaggggcaccccaccgcccctgttgggaaccagagcagaatctgtgggcttgtcgcctgccagtagtataagcaacactttctgttcaccaccattgtcccttgcattacttctttcttacagcatatttttaacataaagctgttagactttatatatttctaataggtcagacattgcctatttttcatacatctggtgctgcctttttgtaaaactaataatgacttggttgagcttgaaagaaaagatgtctgaggcgacatcaaaggggcagaatttttatatttcccatatggctttgggagagcgccgagaagccgccatcccgcacctcagcgctggccagtactctgggggctggcggggtggatccattgagggggtcggagggagcttggaagcagccggtttctttaaactcttaccaaaaccccgcgctctgtctagacggtgatgattattattcaagacctggaaacatttcgaggaagggccactataattgtccttttgtgtggcggtagaaggagcacgcaggtcaaccccagccgggaaggcaaaatcttccctttattgcctcagagagaactgcaattagcattctcagaagatgatttcttggtatcaaaatgtgcagtttctacaacagtttagatcaccaccaccatttttcttcttttttaaaaataaataactgctcccatttcaggcagtgcaaaccttcatctgctggagaccagaggtacaaggagatcagggggttgcagcaccgctgcaggcttgcaagatcggggagttgggagggcgagagaggaggaggtgcagctttgatgctgggacctccctgagtggggctgatgaatgtatattcattagcaccatggctcacttcccaggaagactgatcaggagcccttcagggacaattttgttctcaagattcacaccttaggaacacatttttatcacctcaaaattttgatccatcacccctctctccacctatatttttacaaataccattcagacttaaattaagctgaagaaactagcctttggtaacatagggtgtcattggttttcagggatgtaaccaattccagaaatacattcttttgcctggcatgaagactttgaaacacgggccgcttattttcagagttcctgttttgggacgtgacttggctacttgttacttccaggtggtcaccacacggcgggggtcatgcctttccctcccccaagatgataatagatttaatagactcaaagaagttgttcagaatcaaagaagaaaaagtctggcttaaacatagtaacttctgtgtgccaggttaatgacaaccaaaagctctctatttaccattattgccaaacttcatcagttgcccatcctgcaccaaaatcctgtgcgtgtttaaattcacgttgtcaccaaagaggtgcacagatcaacaacctggatgacgcaggtgttctccagggaaaccagaccaagtcaagtctccaggtaacttttttgaagtcttttttttaaggcgcgcaggtaccaagcaacagaatagagtaacctgaacgttcttactctcccaggcatggcccacgtggtgcttcaggtagaaatgtgcttcaccctcctggtggggggcgaggacacagcccactgcatgcagcatggtagagagctggggcgaatatctccatgtctttggaggatgtcagctggccgctttcagggcagagtcgggtgggcgttggtgccaccttaggaaggagagcgatgcgtgggtctggccagagctctggagccaatgccgggctgcctgagagcagaggaaatgcatggcccatgtgcatttctgagtattttaaactcgttcaggccctgcagccttcatgatgatgtagctcgcagagaagagcaggagcagaattagccctttcttcaggccatcttgcctcaaagggtacacatgtttggcggttaagatgaaactaacccttatgtttcatcctggccccatgatgtacacatcttagccatgtagtggccttggggggccacagagatttcctttgaggagcatggtagagtccacagccatggctgaagtcagtggacaccgaggggacaggactgcaggccaccaggggcctctgcccagagggaggcagagaggatggcggccacgggtgctctcctggcatcctcatggggtgatgccaggccgggcacttcaaaacaggctcagccgactgggagatcctttgtactttgcacagttcacacacacaaacacacacaccctatcccaagtgtttttgttagacacaaatgtcagcgtgtgattttggaagacttgtcagtgatgacaaaccatgatgcctgtgtttctgagtctttaaataaaaatgaacatgg

SEQ ID NO: 299981 - protein, 569 aa, Artificial Sequence
  derived and/or modified sequence
MKVLLRLICFIALLISSLEADKCKEREEKIILVSSANEIDVRPCPLNPNEHKGTITWYKDDSKTPVSTEQASRIHQHKEKLWFVPAKVEDSGHYYCVVRNSSYCLRIKISAKFVENEPNLCYNAQAIFKQKLPVAGDGGLVCPYMEFFKNENNELPKLQWYKDCKPLLLDNIHFSGVKDRLIVMNVAEKHRGNYTCHASYTYLGKQYPITRVIEFITLEENKPTRPVIVSPANETMEVDLGSQIQLICNVTGQLSDIAYWKWNGSVIDEDDPVLGEDYYSVENPANKRRSTLITVLNISEIESRFYKHPFTCFAKNTHGIDAAYIQLIYPVTNFQKHMIGICVTLTVIIVCSVFIYKIFKIDIVLWYRDSCYDFLPIKASDGKTYDAYILYPKTVGEGSTSDCDIFVFKVLPEVLEKQCGYKLFIYGRDDYVGEDIVEVINENVKKSRRLIIILVRETSGFSWLGGSSEEQIAMYNALVQDGIKVVLLELEKIQDYEKMPESIKFIKQKHGAIRWSGDFTQGPQSAKTRFWKNVRYHMPVQRRSPSSKHQLLSPATKEKLQREAHVPLG

SEQ ID NO: 299982 - protein, 182 aa, Artificial Sequence
  derived and/or modified sequence
MKVLLRLICFIALLISSLEADKCKEREEKIILVSSANEIDVRPCPLNPNEHKGTITWYKDDSKTPVSTEQASRIHQHKEKLWFVPAKVEDSGHYYCVVRNSSYCLRIKISAKFVENEPNLCYNAQAIFKQKLPVAGDGGLVCPYMEFFKNENNELPKLQWYKDCKPLLLDNIHFSGVKDRLI

SEQ ID NO: 299983 - protein, 114 aa, Artificial Sequence
  derived and/or modified sequence
MKVLLRLICFIALLISSLEADKCKEREEKIILVSSANEIDVRPCPLNPNEHKGTITWYKDDSKTPVSTEQASRIHQHKEKLWFVPAKVEDSGHYYCVVRNSSYCLRIKISAKFV

SEQ ID NO: 299984 - protein, 106 aa, Artificial Sequence
  derived and/or modified sequence
MKVLLRLICFIALLISSLEADKCKEREEKIILVSSANEIDVRPCPLNPNEHKGTITWYKDDSKTPVSTEQASRIHQHKEKLWFVPAKVEDSGHYYCVVRNSSYCLR

SEQ ID NO: 299985 - protein, 80 aa, Artificial Sequence
  derived and/or modified sequence
MKVLLRLICFIALLISSLEADKCKEREEKIILVSSANEIDVRPCPLNPNEHKGTITWYKDDSKTPVSTEQASRIHQHKEK

SEQ ID NO: 299986 - DNA, 1710 bp, Artificial Sequence
  derived and/or modified sequence
atgaaggtgctgctgagactgatctgcttcatcgccctgctgatcagcagcctggaggccgacaagtgcaaggagagagaggagaagatcatcctggtgagcagcgccaacgagatcgacgtgagaccctgccccctgaaccccaacgagcacaagggcaccatcacctggtacaaggacgacagcaagacccccgtgagcaccgagcaggccagcagaatccaccagcacaaggagaagctgtggttcgtgcccgccaaggtggaggacagcggccactactactgcgtggtgagaaacagcagctactgcctgagaatcaagatcagcgccaagttcgtggagaacgagcccaacctgtgctacaacgcccaggccatcttcaagcagaagctgcccgtggccggcgacggcggcctggtgtgcccctacatggagttcttcaagaacgagaacaacgagctgcccaagctgcagtggtacaaggactgcaagcccctgctgctggacaacatccacttcagcggcgtgaaggacagactgatcgtgatgaacgtggccgagaagcacagaggcaactacacctgccacgccagctacacctacctgggcaagcagtaccccatcaccagagtgatcgagttcatcaccctggaggagaacaagcccaccagacccgtgatcgtgagccccgccaacgagaccatggaggtggacctgggcagccagatccagctgatctgcaacgtgaccggccagctgagcgacatcgcctactggaagtggaacggcagcgtgatcgacgaggacgaccccgtgctgggcgaggactactacagcgtggagaaccccgccaacaagagaagaagcaccctgatcaccgtgctgaacatcagcgagatcgagagcagattctacaagcaccccttcacctgcttcgccaagaacacccacggcatcgacgccgcctacatccagctgatctaccccgtgaccaacttccagaagcacatgatcggcatctgcgtgaccctgaccgtgatcatcgtgtgcagcgtgttcatctacaagatcttcaagatcgacatcgtgctgtggtacagagacagctgctacgacttcctgcccatcaaggccagcgacggcaagacctacgacgcctacatcctgtaccccaagaccgtgggcgagggcagcaccagcgactgcgacatcttcgtgttcaaggtgctgcccgaggtgctggagaagcagtgcggctacaagctgttcatctacggcagagacgactacgtgggcgaggacatcgtggaggtgatcaacgagaacgtgaagaagagcagaagactgatcatcatcctggtgagagagaccagcggcttcagctggctgggcggcagcagcgaggagcagatcgccatgtacaacgccctggtgcaggacggcatcaaggtggtgctgctggagctggagaagatccaggactacgagaagatgcccgagagcatcaagttcatcaagcagaagcacggcgccatcagatggagcggcgacttcacccagggcccccagagcgccaagaccagattctggaagaacgtgagataccacatgcccgtgcagagaagaagccccagcagcaagcaccagctgctgagccccgccaccaaggagaagctgcagagagaggcccacgtgcccctgggctag

SEQ ID NO: 299987 - DNA, 1710 bp, Artificial Sequence
  derived and/or modified sequence
atgaaagtgctgctgcgcctgatatgcttcatagcattgctgattagctcattggaagccgacaaatgcaaggaacgggaagaaaaaattattctcgttagcagtgccaatgaaatcgatgtgcgtccttgcccactcaatcccaacgaacacaaaggaacaattacttggtacaaagacgattctaaaacccccgtctctactgagcaggcgagcagaattcaccagcacaaagagaagctctggttcgtgcccgccaaggtggaagattcaggccactattactgcgtggtgcgcaactcgagctactgccttcggataaagatttcagccaagtttgtggagaatgagcctaacctctgttacaacgcccaggccattttcaaacaaaaactccctgtggcgggggacggagggctggtgtgcccctatatggaatttttcaagaatgagaacaacgagcttccaaaactccagtggtacaaggactgtaaaccgctgttactggacaacatccatttttctggagtgaaagatcgactgattgtcatgaacgtcgccgaaaagcacaggggcaactacacttgccacgcatcttatacctatttgggcaagcagtacccaattacccgagtgatcgaatttatcacgctggaggaaaataaaccaacaagacccgtgattgtgagtcccgctaacgaaactatggaagtcgacctgggatcacagatccaattgatttgcaacgtgacaggccagttatcagacatcgcttattggaagtggaatggctccgtcatcgatgaagatgatccagttctgggcgaagattactatagcgtggaaaaccccgctaataaacgtaggtctacactcattactgttctgaatatatcagagatcgaatccagattctacaagcatccttttacttgcttcgccaagaatacacacggaattgatgctgcctatatacaactaatctaccccgtcacgaatttccagaaacacatgatcggaatctgcgtgactcttacggtaattatcgtgtgcagcgtctttatttataagatatttaaaatcgacattgttctgtggtaccgtgacagctgctatgacttcctccctattaaggcctcagatgggaagacttacgatgcctacatcctgtatccaaaaacagtgggggagggatccactagtgactgtgatatctttgtatttaaggtcctgcctgaagtgctggaaaaacagtgcgggtacaagctttttatctacggccgggatgactacgtgggcgaagatatcgtcgaggtcatcaatgagaatgtgaagaagtccaggagactaataatcattcttgtccgggagacaagcggattttcatggctggggggcagctctgaagaacagatcgccatgtacaacgctcttgtgcaggatgggatcaaggttgtacttctcgaactggagaagatccaagactatgaaaaaatgcctgagagtatcaaatttatcaagcaaaaacatggtgcaatcagatggagtggagatttcacccaaggtccccagtccgccaagacccggttttggaagaacgtgcggtatcacatgcccgtccagcggcgctccccgtcgtccaagcaccagctcctctcgccagccaccaaggaaaagcttcaacgcgaagcccatgtcccactggggtag

SEQ ID NO: 299988 - DNA, 1710 bp, Artificial Sequence
  derived and/or modified sequence
atgaaggtgctgctgcggctcatctgcttcatcgccctgctgatcagcagcctggaggccgacaagtgcaaggagcgggaggagaagatcatcctggtgtcctctgccaatgaaattgatgtgcggccctgccccctgaaccccaatgagcacaagggcaccatcacctggtacaaggatgacagcaagacccctgtgtccacagagcaggccagccgcatccaccagcacaaggagaagctgtggtttgtgcctgccaaggtggaggacagcggccactactactgtgtggtgaggaacagcagctactgcctgcgcatcaagatcagcgccaagtttgtggagaatgagcccaacctgtgctacaatgcccaggccatcttcaagcagaagctgcctgtggccggagatggcggcctggtgtgcccctacatggagttcttcaagaatgaaaataatgagctgcccaagctgcagtggtacaaggactgcaagcccctgctgctggacaacatccacttctctggagtgaaggacaggctcatcgtgatgaatgtggccgagaagcaccggggcaactacacctgccacgccagctacacctacctgggcaagcagtaccccatcaccagggtgattgagttcatcaccctggaggagaacaagcccaccaggcctgtgattgtgtccccagccaatgagaccatggaggtggacctgggcagccagatccagctgatctgcaatgtgacaggccagctgagtgacatcgcctactggaagtggaatggatctgtgattgatgaagatgatcctgtgctgggggaggactactacagcgtggagaacccagccaacaagaggaggagcaccctcatcaccgtgctgaacatcagcgagattgagagccgcttctacaagcaccccttcacctgctttgccaagaacacccacggcattgatgctgcctacatccagctgatctaccctgtgaccaacttccagaagcacatgattggcatctgtgtgaccctgaccgtcatcatcgtgtgcagcgtcttcatctacaagatcttcaagattgatattgtgctgtggtacagagacagctgctatgacttcctgcccatcaaggccagtgatggcaagacctatgatgcctacatcctgtaccccaagacagtgggggagggcagcaccagtgactgtgacatctttgtgttcaaggtgctgcctgaggtgctggagaagcagtgtggctacaagctgttcatctacggcagagatgattatgtgggggaggacatcgtggaggtgatcaatgaaaatgtgaagaagagccggcggctcatcatcatcctggtgcgggagaccagcggcttctcctggctgggcggcagcagcgaggagcagatcgccatgtacaatgccctggtgcaggacggcatcaaggtggtgctgctggagctggagaagatccaggactatgagaagatgcctgagagcatcaagttcatcaagcagaagcacggggccatccgctggagcggggacttcacccagggcccccagagcgccaagacccgcttctggaagaatgtgcgctaccacatgcctgtgcagaggaggagccccagcagcaagcaccagctgctgagccctgccaccaaggagaagctgcagcgggaggcccacgtgcccctgggctag

SEQ ID NO: 299989 - DNA, 4907 bp, Artificial Sequence
  derived and/or modified sequence
tagacgcaccctctgaagatggtgactccctcctgagaagctggaccccttggtaaaagacaaggccttctccaagaagaatatgaaagtgttactcagacttatttgtttcatagctctactgatttcttctctggaggctgataaatgcaaggaacgtgaagaaaaaataattttagtgtcatctgcaaatgaaattgatgttcgtccctgtcctcttaacccaaatgaacacaaaggcactataacttggtataaagatgacagcaagacacctgtatctacagaacaagcctccaggattcatcaacacaaagagaaactttggtttgttcctgctaaggtggaggattcaggacattactattgcgtggtaagaaattcatcttactgcctcagaattaaaataagtgcaaaatttgtggagaatgagcctaacttatgttataatgcacaagccatatttaagcagaaactacccgttgcaggagacggaggacttgtgtgcccttatatggagttttttaaaaatgaaaataatgagttacctaaattacagtggtataaggattgcaaacctctacttcttgacaatatacactttagtggagtcaaagataggctcatcgtgatgaatgtggctgaaaagcatagagggaactatacttgtcatgcatcctacacatacttgggcaagcaatatcctattacccgggtaatagaatttattactctagaggaaaacaaacccacaaggcctgtgattgtgagcccagctaatgagacaatggaagtagacttgggatcccagatacaattgatctgtaatgtcaccggccagttgagtgacattgcttactggaagtggaatgggtcagtaattgatgaagatgacccagtgctaggggaagactattacagtgtggaaaatcctgcaaacaaaagaaggagtaccctcatcacagtgcttaatatatcggaaattgaaagtagattttataaacatccatttacctgttttgccaagaatacacatggtatagatgcagcatatatccagttaatatatccagtcactaatttccagaagcacatgattggtatatgtgtcacgttgacagtcataattgtgtgttctgttttcatctataaaatcttcaagattgacattgtgctttggtacagggattcctgctatgattttctcccaataaaagcttcagatggaaagacctatgacgcatatatactgtatccaaagactgttggggaagggtctacctctgactgtgatatttttgtgtttaaagtcttgcctgaggtcttggaaaaacagtgtggatataagctgttcatttatggaagggatgactacgttggggaagacattgttgaggtcattaatgaaaacgtaaagaaaagcagaagactgattatcattttagtcagagaaacatcaggcttcagctggctgggtggttcatctgaagagcaaatagccatgtataatgctcttgttcaggatggaattaaagttgtcctgcttgagctggagaaaatccaagactatgagaaaatgccagaatcgattaaattcattaagcagaaacatggggctatccgctggtcaggggactttacacagggaccacagtctgcaaagacaaggttctggaagaatgtcaggtaccacatgccagtccagcgacggtcaccttcatctaaacaccagttactgtcaccagccactaaggagaaactgcaaagagaggctcacgtgcctctcgggtagcatggagaagttgccaagagttctttaggtgcctcctgtcttatggcgttgcaggccaggttatgcctcatgctgacttgcagagttcatggaatgtaactatatcatcctttatccctgaggtcacctggaatcagattattaagggaataagccatgacgtcaatagcagcccagggcacttcagagtagagggcttgggaagatcttttaaaaaggcagtaggcccggtgtggtggctcacgcctataatcccagcactttgggaggctgaagtgggtggatcaccagaggtcaggagttcgagaccagcccagccaacatggcaaaaccccatctctactaaaaatacaaaaatgagctaggcatggtggcacacgcctgtaatcccagctacacctgaggctgaggcaggagaattgcttgaaccggggagacggaggttgcagtgagccgagtttgggccactgcactctagcctggcaacagagcaagactccgtctcaaaaaaagggcaataaatgccctctctgaatgtttgaactgccaagaaaaggcatggagacagcgaactagaagaaagggcaagaaggaaatagccaccgtctacagatggcttagttaagtcatccacagcccaagggcggggctatgccttgtctggggaccctgtagagtcactgaccctggagcggctctcctgagaggtgctgcaggcaaagtgagactgacacctcactgaggaagggagacatattcttggagaactttccatctgcttgtattttccatacacatccccagccagaagttagtgtccgaagaccgaattttattttacagagcttgaaaactcacttcaatgaacaaagggattctccaggattccaaagttttgaagtcatcttagctttccacaggagggagagaacttaaaaaagcaacagtagcagggaattgatccacttcttaatgctttcctccctggcatgaccatcctgtcctttgttattatcctgcattttacgtctttggaggaacagctccctagtggcttcctccgtctgcaatgtcccttgcacagcccacacatgaaccatccttcccatgatgccgctcttctgtcatcccgctcctgctgaaacacctcccaggggctccacctgttcaggagctgaagcccatgctttcccaccagcatgtcactcccagaccacctccctgccctgtcctccagcttcccctcgctgtcctgctgtgtgaattcccaggttggcctggtggccatgtcgcctgcccccagcactcctctgtctctgctcttgcctgcacccttcctcctcctttgcctaggaggccttctcgcattttctctagctgatcagaattttaccaaaattcagaacatcctccaattccacagtctctgggagactttccctaagaggcgacttcctctccagccttctctctctggtcaggcccactgcagagatggtggtgagcacatctgggaggctggtctccctccagctggaattgctgctctctgagggagaggctgtggtggctgtctctgtccctcactgccttccaggagcaatttgcacatgtaacatagatttatgtaatgctttatgtttaaaaacattccccaattatcttatttaatttttgcaattattctaattttatatatagagaaagtgacctattttttaaaaaaatcacactctaagttctattgaacctaggacttgagcctccatttctggcttctagtctggtgttctgagtacttgatttcaggtcaataacggtcccccctcactccacactggcacgtttgtgagaagaaatgacattttgctaggaagtgaccgagtctaggaatgcttttattcaagacaccaaattccaaacttctaaatgttggaattttcaaaaattgtgtttagattttatgaaaaactcttctactttcatctattctttccctagaggcaaacatttcttaaaatgtttcattttcattaaaaatgaaagccaaatttatatgccaccgattgcaggacacaagcacagttttaagagttgtatgaacatggagaggacttttggtttttatatttctcgtatttaatatgggtgaacaccaacttttatttggaataataattttcctcctaaacaaaaacacattgagtttaagtctctgactcttgcctttccacctgctttctcctgggcccgctttgcctgcttgaaggaacagtgctgttctggagctgctgttccaacagacagggcctagctttcatttgacacacagactacagccagaagcccatggagcagggatgtcacgtcttgaaaagcctattagatgttttacaaatttaattttgcagattattttagtctgtcatccagaaaatgtgtcagcatgcatagtgctaagaaagcaagccaatttggaaacttaggttagtgacaaaattggccagagagtgggggtgatgatgaccaagaattacaagtagaatggcagctggaatttaaggagggacaagaatcaatggataagcgtgggtggaggaagatccaaacagaaaagtgcaaagttattccccatcttccaagggttgaattctggaggaagaagacacattcctagttccccgtgaacttcctttgacttattgtccccactaaaacaaaacaaaaaacttttaatgccttccacattaattagattttcttgcagtttttttatggcatttttttaaagatgccctaagtgttgaagaagagtttgcaaatgcaacaaaatatttaattaccggttgttaaaactggtttagcacaatttatattttccctctcttgcctttcttatttgcaataaaaggtattgagccattttttaaatgacatttttgataaattatgtttgtactagttgatgaaggagttttttttaacctgtttatataattttgcagcagaagccaaattttttgtatattaaagcaccaaattcatgtacagcatgcatcacggatcaatagactgtacttattttccaataaaattttcaaactttgtactgtta

SEQ ID NO: 299990 - DNA, 5143 bp, Artificial Sequence
  derived and/or modified sequence
gccggagccgactcggagcgcgcggcgccggccgggaggagccggagagcggccgggccgggcggtgggggcgccggcctgccccgcgcgccccagggagcggcaggaatgtgacaatcgcgcgcccgcgcaccgaagcactcctcgctcggctcctagggctctcgcccctctgagctgagccgggttccgcccggggctgggatcccatcaccctccacggccgtccgtccaggtagacgcaccctctgaagatggtgactccctcctgagaagctggaccccttggtaaaagacaaggccttctccaagaagaatatgaaagtgttactcagacttatttgtttcatagctctactgatttcttctctggaggctgataaatgcaaggaacgtgaagaaaaaataattttagtgtcatctgcaaatgaaattgatgttcgtccctgtcctcttaacccaaatgaacacaaaggcactataacttggtataaagatgacagcaagacacctgtatctacagaacaagcctccaggattcatcaacacaaagagaaactttggtttgttcctgctaaggtggaggattcaggacattactattgcgtggtaagaaattcatcttactgcctcagaattaaaataagtgcaaaatttgtggagaatgagcctaacttatgttataatgcacaagccatatttaagcagaaactacccgttgcaggagacggaggacttgtgtgcccttatatggagttttttaaaaatgaaaataatgagttacctaaattacagtggtataaggattgcaaacctctacttcttgacaatatacactttagtggagtcaaagataggctcatcgtgatgaatgtggctgaaaagcatagagggaactatacttgtcatgcatcctacacatacttgggcaagcaatatcctattacccgggtaatagaatttattactctagaggaaaacaaacccacaaggcctgtgattgtgagcccagctaatgagacaatggaagtagacttgggatcccagatacaattgatctgtaatgtcaccggccagttgagtgacattgcttactggaagtggaatgggtcagtaattgatgaagatgacccagtgctaggggaagactattacagtgtggaaaatcctgcaaacaaaagaaggagtaccctcatcacagtgcttaatatatcggaaattgaaagtagattttataaacatccatttacctgttttgccaagaatacacatggtatagatgcagcatatatccagttaatatatccagtcactaatttccagaagcacatgattggtatatgtgtcacgttgacagtcataattgtgtgttctgttttcatctataaaatcttcaagattgacattgtgctttggtacagggattcctgctatgattttctcccaataaaagcttcagatggaaagacctatgacgcatatatactgtatccaaagactgttggggaagggtctacctctgactgtgatatttttgtgtttaaagtcttgcctgaggtcttggaaaaacagtgtggatataagctgttcatttatggaagggatgactacgttggggaagacattgttgaggtcattaatgaaaacgtaaagaaaagcagaagactgattatcattttagtcagagaaacatcaggcttcagctggctgggtggttcatctgaagagcaaatagccatgtataatgctcttgttcaggatggaattaaagttgtcctgcttgagctggagaaaatccaagactatgagaaaatgccagaatcgattaaattcattaagcagaaacatggggctatccgctggtcaggggactttacacagggaccacagtctgcaaagacaaggttctggaagaatgtcaggtaccacatgccagtccagcgacggtcaccttcatctaaacaccagttactgtcaccagccactaaggagaaactgcaaagagaggctcacgtgcctctcgggtagcatggagaagttgccaagagttctttaggtgcctcctgtcttatggcgttgcaggccaggttatgcctcatgctgacttgcagagttcatggaatgtaactatatcatcctttatccctgaggtcacctggaatcagattattaagggaataagccatgacgtcaatagcagcccagggcacttcagagtagagggcttgggaagatcttttaaaaaggcagtaggcccggtgtggtggctcacgcctataatcccagcactttgggaggctgaagtgggtggatcaccagaggtcaggagttcgagaccagcccagccaacatggcaaaaccccatctctactaaaaatacaaaaatgagctaggcatggtggcacacgcctgtaatcccagctacacctgaggctgaggcaggagaattgcttgaaccggggagacggaggttgcagtgagccgagtttgggccactgcactctagcctggcaacagagcaagactccgtctcaaaaaaagggcaataaatgccctctctgaatgtttgaactgccaagaaaaggcatggagacagcgaactagaagaaagggcaagaaggaaatagccaccgtctacagatggcttagttaagtcatccacagcccaagggcggggctatgccttgtctggggaccctgtagagtcactgaccctggagcggctctcctgagaggtgctgcaggcaaagtgagactgacacctcactgaggaagggagacatattcttggagaactttccatctgcttgtattttccatacacatccccagccagaagttagtgtccgaagaccgaattttattttacagagcttgaaaactcacttcaatgaacaaagggattctccaggattccaaagttttgaagtcatcttagctttccacaggagggagagaacttaaaaaagcaacagtagcagggaattgatccacttcttaatgctttcctccctggcatgaccatcctgtcctttgttattatcctgcattttacgtctttggaggaacagctccctagtggcttcctccgtctgcaatgtcccttgcacagcccacacatgaaccatccttcccatgatgccgctcttctgtcatcccgctcctgctgaaacacctcccaggggctccacctgttcaggagctgaagcccatgctttcccaccagcatgtcactcccagaccacctccctgccctgtcctccagcttcccctcgctgtcctgctgtgtgaattcccaggttggcctggtggccatgtcgcctgcccccagcactcctctgtctctgctcttgcctgcacccttcctcctcctttgcctaggaggccttctcgcattttctctagctgatcagaattttaccaaaattcagaacatcctccaattccacagtctctgggagactttccctaagaggcgacttcctctccagccttctctctctggtcaggcccactgcagagatggtggtgagcacatctgggaggctggtctccctccagctggaattgctgctctctgagggagaggctgtggtggctgtctctgtccctcactgccttccaggagcaatttgcacatgtaacatagatttatgtaatgctttatgtttaaaaacattccccaattatcttatttaatttttgcaattattctaattttatatatagagaaagtgacctattttttaaaaaaatcacactctaagttctattgaacctaggacttgagcctccatttctggcttctagtctggtgttctgagtacttgatttcaggtcaataacggtcccccctcactccacactggcacgtttgtgagaagaaatgacattttgctaggaagtgaccgagtctaggaatgcttttattcaagacaccaaattccaaacttctaaatgttggaattttcaaaaattgtgtttagattttatgaaaaactcttctactttcatctattctttccctagaggcaaacatttcttaaaatgtttcattttcattaaaaatgaaagccaaatttatatgccaccgattgcaggacacaagcacagttttaagagttgtatgaacatggagaggacttttggtttttatatttctcgtatttaatatgggtgaacaccaacttttatttggaataataattttcctcctaaacaaaaacacattgagtttaagtctctgactcttgcctttccacctgctttctcctgggcccgctttgcctgcttgaaggaacagtgctgttctggagctgctgttccaacagacagggcctagctttcatttgacacacagactacagccagaagcccatggagcagggatgtcacgtcttgaaaagcctattagatgttttacaaatttaattttgcagattattttagtctgtcatccagaaaatgtgtcagcatgcatagtgctaagaaagcaagccaatttggaaacttaggttagtgacaaaattggccagagagtgggggtgatgatgaccaagaattacaagtagaatggcagctggaatttaaggagggacaagaatcaatggataagcgtgggtggaggaagatccaaacagaaaagtgcaaagttattccccatcttccaagggttgaattctggaggaagaagacacattcctagttccccgtgaacttcctttgacttattgtccccactaaaacaaaacaaaaaacttttaatgccttccacattaattagattttcttgcagtttttttatggcatttttttaaagatgccctaagtgttgaagaagagtttgcaaatgcaacaaaatatttaattaccggttgttaaaactggtttagcacaatttatattttccctctcttgcctttcttatttgcaataaaaggtattgagccattttttaaatgacatttttgataaattatgtttgtactagttgatgaaggagttttttttaacctgtttatataattttgcagcagaagccaaattttttgtatattaaagcaccaaattcatgtacagcatgcatcacggatcaatagactgtacttattttccaataaaattttcaaactttgtactgtta

SEQ ID NO: 299991 - DNA, 1710 bp, Artificial Sequence
  derived and/or modified sequence
atgaaggtgctgctgcggctgatctgcttcatcgccctgctgatctcctctcttgaagccgataagtgcaaggaaagagaagagaaaataatactagtgagctccgcgaacgaaattgatgttcggccctgccccctgaatcccaacgaacacaaaggcactatcacctggtataaggacgatagcaaaacgcccgtatcaaccgagcaagcaagccggatccatcagcataaggagaagctatggttcgtccccgctaaggtggaagacagcgggcactactactgtgtcgtgcggaattcctcttattgccttaggatcaagatctctgctaaattcgtcgagaacgagccaaatctgtgttataacgcccaagccatttttaaacagaagctgcctgtagcgggcgatggtggtctggtgtgtccatacatggaattcttcaagaatgaaaataacgaattacccaagttgcagtggtacaaggattgtaaaccattgctgctagataatattcactttagcggagtgaaggataggttaatagttatgaacgtcgcggagaagcatcgtgggaactatacatgtcatgcctcctacacttacctcggcaagcaatacccgatcactcgtgtgatcgagttcattactctggaggaaaataaaccaacccgccccgtgatcgttagcccagctaacgaaacgatggaggtggacttgggaagtcagatccagcttatatgtaacgtgacgggccagctcagcgatatcgcctactggaagtggaacggcagcgtgattgacgaagatgacccagtcttaggagaagattattattcagttgagaatcctgctaataagaggaggtctaccttgattacagttctgaatatatccgaaattgagtcaaggttctataagcacccttttacctgctttgcaaagaacacgcacggcatagacgccgcatatatccagctgatctaccccgtcacaaattttcagaaacatatgataggaatctgtgtgacattaactgtcattattgtgtgcagtgtttttatctataaaatcttcaagattgatatcgtgctctggtacagggactcttgttacgacttcctccctataaaggccagtgatggcaagacttacgatgcttatattctgtatcccaagaccgtgggggaaggttctacctcagattgcgacatattcgttttcaaagtcttgcctgaggtgttggagaaacagtgcggttataaattatttatttacggacgggatgactatgtaggggaggacatcgtcgaagtgatcaacgagaatgttaagaagtctcgccgactcattataatcttggtgcgggagaccagcggcttcagctggctcggcggcagttccgaggaacagatcgccatgtacaatgccctggtccaggatggcatcaaggttgtattgttggagcttgagaagattcaggactacgagaagatgccggagagcattaagttcattaagcaaaagcatggagccattagatggtcgggggacttcactcaaggcccgcagtccgctaaaacccgcttctggaagaacgtgagatatcacatgccagtccagcgcagatctccatctagcaagcatcagttgctgagccccgccaccaaggaaaaactccaaagggaggcccacgtgccgctcgggtag

SEQ ID NO: 299992 - DNA, 1710 bp, Artificial Sequence
  derived and/or modified sequence
atgaaggtgctccttcggcttatttgttttattgctctgctcatctccagtcttgaagcggataaatgtaaggaacgcgaggagaaaattatactggtatcttctgccaacgagattgacgtcagaccctgccctctaaatcctaatgagcacaaaggaaccatcacctggtataaagacgatagcaaaacacctgtgagcaccgagcaggcatcacgcatccatcagcataaagagaagttgtggtttgtgcccgcaaaggtggaagacagcggtcattattattgtgtagttcggaactccagctattgtctcaggattaagattagcgccaaattcgtagagaacgagccaaatctctgctataacgcacaagcaattttcaagcagaaattgcctgtagctggcgacggtggcttagtgtgtccttatatggaatttttcaagaatgagaataacgagctgccaaagttgcagtggtataaggactgtaagccactcctactggataacattcatttttcgggagtcaaggatagactcattgtgatgaacgtcgcagagaaacatcggggtaactatacgtgtcatgcctcctacacatatcttgggaaacagtatccgattacgagggtcatagagttcatcaccctcgaggaaaataagcccaccaggcctgtcatcgtttcacccgctaacgaaaccatggaggtcgacttgggctcccagatacaactgatatgtaacgtaaccggacagcttagcgacatagcgtattggaaatggaacggctctgtgatcgacgaggatgatcccgtgctaggtgaggactactacagcgtggagaatcctgcaaataaaagaagatctaccctgataacagtgttaaatatctcagaaatcgaaagtcgattctataaacatccgtttacgtgcttcgcaaagaatacacacggcatagatgccgcttatatacagctcatttaccctgtcacaaacttccagaaacacatgattggtatttgcgtgaccttaactgtcatcattgtgtgctcagtctttatctataaaatttttaagatcgacatcgttctttggtatcgcgactcgtgctatgattttctccccattaaagcttcagatggaaaaacatacgatgcttacatactgtacccaaagacagttggggagggctccacgtctgattgcgacatttttgtgttcaaagtgctgccggaagttctggagaaacagtgcggatacaaactttttatctatgggagggatgactatgttggcgaagatattgtggaagtgatcaatgagaacgtaaagaagagccgcaggctgataatcatccttgtgcgcgagacatccggcttttcttggctcggcggaagcagtgaagagcagatcgccatgtataacgcacttgtgcaggacggcattaaagtggtgttactggaattggagaaaattcaggactacgagaagatgcccgagagtattaagtttatcaaacagaaacatggtgctatccgctggtccggggactttactcagggtcctcagagtgccaagacccgattttggaaaaatgtgcgataccacatgcccgtgcagaggcgaagtccctcctctaagcatcagttgctttctccagccaccaaggagaagctacagagggaggctcatgttcctctcggctag

SEQ ID NO: 299993 - DNA, 1710 bp, Artificial Sequence
  derived and/or modified sequence
atgaaagtgctcctgcgactcatctgcttcatcgccctgctgatttcatccctcgaggccgacaagtgcaaggagagggaggagaaaatcatcctcgtttcctcggccaacgagatcgatgtgcggccttgccctctgaacccgaacgagcacaagggcaccattacatggtacaaggatgacagtaagacgccagtctcaactgagcaagccagcaggattcaccaacacaaggagaagttgtggtttgtgccagccaaggtggaggattcaggccactactattgcgttgtgcgaaattcctcgtattgccttcggatcaaaatttccgcaaagtttgtggaaaacgaaccaaacctctgttacaacgcccaggcgatcttcaagcagaaactcccagtggccggggatggaggattagtttgcccttacatggagttcttcaaaaatgagaacaacgaactaccaaaactacagtggtacaaggactgcaaacctctgttgctggataatattcacttctccggggtcaaagatagactgatcgtgatgaatgtggccgaaaaacaccgcgggaattacacatgccacgcttcttacacgtacctgggcaagcaatacccaatcacccgagtcatagaattcattacgctcgaagagaacaagccaacaagacccgtaatcgtctcacctgcgaacgaaacgatggaggtcgatctcggtagccagattcaactcatttgcaatgttaccgggcagctgagcgatattgcctactggaaatggaacgggtccgtgattgatgaagatgaccccgtgctgggagaggattactactcagtggaaaaccccgccaacaaaagacggtccacactcatcactgttctaaatatctctgaaatagagagtcgcttttataagcatccgttcacatgcttcgccaagaacacacacggcattgacgctgcatatattcagttgatctatcctgtcactaattttcaaaagcatatgattggcatctgtgtgacactgactgtcatcatcgtctgttccgtgttcatctacaaaatatttaaaatcgacattgttctgtggtacagggattcatgttacgactttttaccgattaaagctagtgatggaaagacatacgatgcctacatcctatacccaaagactgtgggcgaaggttctactagcgattgtgacattttcgtcttcaaagtgctgcccgaagtgttagaaaagcagtgcggatacaagctctttatctatggccgagatgattacgttggcgaagatatcgttgaagtcatcaatgaaaacgtgaagaaatccagaaggctgatcattatcctcgtgagggaaacttcaggcttctcttggctgggggggagttctgaagaacagattgcaatgtacaatgccctggttcaggatgggatcaaagtagtgctgttggagctagagaagatacaggactacgaaaaaatgccagagtctatcaagttcatcaaacagaaacacggcgccatacggtggagcggggacttcacccaaggtccccagtccgccaaaacccggttttggaaaaatgttaggtatcacatgcccgtgcaaaggcgaagtccttcctcaaaacatcagctgctcagccctgccacaaaggagaagcttcagagggaagcccacgtgccattagggtag

SEQ ID NO: 299994 - DNA, 1710 bp, Artificial Sequence
  derived and/or modified sequence
atgaaggtgctgctgcggctgatctgcttcatcgccctgctgatcagttcgctagaagccgacaaatgcaaggagagagaagaaaagatcatcctagtgagcagtgccaacgaaattgacgtccgtccttgccctttgaatcctaacgaacataagggaacaatcacatggtataaggacgattctaagactccggtatcaacggagcaggcatcccgaatccaccaacacaaggagaaactgtggttcgtgcccgctaaggtggaggactctggccactactactgtgttgtgcggaacagctcatattgcctgaggatcaaaatctcagctaaattcgtggagaatgagcccaacctgtgttataacgcgcaggccatcttcaaacaaaagctgccggtcgcaggggatggtggcttagtgtgtccttatatggaatttttcaaaaatgaaaataatgaacttcctaaacttcaatggtacaaagattgcaaacctcttcttctcgacaatattcacttctcgggtgttaaggacagattaattgtcatgaacgttgcggaaaaacacaggggcaattatacttgtcacgcttcttacacctacttgggtaaacagtaccccataacccgtgtcatcgagttcataacactagaagaaaataagccaacacgtccagtgatcgtttctcctgcgaacgaaacaatggaggtggacttaggttcccaaatccaactgatatgcaatgtcacaggccagttgagcgatatcgcttactggaagtggaatggtagcgtcatagatgaggatgacccagttctgggagaggattactactctgtggagaaccctgcaaacaagagacgctctaccttgatcacagtgctgaacattagcgaaattgaatctagattctacaagcatcctttcacttgctttgctaagaacacccacggcatcgatgcggcgtacatccagctgatctatccggtcaccaattttcagaagcacatgatcgggatttgcgtgaccctgaccgttatcattgtttgtagcgtgttcatctataagattttcaagatcgacatcgttctgtggtacagggatagctgttatgattttctcccaattaaagccagcgatggcaagacatacgacgcgtacattttatacccaaaaaccgtcggcgagggaagcacatccgactgtgacatcttcgttttcaaagttcttcccgaggttctagagaagcagtgcggctacaaactgttcatctatggccgagatgactacgttggcgaggacatagtggaagtgatcaacgaaaatgtcaaaaagtcccggcggctgataattattctcgtcagggaaaccagtggcttcagttggttggggggcagcagcgaggaacaaattgctatgtacaatgccctggttcaggatggcatcaaggtcgttctcctggaactcgagaaaatacaggattacgagaagatgccagaaagtatcaaattcataaaacagaaacacggtgctattcgatggagcggcgattttactcaggggccgcagagcgcaaagacgcgcttctggaagaatgtgagataccacatgcctgtccagcggcgctcacctagttctaaacaccagttgttgtcccctgcgaccaaagaaaagttacagcgggaagcacacgtacccctcggctag

SEQ ID NO: 299995 - DNA, 1710 bp, Artificial Sequence
  derived and/or modified sequence
atgaaagtgcttctacgcctaatctgcttcattgctctgttgatctctagcctggaggctgacaagtgcaaagagagggaggagaagattatcctggtttcgtcggccaatgagatcgatgtgcgcccttgcccacttaatcccaacgagcataaagggaccataacctggtacaaggatgattctaaaacacccgtgtcgacagagcaggcgagcaggattcatcagcacaaagagaagctctggtttgtacccgctaaagtggaagatagtggccactactactgtgtggtgcggaacagctcatactgtttacggattaaaatcagcgccaagtttgtcgaaaacgaacccaatctgtgctataatgcgcaagctatcttcaaacagaagctcccagtggccggagatggcggactggtctgtccgtatatggaattctttaaaaacgagaacaatgaattgcctaagctacagtggtataaggactgcaagcccttactccttgacaacatccatttcagtggggttaaggatcggctgatcgtcatgaatgtcgccgaaaaacacagaggaaactatacttgtcacgcttcctacacataccttgggaaacagtatcccatcacccgggtaatcgagttcataaccctggaagagaacaaacctacgcggcctgttatcgtctcgccagcgaacgaaaccatggaagtggatcttggctcccagatccagctgatttgcaacgtgacaggtcagctctctgatatcgcctactggaaatggaatggcagcgtgatcgacgaggacgacccggtgctgggagaggattattattccgtcgaaaacccagccaataaacgcaggtcaacactgattactgttctgaacatctccgagatcgaatcccggttctacaagcatcccttcacctgttttgccaagaatacgcacgggatcgacgccgcttatattcaattaatttatcctgtgacaaatttccagaagcacatgatcggcatttgtgtcactctcacagtaatcattgtctgctctgtctttatttacaaaatcttcaagatcgatatcgtgctgtggtatcgagactcatgctacgatttccttccaatcaaggcttccgacggtaaaacttacgacgcatatatcttgtaccctaaaacagtgggggaggggtccaccagtgactgtgatatcttcgtctttaaagtgcttccagaggtgctcgagaagcagtgcgggtataaactgttcatatatgggagggatgactacgtgggcgaggatatagtggaggtcattaacgagaatgtaaagaagagccgtagattaataatcatcctggtccgggagacctcaggattctcctggctgggcggttcctccgaggagcaaatcgccatgtacaatgcactcgtccaggacggtattaaggtggtccttctggagctagagaaaatccaggattacgagaagatgccggagtccataaagtttatcaagcaaaaacacggcgcaatcagatggagcggtgacttcacccaggggcctcagtctgccaagactaggttttggaaaaacgtgaggtatcatatgcccgtacagcgaaggtccccttctagtaaacatcagctgctgtcccctgccacaaaggagaaactgcagcgggaggcccacgttcccctgggatag

SEQ ID NO: 299996 - DNA, 549 bp, Artificial Sequence
  derived and/or modified sequence
atgaaggtgctgctgagactgatctgcttcatcgccctgctgatcagcagcctggaggccgacaagtgcaaggagagagaggagaagatcatcctggtgagcagcgccaacgagatcgacgtgagaccctgccccctgaaccccaacgagcacaagggcaccatcacctggtacaaggacgacagcaagacccccgtgagcaccgagcaggccagcagaatccaccagcacaaggagaagctgtggttcgtgcccgccaaggtggaggacagcggccactactactgcgtggtgagaaacagcagctactgcctgagaatcaagatcagcgccaagttcgtggagaacgagcccaacctgtgctacaacgcccaggccatcttcaagcagaagctgcccgtggccggcgacggcggcctggtgtgcccctacatggagttcttcaagaacgagaacaacgagctgcccaagctgcagtggtacaaggactgcaagcccctgctgctggacaacatccacttcagcggcgtgaaggacagactgatctag

SEQ ID NO: 299997 - DNA, 345 bp, Artificial Sequence
  derived and/or modified sequence
atgaaggtgctgctgagactgatctgcttcatcgccctgctgatcagcagcctggaggccgacaagtgcaaggagagagaggagaagatcatcctggtgagcagcgccaacgagatcgacgtgagaccctgccccctgaaccccaacgagcacaagggcaccatcacctggtacaaggacgacagcaagacccccgtgagcaccgagcaggccagcagaatccaccagcacaaggagaagctgtggttcgtgcccgccaaggtggaggacagcggccactactactgcgtggtgagaaacagcagctactgcctgagaatcaagatcagcgccaagttcgtgtag

SEQ ID NO: 299998 - DNA, 321 bp, Artificial Sequence
  derived and/or modified sequence
atgaaggtgctgctgagactgatctgcttcatcgccctgctgatcagcagcctggaggccgacaagtgcaaggagagagaggagaagatcatcctggtgagcagcgccaacgagatcgacgtgagaccctgccccctgaaccccaacgagcacaagggcaccatcacctggtacaaggacgacagcaagacccccgtgagcaccgagcaggccagcagaatccaccagcacaaggagaagctgtggttcgtgcccgccaaggtggaggacagcggccactactactgcgtggtgagaaacagcagctactgcctgagatag

SEQ ID NO: 299999 - DNA, 243 bp, Artificial Sequence
  derived and/or modified sequence
atgaaggtgctgctgagactgatctgcttcatcgccctgctgatcagcagcctggaggccgacaagtgcaaggagagagaggagaagatcatcctggtgagcagcgccaacgagatcgacgtgagaccctgccccctgaaccccaacgagcacaagggcaccatcacctggtacaaggacgacagcaagacccccgtgagcaccgagcaggccagcagaatccaccagcacaaggagaagtag

SEQ ID NO: 300000 - DNA, 549 bp, Artificial Sequence
  derived and/or modified sequence
atgaaagtcctgctcagattgatctgcttcatcgcactgctgattagttcactcgaggcggacaagtgcaaggagagagaggaaaagattatcttagtatcctcagccaacgagatagacgtccgcccttgtccattaaaccccaatgagcataaggggacgatcacgtggtacaaagatgattctaaaactccagtgtccacagagcaggcctcccgaatccatcagcacaaagagaagctctggtttgtccctgcaaaggttgaggatagcggtcattactactgtgtggtgcgaaattccagctattgtcttagaataaagatatcagcaaagtttgttgaaaacgagcctaacctttgttacaatgcacaggctattttcaaacaaaaactccctgttgccggagatgggggtttagtttgcccctacatggagttttttaagaatgagaacaacgagttgcctaagctgcagtggtataaagattgtaaacctctgttattagacaacatccactttagtggggtcaaagatcgcttgatatag

SEQ ID NO: 300001 - DNA, 345 bp, Artificial Sequence
  derived and/or modified sequence
atgaaggtgctcctaagattgatctgcttcattgccctgttaatctctagtctggaggctgacaaatgcaaagagagagaagagaagatcatcttagtgtccagcgcaaatgagatcgacgtgagaccttgccccctcaaccccaacgaacacaaaggtacgataacatggtataaagatgattccaaaacccctgtctccaccgagcaggcttcacggatccaccaacacaaggagaagctgtggttcgttccggctaaggtcgaggattcggggcactattattgtgtggtccgcaactccagctactgtttgaggatcaaaatctccgcaaagtttgtatag

SEQ ID NO: 300002 - DNA, 321 bp, Artificial Sequence
  derived and/or modified sequence
atgaaggtcctcctgcgactgatttgtttcattgcacttctgatttcatctctggaggctgataaatgtaaagaacgagaggagaaaattattttggtctcatccgccaatgagatcgatgtacgcccatgtcccctgaatcccaatgagcacaaaggcaccataacctggtacaaagatgactcaaaaactcccgtcagtaccgaacaagcctcccgtatacaccagcacaaggaaaagctgtggttcgtcccagccaaagtggaagacagtggtcattattactgcgttgttcgcaactcttcctactgcttgcggtag

SEQ ID NO: 300003 - DNA, 243 bp, Artificial Sequence
  derived and/or modified sequence
atgaaagtactcctgcggcttatctgctttatagctctgttaatttcttccctcgaagccgacaagtgcaaagaacgcgaggaaaagattattttagtgtcttcagccaacgagatcgatgttcgcccatgtcccctgaaccccaacgaacacaaaggtactatcacatggtacaaagacgattcaaagacccccgtgtctactgaacaggcctctaggattcatcaacacaaagagaagtag

SEQ ID NO: 300004 - DNA, 549 bp, Artificial Sequence
  derived and/or modified sequence
atgaaggtgctgctgcggctcatctgcttcatcgccctgctgatcagcagcctggaggccgacaagtgcaaggagcgggaggagaagatcatcctggtgtcctctgccaatgaaattgatgtgcggccctgccccctgaaccccaatgagcacaagggcaccatcacctggtacaaggatgacagcaagacccctgtgtccacagagcaggccagccgcatccaccagcacaaggagaagctgtggtttgtgcctgccaaggtggaggacagcggccactactactgtgtggtgaggaacagcagctactgcctgcgcatcaagatcagcgccaagtttgtggagaatgagcccaacctgtgctacaatgcccaggccatcttcaagcagaagctgcctgtggccggagatggcggcctggtgtgcccctacatggagttcttcaagaatgaaaataatgagctgcccaagctgcagtggtacaaggactgcaagcccctgctgctggacaacatccacttctctggagtgaaggacaggctcatctag

SEQ ID NO: 300005 - DNA, 345 bp, Artificial Sequence
  derived and/or modified sequence
atgaaggtgctgctgcggctcatctgcttcatcgccctgctgatcagcagcctggaggccgacaagtgcaaggagcgggaggagaagatcatcctggtgtcctctgccaatgaaattgatgtgcggccctgccccctgaaccccaatgagcacaagggcaccatcacctggtacaaggatgacagcaagacccctgtgtccacagagcaggccagccgcatccaccagcacaaggagaagctgtggtttgtgcctgccaaggtggaggacagcggccactactactgtgtggtgaggaacagcagctactgcctgcgcatcaagatcagcgccaagtttgtgtag

SEQ ID NO: 300006 - DNA, 321 bp, Artificial Sequence
  derived and/or modified sequence
atgaaggtgctgctgcggctcatctgcttcatcgccctgctgatcagcagcctggaggccgacaagtgcaaggagcgggaggagaagatcatcctggtgtcctctgccaatgaaattgatgtgcggccctgccccctgaaccccaatgagcacaagggcaccatcacctggtacaaggatgacagcaagacccctgtgtccacagagcaggccagccgcatccaccagcacaaggagaagctgtggtttgtgcctgccaaggtggaggacagcggccactactactgtgtggtgaggaacagcagctactgcctgaggtag

SEQ ID NO: 300007 - DNA, 243 bp, Artificial Sequence
  derived and/or modified sequence
atgaaggtgctgctgcggctcatctgcttcatcgccctgctgatcagcagcctggaggccgacaagtgcaaggagcgggaggagaagatcatcctggtgtcctctgccaatgaaattgatgtgcggccctgccccctgaaccccaatgagcacaagggcaccatcacctggtacaaggatgacagcaagacccctgtgtccacagagcaggccagccgcatccaccagcacaaggagaagtag

SEQ ID NO: 300008 - DNA, 709 bp, Artificial Sequence
  derived and/or modified sequence
gtgactccctcctgagaagctggaccccttggtaaaagacaaggccttctccaagacttaaaacacacttcacgcagtcacagaaagagctcatagaccagactgcggggcttcaaagccttctatcttatttaatcatctgtaaatagtttaaagaagaatatgaaagtgttactcagacttatttgtttcatagctctactgatttcttctctggaggctgataaatgcaaggaacgtgaagaaaaaataattttagtgtcatctgcaaatgaaattgatgttcgtccctgtcctcttaacccaaatgaacacaaaggcactataacttggtataaagatgacagcaagacacctgtatctacagaacaagcctccaggattcatcaacacaaagagaaactttggtttgttcctgctaaggtggaggattcaggacattactattgcgtggtaagaaattcatcttactgcctcagaattaaaataagtgcaaaatttgtggagaatgagcctaacttatgttataatgcacaagccatatttaagcagaaactacccgttgcaggagacggaggacttgtgtgcccttatatggagttttttaaaaatgaaaataatgagttacctaaattacagtggtataaggattgcaaacctctacttcttgacaatatacactttagtggagtcaaagataggctcatcg

SEQ ID NO: 300009 - DNA, 577 bp, Artificial Sequence
  derived and/or modified sequence
agtcggagagagcccctggccaggcaccaagctccagaggtcgctctggcgagcgtttgcttcgggatctgatgccctggagtcgccaactcaattcgcgggtcgcagccaggctccatgggggtagtagagccaggtcgtagtggctaggtagacgcaccctctgaagatggtgactccctcctgagaagctggaccccttggtaaaagacaaggccttctccaagaagaatatgaaagtgttactcagacttatttgtttcatagctctactgatttcttctctggaggctgataaatgcaaggaacgtgaagaaaaaataattttagtgtcatctgcaaatgaaattgatgttcgtccctgtcctcttaacccaaatgaacacaaaggcactataacttggtataaagatgacagcaagacacctgtatctacagaacaagcctccaggattcatcaacacaaagagaaactttggtttgttcctgctaaggtggaggattcaggacattactattgcgtggtaagaaattcatcttactgcctcagaattaaaataagtgcaaaatttgtgga

SEQ ID NO: 300010 - DNA, 549 bp, Artificial Sequence
  derived and/or modified sequence
cttcttggaggatggcccatgaagacctccaaacaagctggaggggccagtcacttgctgaagactagcgaagtggagggggaaagcccgagggagctgcagactcgaccactgcgccctcccctcctctccctgcaaggagcccaaggtagacgcaccctctgaagatggtgactccctcctgagaagctggaccccttggtaaaagacaaggccttctccaagaagaatatgaaagtgttactcagacttatttgtttcatagctctactgatttcttctctggaggctgataaatgcaaggaacgtgaagaaaaaataattttagtgtcatctgcaaatgaaattgatgttcgtccctgtcctcttaacccaaatgaacacaaaggcactataacttggtataaagatgacagcaagacacctgtatctacagaacaagcctccaggattcatcaacacaaagagaaactttggtttgttcctgctaaggtggaggattcaggacattactattgcgtggtaagaaattcatcttactgcctcaga

SEQ ID NO: 300011 - DNA, 609 bp, Artificial Sequence
  derived and/or modified sequence
gaaacatttaccagatgtgtggcttgagtgtccattcccgcaacaaaaacgctctgcagtaaagctccgagatggctgtgtttgtgttggactgctctagatgcacaaccctcctggacaaagcgtttttcctcagccttcaccacccatggaggaggtgtgattacctctattcacagaaaggagactgggacccaaccaaggcaagtcatttgcttcagaccacagagcaaagaatcattctgtcattccagaaatatttgtcaggcgcccctggtgtgtcaggtagacgcaccctctgaagatggtgactccctcctgagaagctggaccccttggtaaaagacaaggccttctccaagaagaatatgaaagtgttactcagacttatttgtttcatagctctactgatttcttctctggaggctgataaatgcaaggaacgtgaagaaaaaataattttagtgtcatctgcaaatgaaattgatgttcgtccctgtcctcttaacccaaatgaacacaaaggcactataacttggtataaagatgacagcaagacacctgtatctacagaacaagcctccaggattcatcaacacaaagagaaac

SEQ ID NO: 300012 - DNA, 549 bp, Artificial Sequence
  derived and/or modified sequence
atgaaggtgctgctgcggctgatctgcttcatcgccctgctgatcagctcactggaggcggataagtgtaaggagagggaggagaagatcatactggtcagctctgccaatgagatagatgtgagaccttgtcctcttaacccaaatgagcacaaaggaaccattacctggtacaaagatgatagcaagacccccgttagcaccgagcaagcatcacggattcatcagcacaaagaaaaactgtggttcgttcctgcaaaggtagaggatagcggtcattactactgtgtggtgaggaactcatcttattgcctacgaattaagatcagcgccaagtttgtggaaaatgagcccaacctgtgttacaatgcgcaggcgatatttaagcagaaattacctgtcgcaggcgacggcggcctggtctgtccatacatggagttctttaagaatgagaataatgaactgcccaagcttcagtggtataaggattgcaagcccctgctgcttgacaatattcatttcagcggagtcaaagatcgactgatttag

SEQ ID NO: 300013 - DNA, 345 bp, Artificial Sequence
  derived and/or modified sequence
atgaaggtgctgctgcggctgatctgcttcatcgccctgctgatcagctcactggaggcggataagtgcaaggaaagggaggagaaaattattctcgtgtcaagcgccaatgaaattgatgtccgtccatgtcctcttaatccgaacgaacacaagggcactatcacatggtataaggacgatagcaagacgcctgtcagcactgaacaggcaagcaggatccaccagcacaaagagaagctgtggtttgtccctgcaaaggtggaggactcaggccactactattgtgtggtccgtaactcgtcatattgcctgcgcataaaaatttccgcaaaatttgtctag

SEQ ID NO: 300014 - DNA, 321 bp, Artificial Sequence
  derived and/or modified sequence
atgaaggtgctgctgcggctgatctgcttcatcgccctgctgatcagcagcctggaagcggataaatgcaaggagagagaagagaagatcatccttgtgtccagcgcaaacgagattgacgtgcgtccttgtccactgaaccccaacgagcacaagggtacgatcacctggtataaagatgactccaagactcctgtcagcacagagcaggcctcaaggatccatcagcataaggagaaactctggtttgtacctgccaaggtggaggattccggtcactattattgcgtggtgagaaactcaagctattgcctaaggtag

SEQ ID NO: 300015 - DNA, 243 bp, Artificial Sequence
  derived and/or modified sequence
atgaaggtgctgctgcggctgatctgcttcatcgccctgctgatctcctctttggaggctgataaatgcaaggagagagaagagaaaatcatcctagtgtcctcagctaatgagatagatgtcagaccctgtcctctcaatccgaatgaacacaagggcaccataacatggtataaggacgattcaaaaacacctgtaagtaccgaacaggcctcccgtattcaccagcataaagagaaatag

SEQ ID NO: 300016 - DNA, 549 bp, Artificial Sequence
  derived and/or modified sequence
atgaaagtccttctgcgactgatttgttttattgcactgctaatctcatcacttgaagcagataagtgcaaggagcgggaggaaaaaatcatcctggtgagcagtgcaaatgaaatcgatgtcaggccatgtcccctaaatccaaacgagcacaaaggcacaatcacctggtacaaagatgattccaaaacacctgtcagcaccgaacaagcttcccgaattcatcagcacaaagagaaactttggtttgtgccagccaaggtcgaagattctggccattactattgtgttgtgcgaaacagtagttattgcctaaggattaagatttccgcaaagttcgtggagaatgagccaaacctgtgctataacgcccaggccatctttaagcagaagctgcccgtcgctggagacggtggcctggtatgcccctacatggagttcttcaagaacgagaataatgagttgccaaagttgcagtggtacaaagattgtaagccactgctcctggataatattcactttagtggagtaaaagatcgcctcatttag

SEQ ID NO: 300017 - DNA, 345 bp, Artificial Sequence
  derived and/or modified sequence
atgaaggtcctcctgcggttgatttgcttcatcgctctgctgatctcaagcttggaggccgataagtgtaaggagcgcgaagagaagataatcctggtttcatctgccaatgagatagatgtgagaccgtgccccctgaatcccaatgagcacaaggggacaatcacgtggtataaagacgactccaaaacacccgtttccaccgagcaggcaagccgaatacaccagcataaggagaagctatggttcgtccccgcaaaagtggaggactccgggcactattattgcgtggttagaaattcttcctactgcctccggatcaaaatttcagcgaagtttgtttag

SEQ ID NO: 300018 - DNA, 321 bp, Artificial Sequence
  derived and/or modified sequence
atgaaggtgttgttaaggctcatctgcttcatcgctctcttaatttcgagtcttgaggctgacaagtgtaaggagcgcgaagaaaaaatcattctcgtaagcagtgccaacgagatcgacgtgcggccatgtccgcttaaccccaacgagcataaagggacgattacctggtacaaagacgactccaaaacacctgtgtctaccgagcaagcaagccggattcatcagcacaaagaaaaactttggtttgtgcccgcaaaagtggaggatagtgggcactattattgcgtagtgagaaacagcagctattgtttaaggtag

SEQ ID NO: 300019 - DNA, 243 bp, Artificial Sequence
  derived and/or modified sequence
atgaaagtgctgctgagattgatttgctttattgccctgctgatcagctcacttgaggccgacaaatgcaaggagcgcgaagaaaagatcatattggtctcttccgccaatgagattgatgtgcgaccttgccctctcaatccgaacgagcataaggggaccatcacctggtacaaggacgatagtaagacaccagtgtccaccgagcaggccagccgcatccaccaacacaaagagaagtag

SEQ ID NO: 300020 - protein, 162 aa, Artificial Sequence
  derived and/or modified sequence
MEDGKRERWPTLMERLCSDGFAFPQYPIKPYHLKRIHRAVLHGNLEKLKYLLLTYYDANKRDRKERTALHLACATGQPEMVHLLVSRRCELNLCDREDRTPLIKAVQLRQEACATLLLQNGANPNITDFFGRTALHYAVYNEDTSMIEKLLSHGTNIEECSK

SEQ ID NO: 300021 - protein, 346 aa, Artificial Sequence
  derived and/or modified sequence
MEDGKRERWPTLMERLCSDGFAFPQYPIKPYHLKRIHRAVLHGNLEKLKYLLLTYYDANKRDRKERTALHLACATGQPEMVHLLVSRRCELNLCDREDRTPLIKAVQLRQEACATLLLQNGANPNITDFFGRTALHYAVYNEDTSMIEKLLSHGTNIEECSKCEYQPLLFAVSRRKVKMVEFLLKKKANVNAIDYLGRSALIHAVTLGEKDIVILLLQHNIDVLSRDAFRKIAGDYAIEAKNRVIFDLIYEYERKRYEDLPINSNPVSSQKPPTLKGTSDEEDSVLGIARENKDGEKSRTVSSEKPPGLKASSAEKDSVLNIARGKKDGEKTKRVSSRKKPSLEAT

SEQ ID NO: 300022 - protein, 309 aa, Artificial Sequence [sequence omitted]

SEQ ID NO: 300023 - DNA, 489 bp, Artificial Sequence
  derived and/or modified sequence
atggaggacggcaagagagagagatggcccaccctgatggagagactgtgcagcgacggcttcgccttcccccagtaccccatcaagccctaccacctgaagagaatccacagagccgtgctgcacggcaacctggagaagctgaagtacctgctgctgacctactacgacgccaacaagagagacagaaaggagagaaccgccctgcacctggcctgcgccaccggccagcccgagatggtgcacctgctggtgagcagaagatgcgagctgaacctgtgcgacagagaggacagaacccccctgatcaaggccgtgcagctgagacaggaggcctgcgccaccctgctgctgcagaacggcgccaaccccaacatcaccgacttcttcggcagaaccgccctgcactacgccgtgtacaacgaggacaccagcatgatcgagaagctgctgagccacggcaccaacatcgaggagtgcagcaagtag

SEQ ID NO: 300024 - DNA, 1041 bp, Artificial Sequence
  derived and/or modified sequence
atggaggacggcaagagagagagatggcccaccctgatggagagactgtgcagcgacggcttcgccttcccccagtaccccatcaagccctaccacctgaagagaatccacagagccgtgctgcacggcaacctggagaagctgaagtacctgctgctgacctactacgacgccaacaagagagacagaaaggagagaaccgccctgcacctggcctgcgccaccggccagcccgagatggtgcacctgctggtgagcagaagatgcgagctgaacctgtgcgacagagaggacagaacccccctgatcaaggccgtgcagctgagacaggaggcctgcgccaccctgctgctgcagaacggcgccaaccccaacatcaccgacttcttcggcagaaccgccctgcactacgccgtgtacaacgaggacaccagcatgatcgagaagctgctgagccacggcaccaacatcgaggagtgcagcaagtgcgagtaccagcccctgctgttcgccgtgagcagaagaaaggtgaagatggtggagttcctgctgaagaagaaggccaacgtgaacgccatcgactacctgggcagaagcgccctgatccacgccgtgaccctgggcgagaaggacatcgtgatcctgctgctgcagcacaacatcgacgtgctgagcagagacgccttcagaaagatcgccggcgactacgccatcgaggccaagaacagagtgatcttcgacctgatctacgagtacgagagaaagagatacgaggacctgcccatcaacagcaaccccgtgagcagccagaagccccccaccctgaagggcaccagcgacgaggaggacagcgtgctgggcatcgccagagagaacaaggacggcgagaagagcagaaccgtgagcagcgagaagccccccggcctgaaggccagcagcgccgagaaggacagcgtgctgaacatcgccagaggcaagaaggacggcgagaagaccaagagagtgagcagcagaaagaagcccagcctggaggccacctag

SEQ ID NO: 300025 - DNA, 930 bp, Artificial Sequence
  derived and/or modified sequence
atggaggacggcaagagagagagatggcccaccctgatggagagactgtgcagcgacggcttcgccttcccccagtaccccatcaagccctaccacctgaagagaatccacagagccgtgctgcacggcaacctggagaagctgaagtacctgctgctgacctactacgacgccaacaagagagacagaaaggagagaaccgccctgcacctggcctgcgccaccggccagcccgagatggtgcacctgctggtgagcagaagatgcgagctgaacctgtgcgacagagaggacagaacccccctgatcaaggccgtgcagctgagacaggaggcctgcgccaccctgctgctgcagaacggcgccaaccccaacatcaccgacttcttcggcagaaccgccctgcactacgccgtgtacaacgaggacaccagcatgatcgagaagctgctgagccacggcaccaacatcgaggagtgcagcaagtgcgagtaccagcccctgctgttcgccgtgagcagaagaaaggtgaagatggtggagttcctgctgaagaagaaggccaacgtgaacgccatcgactacctgggcagaagcgccctgatccacgccgtgaccctgggcgagaaggacatcgtgatcctgctgctgcagcacaacatcgacgtgctgagcagagacgccttcagaaagatcgccggcgactacgccatcgaggccaagaacagagtgatcttcgacctgatctacgagtacgagagaaagagatacgaggacctgcccatcaacagcaaccccgtgagcagccagaagcagcccgccctggccaccgagcaggacagcatgagcaagatcaagaagagaaagctgatcgtgatgaagaagaagagcatggtgatccagagattcctggtgaccttctgcaagtag

SEQ ID NO: 300026 - DNA, 489 bp, Artificial Sequence
  derived and/or modified sequence
atggaggacgggaagagggaacgatggccaactttaatggagcggttgtgtagcgatggtttcgcctttcctcagtacccaatcaaaccttaccatctgaaaagaattcaccgcgccgtgttgcacggcaatcttgagaagctgaagtacctcttacttacctactatgatgccaacaagcgcgatagaaaagagcgcaccgcattgcacctggcatgtgctaccggccaacccgaaatggtgcacttactggtgtcaaggcggtgtgagttaaatctctgcgaccgcgaggacaggacaccgctcattaaagccgtgcagctccggcaggaagcctgcgccactctgctcctccagaacggagctaatccaaacatcactgacttttttggaaggacagctttgcattacgcagtgtataacgaagacacatcgatgatcgagaaactgctgagtcacgggacaaacattgaggagtgtagtaagtag

SEQ ID NO: 300027 - DNA, 1041 bp, Artificial Sequence
  derived and/or modified sequence
atggaggatggaaagcgggagcggtggcccactttgatggagcgcctatgttccgacgggttcgcctttccccagtaccccatcaagccgtatcacctgaagcggatccatcgagcagtcctacatgggaatctggaaaagctcaagtatctcctcctgacttattatgatgcaaacaaaagggatagaaaagagaggaccgctctccacctggcttgtgcaaccgggcagccagagatggtgcacctcctggtgtcaagaaggtgtgagctgaacctgtgtgaccgtgaggaccgcacccccctgatcaaggctgttcagctgcgccaagaggcctgtgctacgctgctgttgcaaaacggcgccaacccgaatatcaccgatttcttcggaaggacggctctgcattacgccgtatacaatgaggataccagcatgattgagaagttgctgtcacacggaacaaacatcgaggaatgctcgaaatgtgaatatcagcccttgttattcgctgtgagtaggcgcaaagttaagatggtggaatttttgttaaagaagaaagccaatgtcaacgccatcgattacttggggaggtccgcgttaatccacgcagtcacccttggggagaaggacatcgtcatcttactcttacagcataatatcgacgtcctgtcccgagatgcctttagaaaaatcgccggcgattacgctatagaagctaagaaccgtgtgatctttgacctcatatatgagtacgagaggaaaaggtatgaagatttacctatcaacagcaatccagtatccagccaaaaacctcctacccttaagggtaccagtgatgaagaggattcagtgctgggcattgcaagagagaacaaagatggtgagaagtcacgtacagtgtctagtgagaagccacccggtttaaaagcttccagtgctgaaaaggacagcgtgcttaatatcgcaaggggcaaaaaggacggagagaaaactaaaagagttagctcccgcaagaaaccctcattagaggccacatag

SEQ ID NO: 300028 - DNA, 930 bp, Artificial Sequence
  derived and/or modified sequence
atggaggacggcaaacgcgagcggtggcccacactcatggagaggttgtgctcagacggctttgcattcccacagtacccaatcaagccttaccaccttaaaaggattcatcgtgccgtgctccacggaaatcttgagaagctaaaatacctgttgctgacttactacgatgctaacaagagagataggaaagagcgaacagcactgcatctggcatgtgccactggacaacctgagatggtgcatctgctggtgtcccgaagatgcgaattaaatttatgcgatagggaagacagaacccccctcattaaagccgtacagttaaggcaggaagcttgcgcaacactgcttcttcagaacggtgccaatcccaatatcaccgatttctttggccgaaccgccctgcactatgcagtgtacaacgaggacaccagcatgatagaaaaacttctttcccacggcaccaacatagaggagtgctctaagtgtgagtaccagcctctcctctttgccgtgagcagaaggaaagtgaaaatggtcgaatttctgcttaagaagaaagccaatgtgaacgcaattgattacttgggaaggtccgcacttattcatgccgtcacactcggagaaaaagacatagtaattcttctgctgcaacataacatagatgtcttaagcagagatgcttttagaaaaattgctggcgactacgccatagaggccaaaaaccgggtaattttcgatctgatttatgagtatgagagaaagcgctacgaggatctgccaattaactccaacccagtgagcagccagaagcaaccagccttggccacggaacaggactcaatgtcgaaaatcaagaagaggaagctgatcgtgatgaaaaaaaagtccatggtcatccagagatttctcgtgaccttttgcaaatag

SEQ ID NO: 300029 - DNA, 489 bp, Artificial Sequence
  derived and/or modified sequence
atggaggatggcaagcgggagcgctggcccaccctgatggagcggctgtgcagtgatggctttgccttcccccagtaccccatcaagccctaccacctgaagaggatccacagagctgtgctgcacggcaacctggagaagctgaagtacctgctgctgacctactatgatgccaacaagagggacaggaaggagaggacagccctgcacctggcctgtgccaccggccagcctgagatggtgcacctgctggtgtccagaagatgtgagctgaacctgtgtgaccgggaggacaggacccccctcatcaaggctgtgcagctgcggcaggaggcctgtgccaccctgctgctgcagaatggagccaaccccaacatcacagacttcttcggccgcacagccctgcactatgctgtgtacaatgaagacacctccatgattgagaagctgctgagccacggcaccaacattgaagaatgttccaagtag

SEQ ID NO: 300030 - DNA, 1041 bp, Artificial Sequence
  derived and/or modified sequence
atggaggatggcaagcgggagcgctggcccaccctgatggagcggctgtgcagtgatggctttgccttcccccagtaccccatcaagccctaccacctgaagaggatccacagagctgtgctgcacggcaacctggagaagctgaagtacctgctgctgacctactatgatgccaacaagagggacaggaaggagaggacagccctgcacctggcctgtgccaccggccagcctgagatggtgcacctgctggtgtccagaagatgtgagctgaacctgtgtgaccgggaggacaggacccccctcatcaaggctgtgcagctgcggcaggaggcctgtgccaccctgctgctgcagaatggagccaaccccaacatcacagacttcttcggccgcacagccctgcactatgctgtgtacaatgaagacacctccatgattgagaagctgctgagccacggcaccaacattgaagaatgttccaaatgtgagtaccagcccctgctgtttgctgtgtccaggaggaaggtgaagatggtggagttcctgctgaagaagaaggccaacgtgaatgccatcgactacctgggccgcagcgccctgattcatgctgtgaccctgggggagaaggacatcgtcatcctgctgctgcagcacaacattgatgtgctgagcagagatgccttcaggaagattgctggggactatgccatcgaggccaagaacagagtcatctttgacctgatctatgaatatgaaaggaagagatatgaggacctgcccatcaacagcaaccctgtgagcagccagaagccacccaccctgaagggcaccagtgatgaggaggacagcgtgctgggcatcgcccgggagaacaaggatggagagaagagcaggacagtgtcctctgagaagcccccaggcctgaaggccagcagcgctgagaaggacagcgtgctgaacatcgcccggggcaagaaggatggagagaagaccaagagggtgagcagcaggaagaagcccagcctggaggccacctag

SEQ ID NO: 300031 - DNA, 930 bp, Artificial Sequence
  derived and/or modified sequence
atggaggatggcaagcgggagcgctggcccaccctgatggagcggctgtgcagtgatggctttgccttcccccagtaccccatcaagccctaccacctgaagaggatccacagagctgtgctgcacggcaacctggagaagctgaagtacctgctgctgacctactatgatgccaacaagagggacaggaaggagaggacagccctgcacctggcctgtgccaccggccagcctgagatggtgcacctgctggtgtccagaagatgtgagctgaacctgtgtgaccgggaggacaggacccccctcatcaaggctgtgcagctgcggcaggaggcctgtgccaccctgctgctgcagaatggagccaaccccaacatcacagacttcttcggccgcacagccctgcactatgctgtgtacaatgaagacacctccatgattgagaagctgctgagccacggcaccaacattgaagaatgttccaaatgtgagtaccagcccctgctgtttgctgtgtccaggaggaaggtgaagatggtggagttcctgctgaagaagaaggccaacgtgaatgccatcgactacctgggccgcagcgccctgattcatgctgtgaccctgggggagaaggacatcgtcatcctgctgctgcagcacaacattgatgtgctgagcagagatgccttcaggaagattgctggggactatgccatcgaggccaagaacagagtcatctttgacctgatctatgaatatgaaaggaagagatatgaggacctgcccatcaacagcaaccctgtgagcagccagaagcagcctgccctggccacagagcaggacagcatgagcaagatcaagaagaggaagctgattgtgatgaagaagaagtccatggtgatccagcgcttcctggtgaccttctgcaagtag

SEQ ID NO: 300032 - DNA, 1884 bp, Artificial Sequence
  derived and/or modified sequence
tgctcgttgttgctcttcggaggcggcgatccccgaaggcgagctgaaatacggctgcaggctacaatttgcagccgacgattatggaagacggcaagcgggagaggtggcccaccctcatggagcgcttgtgctcggatggcttcgcatttccccaataccccattaaaccgtatcatctgaagaggatccacagagctgtcttacatggtaatctagagaaactgaagtaccttctgctcacgtattatgacgccaataagagagacaggaaggaaaggaccgccctacatttggcctgtgccactggccaaccggaaatggtacatctcctggtgtccagaagatgtgagcttaacctctgcgaccgtgaagacaggacacctctgatcaaggctgtacaactgaggcaggaggcttgtgcaactcttctgctgcaaaatggcgccaatccaaatattacggatttctttggaaggactgctctgcactacgctgtgtataatgaagatacatccatgatagaaaaacttctttcacatggtacaaatattgaagaatgcagcaagtgtgaatatcagccactgttatttgctgtgagtcgaagaaaagtgaaaatggtggaatttttattaaagaaaaaagcaaatgtaaatgccattgattatcttggcagatcagccctcatacatgctgttactcttggagaaaaagatatagtcattcttcttctgcagcacaatattgatgtgctttctcgagatgcgtttcgaaagattgcaggagattatgccattgaggctaagaatagagtcatttttgatctaatttatgaatacgaaagaaagagatatgaagatcttcctataaatagcaatccagtgtcttctcagaaacaaccagccttggcaacagagcaagactccatgtcaaaaataaaaaaaagaaagttgattgttatgaaaaaaaagtcaatggtgattcagagatttttggttacattttgtaaatgaaaatctgagtactcattagttatttgatgtgtaatgcatacttttttttttgcataagtgaatgaaaagatggcaagagaactaaagttgagaatccagaagttgaaaatatcagaagccttcatgactgtggatgacatgagtatttttagaaacgatttttctccaagtagatatctaaagtaatgattgagagcatttcctgccagcagaagcgaatgatacattttcttttctttttttttgagacggagtctcactctgtcacccaggcttgagtgcagtggcgggatctcggctcactgcgaactccgcctcccgggttcacgccattctcctgcttcagcctcctgagtagctggtactacaggcgcctgccaccacacccggctaattttacgcatttttagtagagacggggtttcaccgtgttagccaggatggtctccatctcctgactttgtgatctgcccgcctcggcctcccaaagtgctgggattacaggctgtctcctgagcaaccgcctttattcacgaatcttctgagcgacctcctttatccacgcttactctgaaagaggcagatcccagttcaaaagcagccatgagaaggaaggattcaccacctccaggaaaagtgtcttctcagaaacaaccagctgagaagggtacaagtgacgaggaagattctgttttgggtatagccagagaaaacaaggatggagaaaaatctaggacagtgtcttctgagaaaccaccaggcttgaaggcttcaagtgccgagaaagattctgttttgaatatagccagaggaaaaaaggatggagaaaaaactaagagagtgtcttctcggaaaaaaccatccttggagg

SEQ ID NO: 300033 - DNA, 489 bp, Artificial Sequence
  derived and/or modified sequence
atggaggacggcaagcgggagcggtggcccaccctgatggagcggctctgctccgacgggtttgcatttccacagtacccgatcaaaccctatcacttaaaaaggatacacagggctgtgctgcacggtaatctggaaaaacttaagtatctgctgttgacctattatgatgcaaataagagggacagaaaggagcggaccgctctgcacctggcatgcgctacaggccagcctgagatggtgcacctgttagttagtcggcgatgcgaactgaacctgtgtgaccgcgaggatcgcactccactcataaaggccgtgcagctgcgccaggaagcctgtgctacattgctgctgcaaaatggagccaatcctaacattaccgatttcttcgggcggacagccctccactatgcagtttataatgaagacacctctatgatcgagaagttgctcagccacggcacaaatatagaggagtgttcaaaatag

SEQ ID NO: 300034 - DNA, 1041 bp, Artificial Sequence
  derived and/or modified sequence
atggaggacggcaagcgggagcggtggcccaccctgatggagcggttgtgttcagacggatttgcttttcctcaatatcccatcaagccttatcacctaaagcgaatccatagggcagtgctccacggtaacttagaaaaactcaagtacctgctgctcacctattacgatgccaacaagagagatcgtaaggagcgcacggccctgcacttggcttgtgctacaggtcagcctgaaatggtacacctgctcgtgtcaagacgttgcgaacttaacttatgcgaccgagaggatcgaactcctttgatcaaggctgtgcagctgcggcaggaagcctgcgccacattacttctgcagaatggagctaatcccaatatcaccgatttttttggcaggactgctcttcattatgctgtatacaatgaggacacatccatgattgagaaattgcttagtcacggaacaaacattgaagagtgtagcaagtgcgagtaccagccactgctcttcgccgtgagccggcggaaagttaaaatggtcgagtttctcctgaagaaaaaagcaaacgtcaacgccattgactatctcggacggagcgcgctgattcacgcagtaaccctgggcgagaaagatattgtaatcttactcttgcagcacaacatcgacgtgctgagccgggatgcatttaggaaaatcgccggcgactacgccatcgaggccaagaatcgcgtgatctttgacttaatatatgagtatgagaggaagagatacgaggacctccctatcaattccaatccagtatcttcacagaaaccccctacactcaagggaacttccgacgaagaagactccgtcctgggtatcgcacgtgagaataaagatggggagaagtcacggaccgtcagctcggagaagccccctggcttaaaggcttccagcgctgaaaaggacagcgtgctgaacattgcacggggaaaaaaggatggcgaaaagacaaagagggtgtcttctcgcaaaaaacctagccttgaggcaacgtag

SEQ ID NO: 300035 - DNA, 930 bp, Artificial Sequence
  derived and/or modified sequence
atggaggacggcaagcgggagcggtggcccaccctgatggagcggctgtgcagcgacggctttgcgtttcctcagtaccctataaagccatatcaccttaagcggatccatcgggcggtgctccatggcaacttggaaaagctgaaatatctgctgctgacctattacgacgcaaacaaaagagaccgaaaggagagaaccgcccttcatcttgcctgtgctactggtcagccagagatggtgcacctgttagtgtctcggaggtgtgaactgaacctctgtgacagggaggatcgaactcctctgatcaaggccgtgcaattgcggcaggaagcttgcgcaaccttgctgttgcaaaacggggctaatcctaacatcacagacttcttcggccggacggctctccattacgctgtgtacaacgaagatacaagcatgattgagaagctgctctcccatggaaccaacatagaggaatgcagcaaatgtgaatatcagccgctgctgtttgccgtcagccgacgcaaggtgaagatggtcgagtttctgcttaaaaagaaggctaacgtaaatgcgatcgactatctgggcagaagcgcgctcatacatgccgtcacactaggcgaaaaagacatagtaattctgctgcttcagcacaatatcgatgttctttcgcgggatgcctttagaaagatcgctggcgattacgctatcgaggccaaaaatagagtaatctttgacttgatatacgagtacgaacgcaagaggtacgaggacctccctattaattctaaccctgtctcatcccagaagcaacccgcactggcaacagaacaggatagtatgagcaaaattaagaagcgaaagctcatcgtcatgaaaaagaaatcaatggtgattcagcggtttctcgtcaccttctgcaagtag

SEQ ID NO: 300036 - DNA, 489 bp, Artificial Sequence
  derived and/or modified sequence
atggaagacggtaagcgcgaacgctggcccaccctgatggaacggctatgcagcgacgggttcgccttcccccagtatcctataaaaccgtaccatctgaagagaatacatcgcgctgttctgcacggcaatctcgaaaagttaaaataccttctgctgacctattacgacgcgaacaagcgggaccgcaaagagcggacagcgctgcatctcgcttgtgccacgggtcagccagagatggtgcatctgctggtgagcagaagatgtgaattgaatctttgtgatagagaggatcggaccccactgataaaggcggtccagctcaggcaggaggcctgtgctactttgttattgcaaaatggtgccaaccccaatataactgacttcttcggacggacagcgctgcactacgctgtgtataatgaggatacttccatgatcgagaagctgctgtcacatggcaccaacatcgaagagtgctcgaagtag

SEQ ID NO: 300037 - DNA, 1041 bp, Artificial Sequence
  derived and/or modified sequence
atggaagatggtaagcgcgaacgctggcccaccctgatggagaggctatgcagcgatggctttgcttttccccaatatccaattaaaccttatcacttaaaacggatacaccgggctgttcttcatggaaatcttgaaaagctaaaatatctcttgcttacctattacgacgctaataaaagggatcgcaaggagcgtactgccttgcacctggcatgcgcaaccgggcagccagagatggttcaccttctggttagccggaggtgtgagctaaacttgtgcgaccgggaggataggacacctttaatcaaagccgtgcagttacgtcaggaagcttgcgcgacgcttttgctccagaacggcgctaatccgaacattacagatttttttgggagaacagctctgcactacgcggtgtacaatgaggacacctcaatgattgagaaactgttgagccacggtacaaacattgaagagtgctcaaaatgcgagtaccagcctctcctctttgctgtgagccgccgtaaggtgaaaatggtggaattcttgttgaaaaaaaaagcgaacgtgaacgccattgactatctggggagaagcgcgctcattcacgcagtcacactaggggaaaaggacattgtgattctcctgctccagcacaacattgacgtcctgagccgtgatgcttttcggaaaattgcaggggactatgcaatcgaagccaagaaccgcgtcatatttgatcttatttatgagtacgagaggaaaaggtatgaagatctgcctatcaatagtaatcccgtgtcatctcagaagcccccaacattgaagggaaccagtgacgaggaagattctgtgctcgggattgcccgagagaataaggacggagaaaagagcaggactgttagctccgagaaacccccaggtcttaaggccagcagcgcagaaaaggatagtgtcctgaacattgctagaggcaagaaagacggggaaaagaccaagcgtgtgagctcgcgcaaaaagccttctttggaggcaacctag

SEQ ID NO: 300038 - DNA, 930 bp, Artificial Sequence
  derived and/or modified sequence
atggaagatggtaaacgagaaagatggccaactctgatggaacggctctgttcagacggtttcgctttcccccagtacccaatcaagccctaccacctcaagcggatccatagagcagtgttgcatggcaatctggaaaaacttaaatatctgctcctaacatattatgatgctaataagcgcgacaggaaagagcggaccgccctgcacttagcctgtgctaccggacagcccgaaatggttcatctccttgtgtcccgccgttgcgaactcaatttatgcgaccgggaagatagaaccccactcatcaaggcagtccaactccgtcaggaagcctgcgcaacactcctgctccagaatggtgcgaacccaaacattacggatttcttcgggagaactgccctccactatgctgtgtacaatgaggacacctctatgatcgagaaactgctcagccacggcacaaatattgaagaatgttccaagtgtgaataccagcctctgttgttcgcagttagcagacgtaaagtgaagatggtggaatttctgcttaaaaagaaggcgaatgtgaacgctattgactacctggggcgttcagccctgatccacgctgtcacgttgggagaaaaagacatcgtcatccttctcctgcagcataatattgacgtacttagcagggacgccttccgtaagattgccggtgactatgccatcgaggccaagaatcgagtgattttcgacctgatatacgaatatgaacggaagcgatatgaagacttgccaataaactctaatcccgtgtcatcacaaaaacagccagctcttgcaacagagcaggacagcatgtcgaagatcaagaaacgcaagctgattgttatgaaaaagaagtcaatggtaatccagaggtttctcgtgactttctgcaaatag

SEQ ID NO: 300039 - protein, 725 aa, Artificial Sequence
  derived and/or modified sequence
MATYIHVSKTGAEGAVLDEAKNINKSLSALGNVISALAEGTKTHVPYRDSKMTRILQDSLGGNCRTTIVICCSPSVFNEAETKSTLMFGQRAKTIKNTVSVNLELTAEEWKKKYEKEKEKNKTLKNVIQHLEMELNRWRNGEAVPEDEQISAKDQKNLEPCDNTPIIDNIAPVVAGISTEEKEKYDEEISSLYRQLDDKDDEINQQSQLAEKLKQQMLDQDELLASTRRDYEKIQEELTRLQIENEAAKDEVKEVLQALEELAVNYDQKSQEVEDKTRANEQLTDELAQKTTTLTTTQRELSQLQELSNHQKKRATEILNLLLKDLGEIGGIIGTNDVKTLADVNGVIEEEFTMARLYISKMKSEVKSLVNRSKQLESAQMDSNRKMNASERELAACQLLISQHEAKIKSLTDYMQNMEQKRRQLEESQDSLSEELAKLRAQEKMHEVSFQDKEKEHLTRLQDAEEMKKALEQQMESHREAHQKQLSRLRDEIEEKQKIIDEIRDLNQKLQLEQEKLSSDYNKLKIEDQEREMKLEKLLLLNDKREQAREDLKGLEETVSRELQTLHNLRKLFVQDLTTRVKKSVELDNDDGGGSAAQKQKISFLENNLEQLTKVHKQLVRDNADLRCELPKLEKRLRATAERVKALESALKEAKENAMRDRKRYQQEVDRIKEAVRAKNMARRAHSAQIAKPIRPGHYPASSPTAVHAIRGGGGSSSNSTHYQK

SEQ ID NO: 300040 - DNA, 2178 bp, Artificial Sequence
  derived and/or modified sequence
atggccacctacatccacgtctcaaagacaggcgccgagggtgctgtactggatgaggcaaaaaacattaacaagtccctttcagcgctggggaacgtgatttctgccttagccgaaggaacaaagacccatgtgccctatagggactctaagatgacacggattctccaggacagtctgggaggaaactgccgcactaccattgtgatctgctgttcccctagtgtcttcaacgaggctgaaactaaatcaacactcatgttcggacagcgcgccaagacaattaaaaacaccgtgagtgtgaacttagagcttactgctgaggaatggaagaaaaaatacgagaaggagaaggagaaaaataaaactcttaagaatgtgatccaacacttggaaatggagctgaatagatggcggaacggtgaagctgtcccagaagatgagcagatctctgccaaagatcaaaagaacctggagccttgcgacaatacacctataatcgataacattgcccccgtcgtcgccggaatatccacggaggagaaagaaaagtacgacgaggaaatcagcagcctctacagacaactggatgacaaggatgacgagatcaaccagcaaagccagttggctgaaaagctgaagcaacagatgctggaccaagacgaattgcttgcttcaacccgtagggactacgaaaaaattcaggaggagctcacacgcctgcagattgaaaacgaggccgctaaggatgaggtgaaggaggtgctgcaagccctggaagaattggccgtcaactatgaccagaagtcacaggaagtggaggacaagactagagcgaatgaacagctcactgacgaactggctcagaaaactaccactctcacgactacccagcgcgagcttagccagcttcaagagctgagcaatcatcaaaaaaagagggccaccgagattctaaatctcctacttaaggatttaggcgagattggcgggattatcggtacaaatgatgtgaaaacactggccgacgtcaatggcgtcattgaggaggagttcactatggcacgcctctatatcagcaaaatgaaatccgaagtgaagtcactcgtcaacagatccaaacagctagaatccgctcagatggatagtaataggaagatgaacgcctcagaacgcgagctggccgcctgccagttactgatttcccagcatgaagctaaaattaagtctctgaccgactacatgcaaaatatggaacagaagaggagacaactggaggagtcacaggatagtctgtctgaggagctggcaaagctgcgggctcaggagaagatgcacgaggtgagcttccaggacaaggaaaaagaacacttaacccgtctccaagacgccgaagaaatgaagaaggctctcgagcaacagatggaatcgcatagagaggcccaccagaagcagctctcccgactaagagacgagatagaggaaaagcagaaaattattgacgagattcgcgatctcaaccaaaaactgcagctggagcaagagaagctctcttctgattataacaaactgaagatcgaggaccaagaaagagaaatgaagctcgaaaagctgctgctgcttaatgacaagagggagcaagcaagagaggatctcaaagggctcgaagagaccgtgagcagagagctgcagacccttcacaatctgcgaaaattgttcgtgcaagacctgacaaccagggtcaaaaaaagcgtggagcttgacaatgatgatggagggggcagtgccgcacagaagcagaagatctcttttttagaaaacaatctcgagcagttgacaaaggtccacaagcagctcgtgcgggacaatgccgacctgcgctgcgaactgcctaaactggagaagaggctgcgcgccactgccgagcgggtgaaagcactggagtccgctttgaaggaggctaaggagaacgccatgagggatcgtaagcggtaccagcaggaagtggatcggataaaggaggccgtgagagcaaaaaacatggctcgacgcgcacacagcgcacagatcgctaagccgatccggcccgggcactacccagcttcctcccccacagccgtacacgccattcgcggcggcggggggtcatcatccaacagtacgcattatcaaaaatag

SEQ ID NO: 300041 - DNA, 5867 bp, Artificial Sequence
  derived and/or modified sequence
atggccacttacatccacgtcagcaaaactggtgccgagggagctgttcttgacgaagctaaaaatatcaataagtctttgtctgctcttggaaatgtgatctctgctttggcagaagggacaaaaacacatgtgccataccgggacagcaagatgactcggattcttcaggactctttgggtgggaactgcagaaccaccatcgtcatttgctgttctccttctgtcttcaatgaggctgagaccaagtccacactgatgttcggacagagagctaagaccatcaagaatacagtctctgtgaacctagaactgacagcagaagaatggaagaagaaatatgaaaaagagaaagagaaaaacaagactttgaagaatgttatccagcatctggagatggagctaaacaggtggaggaatggagaagctgtgcctgaggatgaacagatcagtgccaaggaccagaagaacctggagccttgtgataacacccccatcatagacaatattgctcctgttgttgctggcatctctacagaggagaaagagaagtacgatgaggagatctccagtctctacagacaactggatgacaaggatgatgaaattaaccagcagagccagctggctgaaaagctgaagcaacagatgttggatcaggatgagcttttagcttccacaagaagagactatgagaagatacaggaggagctgacacgtctccagattgaaaatgaggcagccaaggatgaggtgaaagaagttctccaggccctggaggagctggctgtcaattatgaccagaaatcacaggaagtggaggataagacccgggccaatgagcagctgacagacgagctggcccagaaaacgactacattgacaaccacacagagagagctgagccagctacaagagcttagcaaccaccagaagaaaagggcaactgagatcctgaatttgctgttgaaagatctgggggagataggtggaattattggcaccaatgatgtgaaaactttggcagatgtgaatggagtcattgaggaggagtttaccatggcccgcctgtacatcagcaagatgaagtcagaggtcaagtccctggtgaaccgcagcaaacagctcgagagcgcccagatggactccaacaggaagatgaatgccagcgagcgggagctggcagcctgccagctgctcatctcccagcacgaagccaagatcaagtctctgacagactacatgcagaacatggaacagaagaggaggcagctagaagagtcccaggactcgctcagcgaagagctggcaaagctccgagcccaggaaaaaatgcacgaagtcagcttccaggataaggagaaggaacatctgacgcggttgcaggatgctgaagaaatgaagaaggcgctggagcagcagatggagagccaccgggaagctcaccagaagcagctgtccagactccgagacgaaattgaggagaagcagaaaatcattgatgagattcgggatttgaatcagaaactgcaactggaacaggagaagcttagttctgattataacaagctgaaaatagaggaccaagagagagaaatgaagctggaaaagctcttattgctcaacgataaaagggaacaagccagagaagacctcaaagggctggaggagacagtgtctagagaattgcagacactgcacaaccttcggaaactctttgtccaggatctgaccacccgagttaaaaaaagtgtggagttggacaacgatgatggagggggcagtgctgcccagaagcagaaaatttccttcttggagaataacctggagcagctcaccaaagttcacaagcagctggtccgggacaacgcagacctgcgctgtgaactgcccaagctggagaagcggctgcgtgccacggcggagcgcgtcaaggctctggagagcgcgctgaaggaggccaaggagaacgccatgcgggaccgtaagcgctaccagcaggaggtggatcgtatcaaggaggccgtgcgggccaagaacatggccagaagggcccattcagcccagatcgccaagcccatccgccccggacactacccggcctcatctccaacggccgtccatgccattcgagggggaggaggcagctcttcaaattccactcactaccagaaataaatacaaaatatgactccacgtagcatgtcaaggactacattaatcaccaattcctttatttttccccccctacagtttccattttttttttatacttgcttactccagccatctgcagtacaccagtttcaggtcttttgagctgtgtagagtttctgtgtgtacagatgtgtgctcggacttttctctttttgagaaatctgaaggagatggttgcagaagatccacttactactgagaaccattaccaccgactcggcctccggggtgttgggtggtttctgggtggttcctggagcctcctctgggcagtgcactgtcccatctgtacgccctaatgtgccattccctagaggggaacaaccaagtgccgtggaggcagatgatcatggtctgcctcaactgtctggtttcctgtaaaataaacacattgttttatatttttagggaacaaaaagtgctgctatagggttcaaagttttccttctgaacacttttccgaaacaaattaccccaaagacacattttgaatatcctggtcacatctttggatctgtaaaatataccttttagtatggcacctgttaaaatgcaaagcaaatttctttggggcagaaaaacaatctgacagtagcagtgtagaatttgttcattcaaatacatctgtgtaaatgcaaaaagtcataaaattcacctccgagctgcttgcttttgaacctgcagcaactagtcttagccggcccggtttgaacatcgttctttcagaagtgctgaaaatgctgcaaagttggataagtggaaatgtggctgcccctctcctcactacttcctctctgatcgttctgaagcttgcattgggaatggctgctttctctaaccattttcagcttgagtgggtattgctgaagaaatccaacatcattccagcagttgaaaaaggaagccttcgggagaaagtgcttgtcaaaattttgttctttgtgcttgtgtatgagtaagttgccatgaataagttattattttaacccataattggcgactgtttatatgaattctttctttggcaccaaataggtttcatcttcttaggcacaattagaaaaaatccacatagatggatattttacatttagttattgctttatccaaatacatgaatctaaagctgaatcaacccttacttccagttgtgcttattaagaagatcaatttccaagtagtaaagttttcagggaaactgactgtgctgctatttgttttgacaaatttgggggtaagtcaatgacaaccaaaccaatctcggtggaaactcctatcctatcatgttgtgtgcccaagatgagtgagctggcactgtgccctgaagctttcaccactgtaatgaaatatatgccaggggagactttgggcttttctcatgactgtgtgggtcgaaggtagctcaagtgtgtgtgtgtgtgtgtgtgtgtgtgtgtgtgtgtgtgtgtgtgtatgtgtgtaaagtgctaagaactgtgcattgacatccaaacatttcttgtacaaaatttccctagcaaagcaaacctgctttgacttaatttatttgttaaatgttgcactttgtttatgtatgttttgtttttggtggggaataaggagagagaggacgacaaattctattgaagtatttattttgtgaagatggcaattttgcatttgtttaaatttttttcattctttaattttgttatcagtgccagcccaatatacctgctctaccattatttgcggtctgataaaagggtccttgtggggcaggttttgcaaagcttatcaggtaataacatatgccacataaccttgttgatatgtttgcttctgatttgggaagctaaacattggtgtttgagaggattgccaattattaattgtcattaccactactctccattactttttgtttggaaattgaacaaaggtcagtaatggtttttggctcttgttaatatccatcataaaatagattgttttagattctttccagggtgatttttccctgggtaccccgtttctacttctaaagaattgcttggcactttcatgtttcaaagggaaacattcgcttgtagttccattttacttgatctctacaagggactgacaacatttgctttacttttattcacagagaaagttggctttgatgtctcttaaagataattctgctagttgctgatcagccagtcagttcacctagcttcaatctttataggacttctaatctaattttcctatagtgtgactaaaagggaggcaaattattggaacggattattcaaatggatccttaaatattgctatgtataataagccagttattatatcaggaccatgttctctgtaggccactttctaaaaaagccacatatgtgcaattttcaggtttttagactattgctccctgtactttaaatgtaaaaaccacacttctgaacaactaagctcatgaatatgattttggttatatgcagcttttgactagcatgtattgtgtctttttctcctctatgaataattttatatttcatgctacttcttgaaagtttactctttgatgctctaagagaacagccagatggtttatatgaataatctttatctgcaggatggtggattggtaaattaggagaatgttgtttgagatatcaagatttatgtctgggaactaaaatatataatgccaaatgtgtttttgtcaattactagagaattctgtgcaaacatatcatctcttcaaatgctgcacactttgcttttgttaaacagcaggtagtagacagaacaataacagtttcgcgttaagacttttaaaggaaatagaatcgtgattaagaaatcagaatttatagatatattgggataaatgaagaaataaaaatgtttgtctagaatgtagcatctagtgactttttaaagccctaacgtttacataaagaagctctagttcttatagaaataacaaagcaaataaaagttcttaacaatcccctctttcgaagtgcatttttttaaagcagggcaggagacatttggactctagctatatgacatactgggaaaggcagagggtggagggaagatttcacttcattgtctagcccagaatcttgagcaagctaaagaaaccatcataatctaaaattgcttcatttaacactaacaatttagactttttaaaccaagcattgaataatggctggataactgccgaagtaagcgccgctccatgaagtctgcttacttatttaaaaattgtgtatcagttttaaatactgttcattgtgtgcagatataaggggaatagggcattctgtagaattatacatgtctagtttgtaaagtgtgtcctgtgtactgcagatgtgtgttctctgggctttatgtatctgtacagtagctttcacattaaaaaaattgtggacaaacttgtccggggggtttgaggggagaatggtggtttatatcaataacgatgctgtactatagtccatgtaacaaaagatctggaagtcaccctcctctggcccacggaaaattttggtaatcttctaggttctaaaatgaagatgtatgggtactctggcagactgcatgttgtataatttgaaaaatactaaaagtggaaaataaaattgaattaaactttg

SEQ ID NO: 300042 - DNA, 2178 bp, Artificial Sequence
  derived and/or modified sequence
atggccacctacatccacgtgtccaagacaggagctgagggcgctgtgctggatgaggccaagaacatcaacaagagcctgagcgccctgggcaatgtcatcagcgccctggccgagggcaccaagacccacgtgccctacagagacagcaagatgacccgcatcctgcaggacagcctgggcggcaactgcaggaccaccatcgtcatctgctgcagccccagcgtcttcaatgaggccgagaccaagagcaccctgatgtttggccagagggccaagaccatcaagaacacagtgtctgtgaacctggagctgacagctgaggagtggaagaagaagtatgagaaggagaaggagaagaacaagaccctgaagaatgtcatccagcacctggagatggagctgaaccgctggagaaatggagaggccgtgcctgaagatgagcagatcagcgccaaggaccagaagaacctggagccctgtgacaacacccccatcatcgacaacatcgcccctgtggtggccggcatcagcacagaggagaaggagaagtatgatgaggagatcagcagcctgtaccggcagctggatgacaaggatgatgagatcaaccagcagagccagctggccgagaagctgaagcagcagatgctggaccaggatgagctgctggccagcacccggcgggactatgagaagatccaggaggagctgacccggctgcagattgaaaatgaagctgccaaggatgaggtgaaggaggtgctgcaggccctggaggagctggccgtgaactatgaccagaagagccaggaggtggaggacaagacccgggccaatgagcagctgacagatgagctggcccagaagaccaccaccctgaccaccacccagcgggagctgagccagctgcaggagctgagcaaccaccagaagaagagggccacagagatcctgaacctgctgctgaaggacctgggggagattggaggcatcatcggcaccaatgatgtgaagaccctggctgatgtgaatggagtcatcgaggaggagttcaccatggcccggctgtacatcagcaagatgaagtctgaggtgaagagcctggtgaacagaagcaagcagctggagagcgcccagatggacagcaacaggaagatgaatgccagcgagcgggagctggccgcctgccagctgctgatcagccagcacgaggccaagatcaagagcctgacagactacatgcagaacatggagcagaagaggcggcagctggaggagagccaggacagcctgtctgaggagctggccaagctgcgggcccaggagaagatgcatgaggtgtccttccaggacaaggagaaggagcacctgacccggctgcaggatgctgaggagatgaagaaggccctggagcagcagatggagagccaccgggaggcccaccagaagcagctgagccggctgagagatgaaattgaggagaagcagaagatcattgatgagatccgggacctgaaccagaagctgcagctggagcaggagaagctgagcagtgactacaacaagctgaagattgaggaccaggagcgggagatgaagctggagaagctgctgctgctgaatgacaagcgggagcaggcccgggaggacctgaagggcctggaggagaccgtgtcccgggagctgcagaccctgcacaacctgaggaagctgtttgtgcaggacctgaccaccagggtgaagaagtctgtggagctggacaatgatgatggcggcggcagcgctgcccagaagcagaagatctccttcctggagaacaacctggagcagctgaccaaggtgcacaagcagctggtgcgggacaatgctgacctgcgctgtgagctgcccaagctggagaagaggctgcgggccacagctgagcgggtgaaggccctggagagcgccctgaaggaggccaaggaaaatgccatgagggacaggaagcgctaccagcaggaggtggaccgcatcaaggaggccgtgcgggccaagaacatggcccggcgggcccacagcgcccagatcgccaagcccatccggcccggccactacccagccagcagccccacagctgtgcacgccatccggggcggcggcggcagcagcagcaacagcacccactaccagaagtag

SEQ ID NO: 300043 - DNA, 2178 bp, Artificial Sequence
  derived and/or modified sequence
atggccacctacatccacgtgagcaagaccggcgccgagggcgccgtcctcgacgaggccaagaatatcaacaaaagcctttcggccctcggcaatgtgatctcagcattagctgagggcacaaagacgcacgtcccctaccgagacagcaaaatgacacggatcttgcaagattctttgggcggtaattgtcggaccactatagtgatttgttgctccccttctgtgttcaatgaggcggagactaaaagcacgctgatgtttgggcagcgagccaagacaatcaaaaacaccgtgtccgtgaatctggagctgacagctgaggaatggaagaagaagtatgaaaaggagaaggagaaaaataagacgttgaagaacgtgatccagcacctggagatggagttaaatagatggaggaacggggaggctgtcccagaggacgaacagatctccgctaaggaccagaaaaacctcgagccatgcgacaataccccaatcattgacaatatcgcccctgtagtagccgggattagcacagaggagaaggaaaagtacgatgaggaaatcagcagcctttaccggcagctcgacgacaaagatgatgagattaatcagcagtctcagctcgccgagaagctgaagcaacagatgcttgaccaggatgaactgctggctagcactaggcgcgactatgagaaaatccaggaagagctgacccggctgcaaattgagaatgaagccgctaaagatgaggtgaaagaagtcctccaggcgctggaggagctggcagtgaactatgatcagaaatcgcaggaggtggaagataagactagggcaaacgaacagctgacagacgagttggctcagaaaactactaccctaaccactacacaaagggaactctctcagcttcaggagctctcaaatcatcagaagaagagggctactgaaatactaaacctattgctaaaagatctgggggaaatcggcggcataattgggaccaatgacgtcaaaaccctcgctgatgtcaacggggtaatcgaggaagaatttacgatggcccggctgtacatctcgaaaatgaaaagtgaggtaaagtcactcgtgaatagatccaagcagctcgagtcagcccagatggactcaaaccggaaaatgaacgcctccgagagagaactcgcggcctgtcaacttctgattagccagcatgaggccaaaatcaagtcattgacagattacatgcaaaatatggagcagaaacggcgacagctggaggagagtcaagattccctgagcgaggagctcgcaaaacttagagcccaagaaaagatgcatgaggtgtcattccaagataaagagaaagagcatctcaccaggctacaagatgctgaagaaatgaaaaaagccctggagcagcagatggagagtcatcgggaggcacatcaaaagcagttaagccggttaagggatgagatcgaggagaaacagaagatcatcgacgagatccgcgacctcaaccaaaagcttcagctggagcaggagaagttgtcttctgattacaacaaacttaaaatcgaggaccaggagcgagaaatgaaactggagaaactcctcttgttgaacgataagagggaacaagcgagagaggacctgaaaggactggaagagacagtgtccagagagctccaaactctccataatctgcgtaaactgtttgtgcaggacttgaccactcgcgtcaaaaagtcggtggaacttgacaacgacgacgggggaggatctgcagcgcagaagcagaagatttcattccttgagaataacctggaacagcttaccaaagtgcacaagcagctggtgcgggataacgccgatcttcggtgtgaactaccaaaactggaaaaacggctccgcgctactgctgaacgcgtcaaagcattggaatctgcactgaaggaagccaaggagaacgccatgagagaccgcaaacgctaccaacaagaggttgatcggattaaagaggcggtgagggctaagaatatggccaggcgagcccacagcgcccaaatcgcaaagcccattaggccagggcactacccggcatcctcccctaccgccgttcacgcaatcaggggaggcgggggatccagctctaattccacccactaccaaaagtag

SEQ ID NO: 300044 - DNA, 2178 bp, Artificial Sequence
  derived and/or modified sequence
atggccacctacatacatgtctcaaagaccggtgctgaaggagcggtgctggatgaggcaaagaacataaataagtccctgagcgctctaggcaacgtcatctccgcacttgccgaagggacaaaaacacatgtgccttatcgagactcaaaaatgacacgcattttacaggatagtctaggcggtaactgtagaacaactatcgtgatctgttgctcgccttcggtattcaacgaagcagagacgaaaagtaccttgatgtttggacagcgtgcgaaaactattaagaatactgtatcagtcaatttagaattaacggccgaggaatggaagaagaagtacgagaaagaaaaagaaaagaataagacgctcaagaacgtaatccagcacttggagatggaacttaatagatggagaaatggggaagcagtgcccgaggacgaacagatttcagcgaaggaccagaagaatctagagccttgcgataacaccccgatcatagacaatattgccccagtggtagccggaatctcaactgaggagaaagaaaaatacgacgaggagattagttctctgtaccgtcaactggatgataaggacgacgagattaatcagcaatctcaactcgccgagaagttgaagcaacagatgctcgatcaggatgagttgttggccagtactcgtcgtgactacgaaaagattcaggaggaactcacccggctgcaaattgaaaacgaggctgccaaggacgaggtgaaggaagtgctccaggctctggaagagctggccgttaattatgatcaaaagtcccaagaagtggaggacaaaacccgggcaaacgaacagctcacagacgaattggcacagaagacgaccaccctgaccactacacagcgagagctatctcagctgcaagagcttagcaaccaccagaaaaaacgggctactgagatcctgaacctcttgctgaaagacctgggagaaattggtggcataataggaacaaacgatgttaagactttagccgacgtaaacggcgtgatcgaagaggagttcaccatggccaggctttacatcagtaagatgaagagcgaggtgaaatctctcgtcaatagaagcaagcagctcgagtccgcgcagatggactcaaacagaaagatgaacgcaagtgaaagagagctcgccgcttgccagctgctaatctctcagcatgaagccaaaattaaaagcctgaccgactatatgcagaacatggagcagaagagaaggcagctggaggagtcccaggatagtctgagcgaagagctcgccaaacttagagcccaagaaaaaatgcacgaagtcagttttcaagataaggaaaaggaacaccttaccagactccaggatgcagaggaaatgaagaaggcactggagcagcagatggaaagccacagggaggcccaccaaaagcaattgtctcgcctgagagacgagatagaggagaagcagaaaattatagatgagatcagggatcttaaccaaaaattacagcttgagcaggagaaactgtctagtgactacaataaactgaaaatcgaagatcaggagagagaaatgaaattggaaaaactgcttttattaaacgataaacgggaacaggcacgggaggacctgaaaggactagaggagacagtctccagagaactgcagaccctccataatctcagaaagctttttgtacaggacctgacgacaagagtaaaaaaaagcgtggagttggataatgacgatggaggcggttccgccgcacaaaaacaaaaaatcagttttcttgaaaataatctggaacaactcacaaaagttcacaagcagctggtgcgcgataacgccgatttacggtgtgagcttccaaaacttgagaaaagactgcgggctaccgcagagcgcgtgaaggccctggagtccgccctaaaagaggctaaggagaacgctatgcgggatagaaaacggtatcagcaggaagtcgaccgtattaaagaagcagtcagagccaaaaatatggctagacgcgctcacagcgcccagatcgccaaacccatcaggcccggtcactaccctgccagttctccaacggccgttcatgccatacggggaggcggaggaagtagcagcaactcaacccactatcagaagtag

SEQ ID NO: 300045 - DNA, 2178 bp, Artificial Sequence
  derived and/or modified sequence
atggccacctacatccacgtgagcaagaccggcgccgagggcgccgtgctggacgaggccaagaacatcaacaagagcctgagcgccctgggcaacgtgatcagcgccctggccgagggcaccaagacccacgtgccctacagagacagcaagatgaccagaatcctgcaggacagcctgggcggcaactgcagaaccaccatcgtgatctgctgcagccccagcgtgttcaacgaggccgagaccaagagcaccctgatgttcggccagagagccaagaccatcaagaacaccgtgagcgtgaacctggagctgaccgccgaggagtggaagaagaagtacgagaaggagaaggagaagaacaagaccctgaagaacgtgatccagcacctggagatggagctgaacagatggagaaacggcgaggccgtgcccgaggacgagcagatcagcgccaaggaccagaagaacctggagccctgcgacaacacccccatcatcgacaacatcgcccccgtggtggccggcatcagcaccgaggagaaggagaagtacgacgaggagatcagcagcctgtacagacagctggacgacaaggacgacgagatcaaccagcagagccagctggccgagaagctgaagcagcagatgctggaccaggacgagctgctggccagcaccagaagagactacgagaagatccaggaggagctgaccagactgcagatcgagaacgaggccgccaaggacgaggtgaaggaggtgctgcaggccctggaggagctggccgtgaactacgaccagaagagccaggaggtggaggacaagaccagagccaacgagcagctgaccgacgagctggcccagaagaccaccaccctgaccaccacccagagagagctgagccagctgcaggagctgagcaaccaccagaagaagagagccaccgagatcctgaacctgctgctgaaggacctgggcgagatcggcggcatcatcggcaccaacgacgtgaagaccctggccgacgtgaacggcgtgatcgaggaggagttcaccatggccagactgtacatcagcaagatgaagagcgaggtgaagagcctggtgaacagaagcaagcagctggagagcgcccagatggacagcaacagaaagatgaacgccagcgagagagagctggccgcctgccagctgctgatcagccagcacgaggccaagatcaagagcctgaccgactacatgcagaacatggagcagaagagaagacagctggaggagagccaggacagcctgagcgaggagctggccaagctgagagcccaggagaagatgcacgaggtgagcttccaggacaaggagaaggagcacctgaccagactgcaggacgccgaggagatgaagaaggccctggagcagcagatggagagccacagagaggcccaccagaagcagctgagcagactgagagacgagatcgaggagaagcagaagatcatcgacgagatcagagacctgaaccagaagctgcagctggagcaggagaagctgagcagcgactacaacaagctgaagatcgaggaccaggagagagagatgaagctggagaagctgctgctgctgaacgacaagagagagcaggccagagaggacctgaagggcctggaggagaccgtgagcagagagctgcagaccctgcacaacctgagaaagctgttcgtgcaggacctgaccaccagagtgaagaagagcgtggagctggacaacgacgacggcggcggcagcgccgcccagaagcagaagatcagcttcctggagaacaacctggagcagctgaccaaggtgcacaagcagctggtgagagacaacgccgacctgagatgcgagctgcccaagctggagaagagactgagagccaccgccgagagagtgaaggccctggagagcgccctgaaggaggccaaggagaacgccatgagagacagaaagagataccagcaggaggtggacagaatcaaggaggccgtgagagccaagaacatggccagaagagcccacagcgcccagatcgccaagcccatcagacccggccactaccccgccagcagccccaccgccgtgcacgccatcagaggcggcggcggcagcagcagcaacagcacccactaccagaagtag

SEQ ID NO: 300046 - protein, 1021 aa, Artificial Sequence
  derived and/or modified sequence
MTLRLDAGGIPSLAPRVYISGSPSQRFLPRKRNKGESAGRDSLLAGSARFGSRGEAQLQGSELLSRNSGESLVRIRSCGQELITCLSRPETGGKFEVDTQRPVCPPSRARAARASAAAVAAAATLTPPTMDSFDLALLQEWDLESLWGEDILNQRNDSLVVEFQSSASRCRSVYEPDRNALRRKERERRNQETQQDDGTFNSSYSLFSEPYKTNKGDELSNRIQNTLGNYDEMKDFLTDRSNQSHLVGVPKPGVPQTPVNKIDEHFVADSRAQNQPSSICSTTTSTPAAVPVQQSKRGTMGWQKAGHPPSDGQQRATQQGSLRTLLGDGVGRQQPRAKQVCNVEVGLQTQERPPAMAAKHSSSGHCVQNFPPSLASKPSLVQQKPTAYVRPMDGQDQAPDESPKLKSSSETSVHCTSYRGVPASKPEPARAKAKLSKFSIPKQGEESRSGETNSCVEEIIREMTWLPPLSAIQAPGKVEPTKFPFPNKDSQLVSSGHNNPKKGDAEPESPDSGTSNTSMLEDDLKLSSDEEENEQAAQRTALRALSDSAVVQQPNCRTSVPSSKGSSSSSSSGSSSSSSDSESSSGSDSETESSSSESEGSKPPHFSSPEAEPASSNKWQLDKWLNKVNPHKPPILIQNESHGSESNQYYNPVKEDVQDCGKVPDVCQPSLREKEIKSTCKEEQRPRTANKAPGSKGVKQKSPPAAVAVAVSAAAPPPAVPCAPAENAPAPARRSAGKKPTRRTERTSAGDGANCHRPEEPAAADALGTSVVVPPEPTKTRPCGNNRASHRKELRSSVTCEKRRTRGLSRIVPKSKEFIETESSSSSSSSDSDLESEQEEYPLSKAQTVAASASSGNDQRLKEAAANGGSGPRAPVGSINARTTSDIAKELEEQFYTLVPFGRNELLSPLKDSDEIRSLWVKIDLTLLSRIPEHLPQEPGVLSAPATKDSESAPPSHTSDTPAEKALPKSKRKRKCDNEDDYREIKKSQGEKDSSSRLATSTSNTLSANHCNMNINSLSLP

SEQ ID NO: 300047 - protein, 1251 aa, Artificial Sequence
  derived and/or modified sequence
MDSFDLALLQEWDLESLWGEDILNQRNDSLVVEFQSSASRCRSVYEPDRNALRRKERERRNQETQQDDGTFNSSYSLFSEPYKTNKGDELSNRIQNTLGNYDEMKDFLTDRSNQSHLVGVPKPGVPQTPVNKIDEHFVADSRAQNQPSSICSTTTSTPAAVPVQQSKRGTMGWQKAGHPPSDGQQRATQQGSLRTLLGDGVGRQQPRAKQVCNVEVGLQTQERPPAMAAKHSSSGHCVQNFPPSLASKPSLVQQKPTAYVRPMDGQDQAPDESPKLKSSSETSVHCTSYRGVPASKPEPARAKAKLSKFSIPKQGEESRSGETNSCVEEIIREMTWLPPLSAIQAPGKVEPTKFPFPNKDSQLVSSGHNNPKKGDAEPESPDSGTSNTSMLEDDLKLSSDEEENEQQAAQRTALRALSDSAVVQQPNCRTSVPSSKGSSSSSSSGSSSSSSDSESSSGSDSETESSSSESEGSKPPHFSSPEAEPASSNKWQLDKWLNKVNPHKPPILIQNESHGSESNQYYNPVKEDVQDCGKVPDVCQPSLREKEIKSTCKEEQRPRTANKAPGSKGVKQKSPPAAVAVAVSAAAPPPAVPCAPAENAPAPARRSAGKKPTRRTERTSAGDGANCHRPEEPAAADALGTSVVVPPEPTKTRPCGNNRASHRKELRSSVTCEKRRTRGLSRIVPKSKEFIETESSSSSSSSDSDLESEQEEYPLSKAQTVAASASSGNDQRLKEAAANGGSGPRAPVGSINARTTSDIAKELEEQFYTLVPFGRNELLSPLKDSDEIRSLWVKIDLTLLSRIPEHLPQEPGVLSAPATKDSESAPPSHTSDTPAEKALPKSKRKRKCDNEDDYREIKKSQGEKDSSSRLATSTSNTLSANHCNMNINSVAIPINKNEKMLRSPISPLSDASKHKYTSEDLTSSSRPNGNSLFTSASSSKKPKADSQLQPHGGDLTKAAHNNSENIPLHKSRPQTKPWSPGSNGHRDCKRQKLVFDDMPRSADYFMQEAKRMKHKADAMVEKFGKALNYAEAALSFIECGNAMEQGPMESKSPYTMYSETVELIRYAMRLKTHSGPNATPEDKQLAALCYRCLALLYWRMFRLKRDHAVKYSKALIDYFKNSSKAAQAPSPWGASGKSTGTPSPMSPNPSPASSVGSQGSLSNASALSPSTIVSIPQRIHQMAANHVSITNSILHSYDYWEMADNLAKENREFFNDLDLLMGPVTLHSSMEHLVQYSQQGLHWLRNSAHLS

SEQ ID NO: 300048 - DNA, 54 bp, Artificial Sequence
  derived and/or modified sequence
atggatagcttcgatttagccctgctacaagaatgggacttagagagcctgtag

SEQ ID NO: 300049 - DNA, 3066 bp, Artificial Sequence
  derived and/or modified sequence
atgaccttgagactggatgcaggcggcatacccagcctcgccccaagggtttatatctccggctccccatctcaacgatttttgccccgcaagaggaacaaaggagaatccgcagggcgggactccctgctggccggtagcgcaaggtttggctccaggggagaagcccaactgcagggctccgagttgttatcccgcaattcaggagagtctctagtcagaatcagaagctgcgggcaggaacttattacctgcctatccaggcccgaaaccggtggaaagttcgaggtcgatacccaacggcccgtatgccctccctcgcgggcacgggctgcccgagcctccgcggccgccgtggccgccgccgccacactcacaccccccacaatggactcctttgacttggccctgcttcaggagtgggatctggaaagtctgtggggggaggatatactcaatcaacggaacgacagcctcgtggtggagttccagtcttccgcgtctaggtgccgctctgtgtatgaaccggatcggaacgcactgcgtagaaaagagcgcgaaagaagaaatcaagagacccagcaggacgacggcacctttaattcctcctactctttattttctgagccgtacaagaccaataaaggcgatgagctgagcaaccgcatccagaatacattgggaaattacgacgagatgaaggatttccttaccgaccgtagcaaccagtcacacctggtcggggtacctaaaccgggtgtgccacagacccccgtgaataaaatagacgagcacttcgtcgccgattcccgcgcccagaaccagcccagctccatttgtagcaccactacctccactcccgccgccgtacccgtgcaacaatcaaagcgaggcaccatggggtggcagaaggctggacaccccccatccgatggacagcaaagagctacgcagcagggttccctcaggaccctactcggcgacggggtgggccggcagcagcccagggcgaagcaggtctgcaatgtggaagtcggactgcagacgcaggaaaggcctccggccatggccgcgaagcactcatcctccggacactgtgtacagaatttcccgcctagcctggcttcaaaaccaagcctggtgcagcaaaaaccaaccgcctacgtacgaccaatggatggccaggaccaggccccagatgagtccccgaaactgaagtcttctagcgagaccagtgtgcactgcacctcctataggggtgtgccagccagcaaacctgaacccgctcgggctaaggcaaaattaagcaaattcagcatcccgaaacagggagaggaatctagatccggtgaaaccaattcatgtgtggaagaaatcattcgggaaatgacatggcttccgcctttgtcagccatccaagccccgggcaaggtggaaccgactaagtttccattcccgaacaaagattcacaattagtgtcttctggacacaacaaccccaaaaaaggcgacgcggagccggagagcccagactccggcacaagtaacacctctatgctggaagacgatctgaaactgagttcagatgaagaggaaaatgagcaggcggcacagaggacagcccttagagcactgagtgatagcgccgtggtacagcagcccaactgccggacaagtgtgccctccagcaaaggatcctcctccagttccagctccggcagctcatcatcatcaagtgattctgagtcaagtagcgggagcgacagtgagactgaatcctctagctcggagtccgagggttcgaaaccccctcatttttcatctcccgaggctgagccagcctctagcaacaaatggcagctggacaagtggctgaataaggtaaacccacataaaccacctatactgatacaaaatgagtcccacgggagcgaaagcaaccagtactacaaccccgtcaaagaggacgttcaagactgtggcaaagtgccagacgtgtgccaaccatcattacgcgagaaagagattaaaagtacttgcaaagaagagcagagaccccggaccgctaataaggctccaggttccaagggcgtgaaacagaagagcccccctgctgcggtggccgtggccgtctcagcagcggcacctcctcccgctgtaccctgtgctcctgctgagaatgctccagcccccgcaaggcgatctgccgggaaaaaaccaactcgccggactgagagaacatcagcgggcgatggggccaactgccatcgacccgaagaacctgcggccgctgacgccttaggtacttccgtggtcgtgccccccgagccaaccaagacccggccttgtggtaacaatagggcctctcaccgtaaagagctacgcagctcagtcacttgcgaaaaacgtcgtacacgtggcctgtctcggatagtgcccaagtccaaggaatttatcgaaacagagtcctcaagcagctcctcatcctcagacagtgatctggagtctgagcaggaggaataccctctatcaaaagctcagaccgtggctgcgagtgcctcctccgggaacgatcagagattaaaggaggcagctgcgaatggcggtagtggtccgcgggcacctgtcggatccatcaatgcacgtacaacatctgatattgccaaagagctggaagaacagttttacacactggtccctttcggccgaaatgaactgctgtcaccacttaaagactcagacgaaatcagaagtctgtgggtcaaaattgatctgaccctgctgagtcgcatacccgagcacctaccccaggagccgggtgtccttagtgctccggccacaaaggacagcgaatctgcgcccccatcacatacatcagatactcctgcagagaaagccctgccaaagtctaaacgcaaaaggaagtgtgacaatgaggatgattatagggaaatcaaaaagtcacagggggagaaggactcaagcagccggctcgctacaagcactagcaataccctgtcggctaaccactgtaacatgaacataaactcactgagtcttccctag

SEQ ID NO: 300050 - DNA, 54 bp, Artificial Sequence
  derived and/or modified sequence
atggacagctttgacctggccctgctgcaggagtgggacctggagagcctgtag

SEQ ID NO: 300051 - DNA, 3066 bp, Artificial Sequence
  derived and/or modified sequence
atgaccctgcggctggatgctgggggcatccccagcctggccccccgggtgtacatcagcggcagccccagccagcgcttcctgcccaggaagaggaacaagggggagagcgctggccgggacagcctgctggccggcagcgcccgcttcggcagcagaggagaggcccagctgcagggcagcgagctgctgagcaggaacagcggggagagcctggtgcgcatccgcagctgtggccaggagctgatcacctgcctgagcaggcctgagactggaggcaagtttgaggtggacacccagaggcctgtgtgcccccccagccgggcccgggccgcccgggccagcgctgctgctgtggccgccgccgccaccctgaccccacccaccatggacagctttgacctggccctgctgcaggagtgggacctggagagcctgtggggcgaggacatcctgaaccagagaaatgacagcctggtggtggagttccagagcagcgccagccgctgccgctctgtgtatgagccagacagaaatgccctgcggaggaaggagcgggagaggaggaaccaggagacccagcaggatgatggcaccttcaacagcagctacagcctcttcagcgagccctacaagaccaacaagggagatgagctgagcaaccgcatccagaacaccctgggcaactatgatgagatgaaggacttcctgacagacaggagcaaccagagccacctggtgggcgtgcccaagccaggagtgccccagacccctgtgaacaagattgatgagcactttgtggccgacagccgggcccagaaccagcccagcagcatctgcagcaccaccaccagcaccccagctgctgtgcctgtgcagcagagcaagaggggcaccatgggctggcagaaggccggccaccccccatctgatggccagcagagggccacccagcagggcagcctgcggaccctgctgggagatggagtgggccggcagcagccccgggccaagcaggtgtgcaatgtggaggtgggcctgcagacccaggagcggcccccagccatggccgccaagcacagcagcagcggccactgtgtgcagaacttcccccccagcctggccagcaagcccagcctggtgcagcagaagcccacagcctacgtgcggcccatggatggccaggaccaggccccagatgagagccccaagctgaagagcagcagcgagacctctgtgcactgcaccagctaccggggcgtgcctgccagcaagccagagcccgcccgggccaaggccaagctgagcaagttcagcatccccaagcagggcgaggagagccgctctggagagaccaacagctgtgtggaggagatcatccgggagatgacctggctgccccccctgagcgccatccaggcccctgggaaggtggagcccaccaagttccccttccccaacaaggacagccagctggtgagcagcggccacaacaaccccaagaagggagatgctgagcctgagagcccagacagcggcaccagcaacacctccatgctggaggatgacctgaagctgagcagtgatgaggaggagaatgagcaggccgcccagaggacagccctgcgggccctgagtgacagcgctgtggtgcagcagcccaactgcaggacctctgtgcccagcagcaagggcagcagcagcagcagcagcagcggcagcagcagcagcagcagtgacagcgagagcagcagcggcagtgacagcgagacagagagcagcagcagcgagagcgagggcagcaagccaccccacttcagcagccctgaggccgagcccgccagcagcaacaagtggcagctggacaagtggctgaacaaggtgaacccccacaagccacccatcctgatccagaatgaaagccacggcagcgagagcaaccagtactacaaccctgtgaaggaggatgtgcaggactgtgggaaggtgcctgatgtgtgccagcccagcctgcgggagaaggagatcaagagcacctgcaaggaggagcagaggcccaggacagccaacaaggcccctggcagcaagggcgtgaagcagaagagccccccagctgctgtggccgtggccgtgtctgctgctgcccctcctcctgctgtgccctgtgccccagcagaaaatgccccagccccagccaggagatctgctgggaagaagcccaccaggagaacagagaggaccagcgctggagatggagccaactgccacaggcctgaggagcctgctgctgctgatgccctgggcacctctgtggtggtgcccccagagcccaccaagacccggccctgtggcaacaacagagccagccacaggaaggagctgcggagctctgtgacctgtgagaagaggaggacccggggcctgagcagaattgtgcccaagagcaaggagttcattgaaacagagagcagcagcagcagcagcagcagtgacagcgacctggagagcgagcaggaggagtaccccctgagcaaggcccagacagtggccgccagcgccagcagtggaaatgaccagaggctgaaggaggccgccgccaatggaggcagcggcccccgggcccctgtgggcagcatcaatgcccggaccaccagtgacatcgccaaggagctggaggagcagttctacaccctggtgccctttggaagaaatgagctgctgagccccctgaaggacagtgatgagatccgcagcctgtgggtgaagattgacctgaccctgctgagccgcatccctgagcacctgccccaggagcccggggtgctgagcgccccagccaccaaggacagcgagagcgccccacccagccacaccagtgacaccccagctgagaaggccctgcccaagagcaagaggaagaggaaatgtgacaatgaagatgactaccgggagatcaagaagagccagggcgagaaggacagcagcagccggctggccaccagcaccagcaacaccctgagcgccaaccactgcaacatgaacatcaacagcctgagcctgccctag

SEQ ID NO: 300052 - DNA, 8135 bp, Artificial Sequence
  derived and/or modified sequence
cgccagcgagaagagagctccacgctcagcctcagaagaaagacgttcaacgacttactggggagagaaagaaaaggaacgggagctgagagctgatcacctgcctttccagaccggagacgggcggcaagtttgaagtcgacacccagaggccagtttgtcccccttcccgcgcgcgggcggcccgagcctcggcggcggcggtagcggcggcggcgacgctgacacctcccaccatggacagcttcgacttagccctgctccaggaatgggacctcgagtcactgtgtgtctatgaaccagatagaaatgcattacggaggaaagaacgagaaagaagaaatcaagaaactcaacaggatgatggcacgtttaattctagttactctctcttcagtgagccctacaagactaacaagggggatgaactctccaaccggatccagaacactttaggcaattatgatgaaatgaaagactttttaactgatagatccaatcagagtcatctcgttggagttcccaaacctggggttcctcagactcctgtgaacaagatcgatgaacattttgttgcagattcaagagcccagaaccagccctcgtctatctgtagcactacaacttccacaccagcagctgtccccgtgcagcagagtaagagaggcactatgggctggcagaaggctgggcacccaccctctgacggccaacagagagcaacacaacagggctctctcaggaccttgcttggagatggtgttggcagacagcagcctcgggccaaacaagtgtgcaatgtggaggtgggccttcagacccaggagaggccacctgccatggcggccaagcacagcagcagcggacactgtgttcagaactttcctccatccctagcttcaaaacccagcctggtccagcagaaaccgaccgcgtatgtgaggccaatggacggccaagatcaggcccctgatgagtctcctaagctgaagtcgtcttcggaaaccagcgtgcactgcacatcatacaggggagtccctgccagcaagccggagcctgccagagccaaggccaagctctccaagttcagcatccccaagcagggggaggagagtagatctggagaaaccaacagctgtgttgaagaaataatccgggagatgacctggcttccaccactttctgctattcaagcacctggcaaagtggaaccaaccaaatttccatttccaaataaggactctcagcttgtatcctctggacacaataatccaaagaaaggtgatgcagagccagagagtccagacagtggcacatcgaatacatcaatgctggaagatgaccttaagctaagcagtgatgaagaggagaatgaacagcaggcagctcagagaacggctctccgcgctctctctgacagcgccgtggtccagcagcccaactgcagaacctcggtgccttccagcaagggcagcagcagcagcagcagcagcggcagcagcagctcctccagcgactcagagagcagctccggatctgactcggagaccgagagcagctccagcgagagtgagggcagcaagcccccccacttctccagccccgaggctgaaccggcatcctctaacaagtggcagctggataaatggctaaacaaagttaatccccacaagcctcctattctgatccaaaatgaaagccacgggtcagagagcaatcagtactacaacccggtgaaagaggacgtccaggactgtgggaaagtccccgacgtttgccagcccagcctgagagagaaggagatcaagagcacttgcaaggaggagcaaaggccaaggacagccaacaaggcccctgggagtaaaggcgtgaagcagaagtccccgcccgcggccgtggccgtggcggtgagcgcagccgccccgccacccgcagtgccctgtgcgcccgcggagaacgcgcccgcgcctgcccggaggtccgcgggcaagaagcccaccaggcgcaccgagaggacctcagccggggacggcgccaactgccaccggcccgaggagcccgcggccgcggacgcgctggggacgagcgtggtggtccccccggagcccaccaaaaccaggccctgtggcaacaacagagcgagccaccgcaaggagctgcgctcctccgtgacctgcgagaagcgccgcacgcgggggctaagcaggatcgtccccaaatccaaggagttcattgagacagagtcgtcatcttcatcctcctcctcggactccgacctggagtccgagcaggaggagtaccctctgtccaaagcacagaccgtggctgcctctgcctcctccgggaatgatcagaggctgaaggaggccgctgccaacgggggcagtggtcctagggcccctgtaggctccatcaacgccaggaccaccagtgacatcgccaaggagctggaggagcagttctacacactggtcccctttggccggaacgaacttctctcccctctaaaggacagtgatgagatcaggtctctctgggtcaaaatcgacctgaccctcctgtccaggatcccagaacacctgccccaggagccaggggtattgagcgcccctgccaccaaggactctgagagcgcaccgcccagccacacctcggacacacctgcagaaaaggctttgccaaaatccaagaggaaacgcaagtgtgacaacgaagacgactacagggagatcaagaagtcccagggagagaaagacagctcttcaagactggccacctccaccagtaatactttgtctgcaaaccactgcaacatgaacatcaacagtgtggcaataccaataaataaaaatgaaaaaatgcttcggtcgcccatctcacccctctctgatgcatctaaacacaaatacaccagcgaggacttaacttcttccagccgacctaatggcaacagtttgtttacttcagcctcttccagcaaaaagcctaaggccgacagccagctgcagcctcacggcggagacctcacgaaagcagctcacaacaattctgaaaacattcccctccacaagtcacggccgcagacgaagccgtggtctccaggctccaacggccacagggactgcaagaggcagaaacttgtcttcgatgatatgcctcgcagtgccgattattttatgcaagaagctaaacgaatgaagcataaagcagatgcaatggtggaaaagtttggaaaggctttgaactatgctgaagcagcattgtcgtttatcgagtgtggaaatgcaatggaacaaggccccatggaatccaaatctccttatacgatgtattcagaaacagtagagctcatcaggtatgctatgagactaaaaacccactcaggccccaatgccacaccagaagacaaacaactggctgcattatgttaccgatgcctggccctcctgtactggcggatgtttcgactcaaaagggaccacgctgtaaagtattcaaaagcactaatcgactatttcaagaactcatctaaagccgcccaagccccatctccgtggggggccagtggaaagagcactggaaccccatcccccatgtctcccaacccctctcccgccagctccgtggggtctcagggcagcctctccaacgccagcgccctgtccccgtcgaccatcgtcagcatcccacagcgcatccaccagatggcggccaaccacgtcagcatcaccaacagcatcctgcacagctacgactactgggagatggccgacaacctggccaaggaaaaccgagaattcttcaacgacctggatctgctcatggggccggtcaccctgcacagcagcatggagcacctggtccagtactcccaacagggcctgcactggctgcggaacagcgcccacctgtcatagggacctcaccctggggccagagtgggctctggtctccacagatggctcaacgtttttggacactgtgctactgaaactcccagccacagcatttatcagactgcggtgaacatttcctcagcattgaacaatgatcttttgcagggcatgtgtgtttgtatgtgtgggtatataagaagccgcctgtgtatgtgtgtaagatacacagctcttcagaacacaccttctttgtctagtttccataatcccaggctagacaaagtgatcagaggtttctgactagaggaagtacacacacacacacacacacacacacacaccgtacactcacacacaatcacagacacacactttctattccattccagtgctaaaccgtgacttcttagaaaattcaaccaaaatctcatgggttagttaaccaggtgcaatacagcacaccaaaagcttgactgccagtgaagatggacctgctcttatactgttgattactttcagtattaatatactattccccaattattttttgattggtatgtattaatgggtaattgaataatgaaaataagccaggtatttttgtgccggaagtttactagattgcatgttaccaaataccctgctcttcctctaattcccttcccccatctgactctattatcaactaaatgcattccaggcaaacagatggacactcacagcccttcccagccccacctccaagtagtatgcaaatggcactgagatttagcaaaaacgcggcgtctttgaaagttaacagacactaaggtagcagtgcctgtgtgttggagctcagttaggagttgaagttttctgcacctgtgataacaagcccaccagccacatgcatttcttcttcctgccactgtgactcggtggctgtagagccacatggcatttgtcagccaatctgtttcaagtcttttctttccaccaatagctttcttacagattttcttggctaaatgaggccattacctagattgtcccttcagtaggagcctgaatccttcgcttaccaggctgagagctatttgccatgataatgctgattctctcactcctcatgcagaatgtgcacctgcagccctttgatgcgttttgatttgggggcgatttttcaggctttgattagcaggctgcttgcaatgcagaagatcacagttcctttctggggcagcagcaaccagagcctcttcctgtgtcctgtgtgtctggtatgtttacaccttgctctgagtttttctcttgttttctttttttaattaagtttacattttagtttctttgacatcttgtttacagtttttgtctgatgttttttcttttgtagtgtcttatgccctagatttagtcatcttgttaaatatatttggatatgaaatcttgacgaaaagaaaataactcctgaaaaagagggtctatcttgccacacgttaaaaacaaaaataatgtccttgtggcctcttacttgataaagttgcaccaggacggtctgagaaaggcaggcggtgtaatatgtggtgcaatccattttttcaaggtgatgacggcacaaaatacttagactagatgctgatccataaacattcactgatattcttacaggttggtttgcagtgttaacatttttgttagcctgatctgtaggtgggaagtaagatcatcataattccttagctctgagcactgattcaaaattgtataaatgactgaacaacttagatgatttgaaattaattgaaaataagaagggcttgtggaatttgcatttggctttggccttcaagcatttggaaatattaagagaatttccattttacatgtctccaactggggtgcttcttacaaccctttcactttttttttgagacgagtttcgctctgttgcccaggctggagtgcagtggcacgatctcggctcactgcatcctctgcctcctgggttcaagtgattgtcccgcctcagcctcccaagtagctgggattacaggtgtgcactaccatgcccagctaatttttgtgtttttagtagagactgggtttcaccatgttggccaggctcgtctcaaactcctgacctcaggtgatctacccgcctccacctcccaaagtgttgtgattacaggcgtgagccaccacacccagccctttcactaatttttggcagagttcacaatcccatcctatgtcagaaacttgaacctaacttaagaaattttgagtcatttttttggaggactgaggctttgttctacctactcttgaagaatcctgatgaaatattcaaacacataaagggatggccctggaggtctatcctgcatacctggagagcttctctggtcctgcccaccttgaaagttgcagactttgttgtaacatctatgtgatgagcttccctgtgaagccccatttgacaggtgggccagcagtgttttatcagcactctgatggcccacatttcccaggaaaacttcttgaaacttaccgttgtgggcagtggtcagagcgtgtagttcttatgactgtcttgtttcatctgtggagcacgtgtggagcacgttggtacagcagtttctgtggggtttggcatgggtgattttggttagtaaccatcctccaattgttgcttgtgaaagtcattcataacttgttccttttacttagttttgttgttactgctgttgttgttggtttggttggttttgagaccgggtctggctctgtagcccaagctggaatgcggtggcgcgatcatggctccctgcagcctcaaactcctgggctcaagcaatcctcctgcctcagcctcccaagcagctgggaagataggcacgtgccaccacacccggctaattttttctttattttttttgtagagatgggggtctcactatgttgcccaggctggtctcaaactcctgggctcaagcgatcctttggcctcggcctcccaaagtgcatgagccaccatgcctggcctgtttagttttgtttcaagttgaaatacctttcttgtgttttctaattagaaaagtaatatctactcattgtaaaaactcaaacagtgcagaaatgtagaaagtagaaagtgtaagtccctggttgtcccttctgcctgagacaaccactgctcacagtttgatgtatatccttccagagactctcaaatttaagcaaataatttttattaccatgtctttttatttgaagacgtacatttgcctccaaagttcaacacaagttcaactgaccatatccttccatgacctgaatagatgctatcctttatcacgatgttcaattgcctttgaaagagagtagtccaggtatattcctgatcaaaatttggcatttttgatgatactactctacacagatcagactcatgtgcagaatcgtgcctggagagagaggtttggttaagacagagatttctggaaacattcaaattgcaaatggaaacttgaaacccacaatctaatgaggaatgtactggaaaaataatctgaagagttgacaaattgtgtactagattgaacacatggaatgcaatgcaatgagactttctgcactaaaacttatcctcatatgtacaacaatgatgtgtgtattatataacagtgatgtgtacatttctgacaccccatacataatatacacagtttgtataaatgcatacatttaaaaatatatatgtacaatacagctaacataaaactgtagtacgcctgaaggatattactagtgcctaatattgagtatgagtcactgcgtgttcgcatcaacttggaagtgcagtaattgttataaaattaatcagtgcagccaacattatttatgaatcacatctttgaaactgtgcagtagcatatacatatatatttttaaataacatttttcacagttttccagagttactgttgaaatctgcatcaccaaaaaaaaaaaaaagcaagatttttttaacaatgtagacactcttcagacccagtaatctgcgtgtgatttcctatttgtagattcccaagagactttagcagtcaccagccttaatgcatgtacaggatattattgtgacttaatttatctgcagtttttaatccatgtgaaattggaatttataaacggacttggattaaacatgtctgcctttctaaggttgcaaatgttacattaaatgatttatgttgt

SEQ ID NO: 300053 - DNA, 8118 bp, Artificial Sequence
  derived and/or modified sequence
ctgatcacctgcctttccagaccggagacgggcggcaagtttgaagtcgacacccagaggccagtttgtcccccttcccgcgcgcgggcggcccgagcctcggcggcggcggtagcggcggcggcgacgctgacacctcccaccatggacagcttcgacttagccctgctccaggaatgggacctcgagtcactgtggggtgaagacatcttaaaccagaggaatgactctctagttgtggaatttcagtcatcagccagcagatgcaggagtgtctatgaaccagatagaaatgcattacggaggaaagaacgagaaagaagaaatcaagaaactcaacaggatgatggcacgtttaattctagttactctctcttcagtgagccctacaagactaacaagggggatgaactctccaaccggatccagaacactttaggcaattatgatgaaatgaaagactttttaactgatagatccaatcagagtcatctcgttggagttcccaaacctggggttcctcagactcctgtgaacaagatcgatgaacattttgttgcagattcaagagcccagaaccagccctcgtctatctgtagcactacaacttccacaccagcagctgtccccgtgcagcagagtaagagaggcactatgggctggcagaaggctgggcacccaccctctgacggccaacagagagcaacacaacagggctctctcaggaccttgcttggagatggtgttggcagacagcagcctcgggccaaacaagtgtgcaatgtggaggtgggccttcagacccaggagaggccacctgccatggcggccaagcacagcagcagcggacactgtgttcagaactttcctccatccctagcttcaaaacccagcctggtccagcagaaaccgaccgcgtatgtgaggccaatggacggccaagatcaggcccctgatgagtctcctaagctgaagtcgtcttcggaaaccagcgtgcactgcacatcatacaggggagtccctgccagcaagccggagcctgccagagccaaggccaagctctccaagttcagcatccccaagcagggggaggagagtagatctggagaaaccaacagctgtgttgaagaaataatccgggagatgacctggcttccaccactttctgctattcaagcacctggcaaagtggaaccaaccaaatttccatttccaaataaggactctcagcttgtatcctctggacacaataatccaaagaaaggtgatgcagagccagagagtccagacagtggcacatcgaatacatcaatgctggaagatgaccttaagctaagcagtgatgaagaggagaatgaacagcaggcagctcagagaacggctctccgcgctctctctgacagcgccgtggtccagcagcccaactgcagaacctcggtgccttccagcaagggcagcagcagcagcagcagcagcggcagcagcagctcctccagcgactcagagagcagctccggatctgactcggagaccgagagcagctccagcgagagtgagggcagcaagcccccccacttctccagccccgaggctgaaccggcatcctctaacaagtggcagctggataaatggctaaacaaagttaatccccacaagcctcctattctgatccaaaatgaaagccacgggtcagagagcaatcagtactacaacccggtgaaagaggacgtccaggactgtgggaaagtccccgacgtttgccagcccagcctgagagagaaggagatcaagagcacttgcaaggaggagcaaaggccaaggacagccaacaaggcccctgggagtaaaggcgtgaagcagaagtccccgcccgcggccgtggccgtggcggtgagcgcagccgccccgccacccgcagtgccctgtgcgcccgcggagaacgcgcccgcgcctgcccggaggtccgcgggcaagaagcccaccaggcgcaccgagaggacctcagccggggacggcgccaactgccaccggcccgaggagcccgcggccgcggacgcgctggggacgagcgtggtggtccccccggagcccaccaaaaccaggccctgtggcaacaacagagcgagccaccgcaaggagctgcgctcctccgtgacctgcgagaagcgccgcacgcgggggctaagcaggatcgtccccaaatccaaggagttcattgagacagagtcgtcatcttcatcctcctcctcggactccgacctggagtccgagcaggaggagtaccctctgtccaaagcacagaccgtggctgcctctgcctcctccgggaatgatcagaggctgaaggaggccgctgccaacgggggcagtggtcctagggcccctgtaggctccatcaacgccaggaccaccagtgacatcgccaaggagctggaggagcagttctacacactggtcccctttggccggaacgaacttctctcccctctaaaggacagtgatgagatcaggtctctctgggtcaaaatcgacctgaccctcctgtccaggatcccagaacacctgccccaggagccaggggtattgagcgcccctgccaccaaggactctgagagcgcaccgcccagccacacctcggacacacctgcagaaaaggctttgccaaaatccaagaggaaacgcaagtgtgacaacgaagacgactacagggagatcaagaagtcccagggagagaaagacagctcttcaagactggccacctccaccagtaatactttgtctgcaaaccactgcaacatgaacatcaacagtgtggcaataccaataaataaaaatgaaaaaatgcttcggtcgcccatctcacccctctctgatgcatctaaacacaaatacaccagcgaggacttaacttcttccagccgacctaatggcaacagtttgtttacttcagcctcttccagcaaaaagcctaaggccgacagccagctgcagcctcacggcggagacctcacgaaagcagctcacaacaattctgaaaacattcccctccacaagtcacggccgcagacgaagccgtggtctccaggctccaacggccacagggactgcaagaggcagaaacttgtcttcgatgatatgcctcgcagtgccgattattttatgcaagaagctaaacgaatgaagcataaagcagatgcaatggtggaaaagtttggaaaggctttgaactatgctgaagcagcattgtcgtttatcgagtgtggaaatgcaatggaacaaggccccatggaatccaaatctccttatacgatgtattcagaaacagtagagctcatcaggtatgctatgagactaaaaacccactcaggccccaatgccacaccagaagacaaacaactggctgcattatgttaccgatgcctggccctcctgtactggcggatgtttcgactcaaaagggaccacgctgtaaagtattcaaaagcactaatcgactatttcaagaactcatctaaagccgcccaagccccatctccgtggggggccagtggaaagagcactggaaccccatcccccatgtctcccaacccctctcccgccagctccgtggggtctcagggcagcctctccaacgccagcgccctgtccccgtcgaccatcgtcagcatcccacagcgcatccaccagatggcggccaaccacgtcagcatcaccaacagcatcctgcacagctacgactactgggagatggccgacaacctggccaaggaaaaccgagaattcttcaacgacctggatctgctcatggggccggtcaccctgcacagcagcatggagcacctggtccagtactcccaacagggcctgcactggctgcggaacagcgcccacctgtcatagggacctcaccctggggccagagtgggctctggtctccacagatggctcaacgtttttggacactgtgctactgaaactcccagccacagcatttatcagactgcggtgaacatttcctcagcattgaacaatgatcttttgcagggcatgtgtgtttgtatgtgtgggtatataagaagccgcctgtgtatgtgtgtaagatacacagctcttcagaacacaccttctttgtctagtttccataatcccaggctagacaaagtgatcagaggtttctgactagaggaagtacacacacacacacacacacacacacacaccgtacactcacacacaatcacagacacacactttctattccattccagtgctaaaccgtgacttcttagaaaattcaaccaaaatctcatgggttagttaaccaggtgcaatacagcacaccaaaagcttgactgccagtgaagatggacctgctcttatactgttgattactttcagtattaatatactattccccaattattttttgattggtatgtattaatgggtaattgaataatgaaaataagccaggtatttttgtgccggaagtttactagattgcatgttaccaaataccctgctcttcctctaattcccttcccccatctgactctattatcaactaaatgcattccaggcaaacagatggacactcacagcccttcccagccccacctccaagtagtatgcaaatggcactgagatttagcaaaaacgcggcgtctttgaaagttaacagacactaaggtagcagtgcctgtgtgttggagctcagttaggagttgaagttttctgcacctgtgataacaagcccaccagccacatgcatttcttcttcctgccactgtgactcggtggctgtagagccacatggcatttgtcagccaatctgtttcaagtcttttctttccaccaatagctttcttacagattttcttggctaaatgaggccattacctagattgtcccttcagtaggagcctgaatccttcgcttaccaggctgagagctatttgccatgataatgctgattctctcactcctcatgcagaatgtgcacctgcagccctttgatgcgttttgatttgggggcgatttttcaggctttgattagcaggctgcttgcaatgcagaagatcacagttcctttctggggcagcagcaaccagagcctcttcctgtgtcctgtgtgtctggtatgtttacaccttgctctgagtttttctcttgttttctttttttaattaagtttacattttagtttctttgacatcttgtttacagtttttgtctgatgttttttcttttgtagtgtcttatgccctagatttagtcatcttgttaaatatatttggatatgaaatcttgacgaaaagaaaataactcctgaaaaagagggtctatcttgccacacgttaaaaacaaaaataatgtccttgtggcctcttacttgataaagttgcaccaggacggtctgagaaaggcaggcggtgtaatatgtggtgcaatccattttttcaaggtgatgacggcacaaaatacttagactagatgctgatccataaacattcactgatattcttacaggttggtttgcagtgttaacatttttgttagcctgatctgtaggtgggaagtaagatcatcataattccttagctctgagcactgattcaaaattgtataaatgactgaacaacttagatgatttgaaattaattgaaaataagaagggcttgtggaatttgcatttggctttggccttcaagcatttggaaatattaagagaatttccattttacatgtctccaactggggtgcttcttacaaccctttcactttttttttgagacgagtttcgctctgttgcccaggctggagtgcagtggcacgatctcggctcactgcatcctctgcctcctgggttcaagtgattgtcccgcctcagcctcccaagtagctgggattacaggtgtgcactaccatgcccagctaatttttgtgtttttagtagagactgggtttcaccatgttggccaggctcgtctcaaactcctgacctcaggtgatctacccgcctccacctcccaaagtgttgtgattacaggcgtgagccaccacacccagccctttcactaatttttggcagagttcacaatcccatcctatgtcagaaacttgaacctaacttaagaaattttgagtcatttttttggaggactgaggctttgttctacctactcttgaagaatcctgatgaaatattcaaacacataaagggatggccctggaggtctatcctgcatacctggagagcttctctggtcctgcccaccttgaaagttgcagactttgttgtaacatctatgtgatgagcttccctgtgaagccccatttgacaggtgggccagcagtgttttatcagcactctgatggcccacatttcccaggaaaacttcttgaaacttaccgttgtgggcagtggtcagagcgtgtagttcttatgactgtcttgtttcatctgtggagcacgtgtggagcacgttggtacagcagtttctgtggggtttggcatgggtgattttggttagtaaccatcctccaattgttgcttgtgaaagtcattcataacttgttccttttacttagttttgttgttactgctgttgttgttggtttggttggttttgagaccgggtctggctctgtagcccaagctggaatgcggtggcgcgatcatggctccctgcagcctcaaactcctgggctcaagcaatcctcctgcctcagcctcccaagcagctgggaagataggcacgtgccaccacacccggctaattttttctttattttttttgtagagatgggggtctcactatgttgcccaggctggtctcaaactcctgggctcaagcgatcctttggcctcggcctcccaaagtgcatgagccaccatgcctggcctgtttagttttgtttcaagttgaaatacctttcttgtgttttctaattagaaaagtaatatctactcattgtaaaaactcaaacagtgcagaaatgtagaaagtagaaagtgtaagtccctggttgtcccttctgcctgagacaaccactgctcacagtttgatgtatatccttccagagactctcaaatttaagcaaataatttttattaccatgtctttttatttgaagacgtacatttgcctccaaagttcaacacaagttcaactgaccatatccttccatgacctgaatagatgctatcctttatcacgatgttcaattgcctttgaaagagagtagtccaggtatattcctgatcaaaatttggcatttttgatgatactactctacacagatcagactcatgtgcagaatcgtgcctggagagagaggtttggttaagacagagatttctggaaacattcaaattgcaaatggaaacttgaaacccacaatctaatgaggaatgtactggaaaaataatctgaagagttgacaaattgtgtactagattgaacacatggaatgcaatgcaatgagactttctgcactaaaacttatcctcatatgtacaacaatgatgtgtgtattatataacagtgatgtgtacatttctgacaccccatacataatatacacagtttgtataaatgcatacatttaaaaatatatatgtacaatacagctaacataaaactgtagtacgcctgaaggatattactagtgcctaatattgagtatgagtcactgcgtgttcgcatcaacttggaagtgcagtaattgttataaaattaatcagtgcagccaacattatttatgaatcacatctttgaaactgtgcagtagcatatacatatatatttttaaataacatttttcacagttttccagagttactgttgaaatctgcatcaccaaaaaaaaaaaaaagcaagatttttttaacaatgtagacactcttcagacccagtaatctgcgtgtgatttcctatttgtagattcccaagagactttagcagtcaccagccttaatgcatgtacaggatattattgtgacttaatttatctgcagtttttaatccatgtgaaattggaatttataaacggacttggattaaacatgtctgcctttctaaggttgcaaatgttacattaaatgatttatgttgt

SEQ ID NO: 300054 - DNA, 702 bp, Artificial Sequence
  derived and/or modified sequence
cgccagcgagaagagagctccacgctcagcctcagaagaaagacgttcaacgacttactggggagagaaagaaaaggaacgggagctgagagctgatcacctgcctttccagaccggagacgggcggcaagtttgaagtcgacacccagaggccagtttgtcccccttcccgcgcgcgggcggcccgagcctcggcggcggcggtagcggcggcggcgacgctgacacctcccaccatggacagcttcgacttagccctgctccaggaatgggacctcgagtcactgtgtgtctatgaaccagatagaaatgcattacggaggaaagaacgagaaagaagaaatcaagaaactcaacaggatgatggcacgtttaattctagttactctctcttcagtgagccctacaagactaacaagggggatgaactctccaaccggatccagaacactttaggcaattatgatgaaatgaaagactttttaactgatagatccaatcagagtcatctcgttggagttcccaaacctggggttcctcagactcctgtgaacaagatcgatgaacattttgttgcagattcaagagcccagaaccagccctcgtctatctgtagcactacaacttccacaccagcagctgtccccgtgcagcagagtaagagaggcactatgggctggcagaaggctgggcacccaccct

SEQ ID NO: 300055 - DNA, 528 bp, Artificial Sequence
  derived and/or modified sequence
attcggaggtgggtgaggtgagaggatgactcttcggcttgacgctggagggatcccgtcacttgcacccagggtttacatttctggcagccccagtcagcggttcttgcccagaaaaaggaacaaaggggagagtgctggaagggactcccttttggcggggagtgcgaggtttggttcgcgtggtgaggcacaactgcagggctctgagctgctctctaggaattctggggaatccctggtgagaatccggagctgtggccaagaggtcaggagagtcagggggccttggaggggcttccggttctaggccaactgtggagaagcagagctgatcacctgcctttccagaccggagacgggcggcaagtttgaagtcgacacccagaggccagtttgtcccccttcccgcgcgcgggcggcccgagcctcggcggcggcggtagcggcggcggcgacgctgacacctcccaccatggacagcttcgacttagccctgctccaggaatgggacctcgagtcactgtg

SEQ ID NO: 300056 - DNA, 2913 bp, Artificial Sequence
  derived and/or modified sequence
aaatccgatctcaaataggaaagaagtctcattggccttttggtcttctacctgtgtcctgaattgagtttgttaatcctcattcggagctgatcacctgcctttccagaccggagacgggcggcaagtttgaagtcgacacccagaggccagtttgtcccccttcccgcgcgcgggcggcccgagcctcggcggcggcggtagcggcggcggcgacgctgacacctcccaccatggacagcttcgacttagccctgctccaggaatgggacctcgagtcactgtggggtgaagacatcttaaaccagaggaatgactctctagttgtggaatttcagtcatcagccagcagatgcaggagtgtctatgaaccagatagaaatgcattacggaggaaagaacgagaaagaagaaatcaagaaactcaacaggatgatggcacgtttaattctagttactctctcttcagtgagccctacaagactaacaagggggatgaactctccaaccggatccagaacactttaggcaattatgatgaaatgaaagactttttaactgatagatccaatcagagtcatctcgttggagttcccaaacctggggttcctcagactcctgtgaacaagatcgatgaacattttgttgcagattcaagagcccagaaccagccctcgtctatctgtagcactacaacttccacaccagcagctgtccccgtgcagcagagtaagagaggcactatgggctggcagaaggctgggcacccaccctctgacggccaacagagagcaacacaacagggctctctcaggaccttgcttggagatggtgttggcagacagcagcctcgggccaaacaagtgtgcaatgtggaggtgggccttcagacccaggagaggccacctgccatggcggccaagcacagcagcagcggacactgtgttcagaactttcctccatccctagcttcaaaacccagcctggtccagcagaaaccgaccgcgtatgtgaggccaatggacggccaagatcaggcccctgatgagtctcctaagctgaagtcgtcttcggaaaccagcgtgcactgcacatcatacaggggagtccctgccagcaagccggagcctgccagagccaaggccaagctctccaagttcagcatccccaagcagggggaggagagtagatctggagaaaccaacagctgtgttgaagaaataatccgggagatgacctggcttccaccactttctgctattcaagcacctggcaaagtggaaccaaccaaatttccatttccaaataaggactctcagcttgtatcctctggacacaataatccaaagaaaggtgatgcagagccagagagtccagacagtggcacatcgaatacatcaatgctggaagatgaccttaagctaagcagtgatgaagaggagaatgaacagcaggcagctcagagaacggctctccgcgctctctctgacagcgccgtggtccagcagcccaactgcagaacctcggtgccttccagcaagggcagcagcagcagcagcagcagcggcagcagcagctcctccagcgactcagagagcagctccggatctgactcggagaccgagagcagctccagcgagagtgagggcagcaagcccccccacttctccagccccgaggctgaaccggcatcctctaacaagtggcagctggataaatggctaaacaaagttaatccccacaagcctcctattctgatccaaaatgaaagccacgggtcagagagcaatcagtactacaacccggtgaaagaggacgtccaggactgtgggaaagtccccgacgtttgccagcccagcctgagagagaaggagatcaagagcacttgcaaggaggagcaaaggccaaggacagccaacaaggcccctgggagtaaaggcgtgaagcagaagtccccgcccgcggccgtggccgtggcggtgagcgcagccgccccgccacccgcagtgccctgtgcgcccgcggagaacgcgcccgcgcctgcccggaggtccgcgggcaagaagcccaccaggcgcaccgagaggacctcagccggggacggcgccaactgccaccggcccgaggagcccgcggccgcggacgcgctggggacgagcgtggtggtccccccggagcccaccaaaaccaggccctgtggcaacaacagagcgagccaccgcaaggagctgcgctcctccgtgacctgcgagaagcgccgcacgcgggggctaagcaggatcgtccccaaatccaaggagttcattgagacagagtcgtcatcttcatcctcctcctcggactccgacctggagtccgagcaggaggagtaccctctgtccaaagcacagaccgtggctgcctctgcctcctccgggaatgatcagaggctgaaggaggccgctgccaacgggggcagtggtcctagggcccctgtaggctccatcaacgccaggaccaccagtgacatcgccaaggagctggaggagcagttctacacactggtccccttggccggaacgaacttctctcccctctaaaggacagtgatgagatcaggtctctctgggtcaaaatcgacctgaccctcctgtccaggatcccagaacacctgccccaggagccaggggtattgagcgcccctgccaccaaggactctgagagcgcaccgcccagccacacctcggacacacctgcagaaaaggctttgccaaaatccaagaggaaacgcaagtgtgacaacgaagacgactacagggagatcaagaagtcccagggagagaaagacagctcttcaagactggccacctccaccagtaatactttgtctgcaaaccactgcaacatgaacatcaacagtgtggcaataccaat

SEQ ID NO: 300057 - DNA, 2751 bp, Artificial Sequence
  derived and/or modified sequence
ctgatcacctgcctttccagaccggagacgggcggcaagtttgaagtcgacacccagaggccagtttgtcccccttcccgcgcgcgggcggcccgagcctcggcggcggcggtagcggcggcggcgacgctgacacctcccaccatggacagcttcgacttagccctgctccaggaatgggacctcgagtcactgtgtgtctatgaaccagatagaaatgcattacggaggaaagaacgagaaagaagaaatcaagaaactcaacaggatgatggcacgtttaattctagttactctctcttcagtgagccctacaagactaacaagggggatgaactctccaaccggatccagaacactttaggcaattatgatgaaatgaaagactttttaactgatagatccaatcagagtcatctcgttggagttcccaaacctggggttcctcagactcctgtgaacaagatcgatgaacattttgttgcagattcaagagcccagaaccagccctcgtctatctgtagcactacaacttccacaccagcagctgtccccgtgcagcagagtaagagaggcactatgggctggcagaaggctgggcacccaccctctgacggccaacagagagcaacacaacagggctctctcaggaccttgcttggagatggtgttggcagacagcagcctcgggccaaacaagtgtgcaatgtggaggtgggccttcagacccaggagaggccacctgccatggcggccaagcacagcagcagcggacactgtgttcagaactttcctccatccctagcttcaaaacccagcctggtccagcagaaaccgaccgcgtatgtgaggccaatggacggccaagatcaggcccctgatgagtctcctaagctgaagtcgtcttcggaaaccagcgtgcactgcacatcatacaggggagtccctgccagcaagccggagcctgccagagccaaggccaagctctccaagttcagcatccccaagcagggggaggagagtagatctggagaaaccaacagctgtgttgaagaaataatccgggagatgacctggcttccaccactttctgctattcaagcacctggcaaagtggaaccaaccaaatttccatttccaaataaggactctcagcttgtatcctctggacacaataatccaaagaaaggtgatgcagagccagagagtccagacagtggcacatcgaatacatcaatgctggaagatgaccttaagctaagcagtgatgaagaggagaatgaacagcaggcagctcagagaacggctctccgcgctctctctgacagcgccgtggtccagcagcccaactgcagaacctcggtgccttccagcaagggcagcagcagcagcagcagcagcggcagcagcagctcctccagcgactcagagagcagctccggatctgactcggagaccgagagcagctccagcgagagtgagggcagcaagcccccccacttctccagccccgaggctgaaccggcatcctctaacaagtggcagctggataaatggctaaacaaagttaatccccacaagcctcctattctgatccaaaatgaaagccacgggtcagagagcaatcagtactacaacccggtgaaagaggacgtccaggactgtgggaaagtccccgacgtttgccagcccagcctgagagagaaggagatcaagagcacttgcaaggaggagcaaaggccaaggacagccaacaaggcccctgggagtaaaggcgtgaagcagaagtccccgcccgcggccgtggccgtggcggtgagcgcagccgccccgccacccgcagtgccctgtgcgcccgcggagaacgcgcccgcgcctgcccggaggtccgcgggcaagaagcccaccaggcgcaccgagaggacctcagccggggacggcgccaactgccaccggcccgaggagcccgcggccgcggacgcgctggggacgagcgtggtggtccccccggagcccaccaaaaccaggccctgtggcaacaacagagcgagccaccgcaaggagctgcgctcctccgtgacctgcgagaagcgccgcacgcgggggctaagcaggatcgtccccaaatccaaggagttcattgagacagagtcgtcatcttcatcctcctcctcggactccgacctggagtccgagcaggaggagtaccctctgtccaaagcacagaccgtggctgcctctgcctcctccgggaatgatcagaggctgaaggaggccgctgccaacgggggcagtggtcctagggcccctgtaggctccatcaacgccaggaccaccagtgacatcgccaaggagctggaggagcagttctacacactggtcccctttggccggaacgaacttctctcccctctaaaggacagtgatgagatcaggtctctctgggtcaaaatcgacctgaccctcctgtccaggatcccagaacacctgccccaggagccaggggtattgagcgcccctgccaccaaggactctgagagcgcaccgcccagccacacctcggacacacctgcagaaaaggctttgccaaaatccaagaggaaacgcaagtgtgacaacgaagacgactacagggagatcaagaagtcccagggagagaaagacagctcttcaagactggccacctccaccagtaatactttgtctgcaaaccactgcaacatgaacatcaacagtatgcagttgcctatt

SEQ ID NO: 300058 - DNA, 3088 bp, Artificial Sequence
  derived and/or modified sequence
attcggaggtgggtgaggtgagaggatgactcttcggcttgacgctggagggatcccgtcacttgcacccagggtttacatttctggcagccccagtcagcggttcttgcccagaaaaaggaacaaaggggagagtgctggaagggactcccttttggcggggagtgcgaggtttggttcgcgtggtgaggcacaactgcagggctctgagctgctctctaggaattctggggaatccctggtgagaatccggagctgtggccaagagctgatcacctgcctttccagaccggagacgggcggcaagtttgaagtcgacacccagaggccagtttgtcccccttcccgcgcgcgggcggcccgagcctcggcggcggcggtagcggcggcggcgacgctgacacctcccaccatggacagcttcgacttagccctgctccaggaatgggacctcgagtcactgtggggtgaagacatcttaaaccagaggaatgactctctagttgtggaatttcagtcatcagccagcagatgcaggagtgtctatgaaccagatagaaatgcattacggaggaaagaacgagaaagaagaaatcaagaaactcaacaggatgatggcacgtttaattctagttactctctcttcagtgagccctacaagactaacaagggggatgaactctccaaccggatccagaacactttaggcaattatgatgaaatgaaagactttttaactgatagatccaatcagagtcatctcgttggagttcccaaacctggggttcctcagactcctgtgaacaagatcgatgaacattttgttgcagattcaagagcccagaaccagccctcgtctatctgtagcactacaacttccacaccagcagctgtccccgtgcagcagagtaagagaggcactatgggctggcagaaggctgggcacccaccctctgacggccaacagagagcaacacaacagggctctctcaggaccttgcttggagatggtgttggcagacagcagcctcgggccaaacaagtgtgcaatgtggaggtgggccttcagacccaggagaggccacctgccatggcggccaagcacagcagcagcggacactgtgttcagaactttcctccatccctagcttcaaaacccagcctggtccagcagaaaccgaccgcgtatgtgaggccaatggacggccaagatcaggcccctgatgagtctcctaagctgaagtcgtcttcggaaaccagcgtgcactgcacatcatacaggggagtccctgccagcaagccggagcctgccagagccaaggccaagctctccaagttcagcatccccaagcagggggaggagagtagatctggagaaaccaacagctgtgttgaagaaataatccgggagatgacctggcttccaccactttctgctattcaagcacctggcaaagtggaaccaaccaaatttccatttccaaataaggactctcagcttgtatcctctggacacaataatccaaagaaaggtgatgcagagccagagagtccagacagtggcacatcgaatacatcaatgctggaagatgaccttaagctaagcagtgatgaagaggagaatgaacaggcagctcagagaacggctctccgcgctctctctgacagcgccgtggtccagcagcccaactgcagaacctcggtgccttccagcaagggcagcagcagcagcagcagcagcggcagcagcagctcctccagcgactcagagagcagctccggatctgactcggagaccgagagcagctccagcgagagtgagggcagcaagcccccccacttctccagccccgaggctgaaccggcatcctctaacaagtggcagctggataaatggctaaacaaagttaatccccacaagcctcctattctgatccaaaatgaaagccacgggtcagagagcaatcagtactacaacccggtgaaagaggacgtccaggactgtgggaaagtccccgacgtttgccagcccagcctgagagagaaggagatcaagagcacttgcaaggaggagcaaaggccaaggacagccaacaaggcccctgggagtaaaggcgtgaagcagaagtccccgcccgcggccgtggccgtggcggtgagcgcagccgccccgccacccgcagtgccctgtgcgcccgcggagaacgcgcccgcgcctgcccggaggtccgcgggcaagaagcccaccaggcgcaccgagaggacctcagccggggacggcgccaactgccaccggcccgaggagcccgcggccgcggacgcgctggggacgagcgtggtggtccccccggagcccaccaaaaccaggccctgtggcaacaacagagcgagccaccgcaaggagctgcgctcctccgtgacctgcgagaagcgccgcacgcgggggctaagcaggatcgtccccaaatccaaggagttcattgagacagagtcgtcatcttcatcctcctcctcggactccgacctggagtccgagcaggaggagtaccctctgtccaaagcacagaccgtggctgcctctgcctcctccgggaatgatcagaggctgaaggaggccgctgccaacgggggcagtggtcctagggcccctgtaggctccatcaacgccaggaccaccagtgacatcgccaaggagctggaggagcagttctacacactggtcccctttggccggaacgaacttctctcccctctaaaggacagtgatgagatcaggtctctctgggtcaaaatcgacctgaccctcctgtccaggatcccagaacacctgccccaggagccaggggtattgagcgcccctgccaccaaggactctgagagcgcaccgcccagccacacctcggacacacctgcagaaaaggctttgccaaaatccaagaggaaacgcaagtgtgacaacgaagacgactacagggagatcaagaagtcccagggagagaaagacagctcttcaagactggccacctccaccagtaatactttgtctgcaaaccactgcaacatgaacatcaacagcctcagcctcccg

SEQ ID NO: 300059 - DNA, 54 bp, Artificial Sequence
  derived and/or modified sequence
atggacagcttcgacctggccctgctgcaggagtgggacctggagtccctgtag

SEQ ID NO: 300060 - DNA, 3066 bp, Artificial Sequence
  derived and/or modified sequence
atgaccctgcggctggacgccggcggcatccccagcctggcccccagggtgtacatatctggtagtccaagtcagcgctttcttcctaggaagaggaataaaggcgagtctgcaggacgtgacagtctgctggcgggctccgcccggttcggttctcggggagaggcgcagctccaaggttcagagttgctgtcccgaaattctggagagtccctggtccgcattcgttcttgtgggcaggaactgattacctgcctcagcagaccggagacggggggcaaatttgaggttgacacacaacggcctgtctgccccccctctcgggcacgggctgcacgggccagcgctgcagccgtggcggctgccgctactctgacacctcctacaatggatagcttcgatctggccctgcttcaggaatgggacttagaatctctgtggggcgaggatatcttaaatcagcggaatgattccttagttgtggagttccaatccagcgcttcccgatgtaggagtgtttacgagcccgacaggaacgccttgagacgaaaagaaagggagaggaggaatcaggagacccagcaagacgacggcacctttaattcatcctatagcctgttttcagagccttataaaacgaataagggcgatgagctgtctaataggatacagaacacacttggaaactacgacgagatgaaagatttccttactgacagatctaaccagtcccacctagttggggtgcccaagccaggagtgcctcagacccccgttaataagatagacgaacatttcgtggcagatagccgcgcccagaaccaaccatcatccatctgctccacgaccaccagcactcctgccgcagtgccagttcagcagtcgaagcggggtaccatgggctggcaaaaggctggccacccaccctctgacggccagcaaagggcaacgcaacagggatctctgagaacactgcttggcgatggggtggggcgacagcaaccgagagctaaacaggtctgcaatgtggaagttgggctccagactcaggaacgccctcccgcgatggctgccaagcatagcagtagcgggcactgcgtccagaactttccaccgtctctcgccagcaagccctccctggtacagcagaagccgaccgcctatgttagaccaatggacgggcaggaccaagcccctgacgagtctcctaagctgaaatcaagctccgaaacttccgtgcattgtacatcctatcggggcgtacccgcatctaagccagaaccagcacgggcaaaagccaaactctcaaagttctctattcctaagcagggggaagaaagtcggagcggcgagaccaacagctgtgttgaggaaataatcagggagatgacctggctcccacctcttagcgcgattcaggcaccaggtaaagtggagcccactaagttcccattccctaataaagacagccagttagttagctcaggccacaacaaccccaagaaaggcgacgctgaacccgagtccccggactctggaacaagtaacacttcgatgctggaagatgatctgaagcttagttccgacgaggaggaaaatgaacaggctgcacagcggactgccctcagggcactttccgatagcgccgtcgtgcagcaaccaaattgccgcacgagcgtaccctcatcaaaaggcagtagctcttcaagctccagtggatcctcgtcaagttccagcgactcggagtcaagctccggttccgactcagagaccgagtcatccagttctgagtccgaaggtagcaaacctccgcatttcagctctccagaagcagagccggcttcatccaacaaatggcagcttgacaaatggctgaacaaggtaaatccccacaaaccaccgattcttatccaaaatgaatcacacggaagcgagagcaaccagtactacaatccagtcaaggaagatgtgcaggattgcggcaaggtcccagatgtctgtcagcccagcctccgcgagaaagagataaagtctacatgcaaagaggaacagagaccgcgcaccgccaataaggcaccggggagcaagggagtgaaacagaagagcccgcctgcagcagttgccgtggctgtgtccgccgcagcaccaccacccgcagtaccatgcgctcctgccgagaatgcccccgcccccgcccgccgatccgccgggaaaaagcccacccggcggacagaaaggacgtcagccggagacggggctaactgccatcgccctgaagaacccgctgccgcagacgcacttggcacctctgtcgttgtgccacccgaacctacgaaaacgcgtccatgcggaaacaaccgcgcttctcaccgcaaggagcttcgatccagtgtgacctgcgagaagcgaagaacgaggggcttatctagaatagtgcccaaaagcaaagaattcattgagacagaaagtagctcctcgtcttctagttctgacagtgaccttgagtcggagcaggaggaataccccctttcgaaggctcagacggtagcggcctcagcttcatcagggaacgaccagcggcttaaagaggcggcagccaacggcggtagcggcccacgggcacctgtcgggagcatcaacgccagaacaacatcagacatcgccaaggaactggaagaacagttctacactctcgtgcccttcggaagaaacgagctgctgtctccattgaaggactccgacgaaattagatctctctgggtgaagattgatctgactctgctctcgcgaatccccgagcacctgccacaggagccaggagtcttgagcgcacccgcaacgaaagacagcgagagcgcaccaccttcccacacctcagacactcctgctgagaaagcccttccaaagagcaagagaaagcgaaagtgcgataatgaggacgattatcgggaaattaagaagtcccaaggggaaaaagattcgtcctcccggctggcaacttctacatcaaataccctttcagctaatcactgcaatatgaatattaactctctgtcattgccatag

SEQ ID NO: 300061 - DNA, 54 bp, Artificial Sequence
  derived and/or modified sequence
atggactctttcgatttggccctacttcaagagtgggatctggaatcactatag

SEQ ID NO: 300062 - DNA, 3066 bp, Artificial Sequence
  derived and/or modified sequence
atgaccctgaggcttgatgcaggcggaattccgagtctggcaccacgcgtttatatttccggttctccctctcaacgctttctgccgcgaaagcgcaacaaaggagagtcggcgggtcgggattccctgctggcaggtagtgcccgatttggttcccggggagaggcccaactgcagggtagcgaactgttgagccgcaattctggcgagtctttagttagaattcggagctgcgggcaggaactgatcacatgcctgtctcgccctgagacagggggaaaattcgaggtcgatactcagcggcctgtttgtccaccatcaagagcaagagccgctcgagcatccgcggcagccgtagctgctgcagctactctcacccccccaaccatggattcattcgatctagcactgctgcaggaatgggacctcgaaagtctgtggggggaagacattcttaatcagagaaacgatagcctggtagttgagttccagtcttctgccagccgatgtaggtccgtatacgaacccgatcgcaatgcactgagacggaaggaacgggaacggaggaaccaagagacgcagcaagacgatggtactttcaactcaagctattctctcttttccgagccctacaagacaaataaaggtgacgaacttagtaatagaattcagaacacactaggaaattatgacgaaatgaaggactttctgacagataggtctaatcagtcgcatttagtgggcgttcccaaacccggagttccccagacccctgtcaacaaaattgatgagcacttcgttgctgatagcagagcacagaaccagccatcttcaatctgctctacaactacatctacacccgctgccgtgccggtacagcagagcaaaagaggcaccatgggttggcaaaaagcaggtcaccctccctcagacggacagcagagagccactcagcaggggagtttaagaacactccttggcgacggcgtgggccgacagcagccacgtgccaaacaggtttgcaacgtggaggttgggctgcagacccaggaaaggccgcctgccatggcggcaaaacattcaagttccggtcattgtgtgcagaatttccccccttctctggcttctaaaccaagcctcgtacaacagaagccaacggcttacgtgcgccctatggacggccaggatcaagctcccgatgagagtcccaagctgaaatccagctcagaaacatctgtgcactgtaccagctatcggggtgttcctgcatcaaaacctgagcccgcaagggccaaagccaagctctctaagttttcaattcctaagcaaggcgaggaatcgcgctcaggggagacaaacagttgcgtcgaagaaataatacgggagatgacttggctgcccccattgagtgctattcaggcccctggtaaagtggaacctaccaagttcccatttccaaataaggactctcagcttgtctcatccgggcataacaatcccaagaaaggggacgctgaaccagagagcccagactcagggactagtaatacatcaatgctggaggatgacttgaagctaagttctgacgaggaggagaacgagcaggcagcccagaggactgctctcagggctctgtccgactcagctgtggtgcagcagccaaattgtcgcacgtcagtgccgtcgtctaaagggtccagcagtagctcatccagcgggtctagtagcagcagcagtgactctgaaagcagtagcgggtcggatagcgaaacagagtcatcaagtagcgaatctgagggaagtaagccccctcacttctcgagccccgaagccgagcccgctagctctaacaagtggcaactcgacaagtggctcaataaagtgaatccgcacaagccacccatcctgatccaaaatgagtcccacgggtccgaaagcaaccaatactacaacccagtcaaagaggatgtgcaggactgtggcaaagtgcctgatgtgtgccaaccaagcctcagggagaaagagattaagagcacctgtaaggaggaacagcgaccaaggaccgccaacaaggcccctgggtcgaagggcgtcaaacagaaatcccctcccgcagccgtagcagtagccgtgtccgccgcagcccctccccctgcagtgccgtgtgcccctgcggagaacgcccctgctcccgcaagacgcagcgccggtaaaaagcctacccgacggacggaaaggacaagtgcaggagatggtgcaaactgccatagaccagaggaaccagcagctgcagatgcattaggcacatcagtcgtggtgccccctgagccaacaaagacaaggccatgtgggaacaaccgcgcttcacatcgcaaagagcttagatcctccgttacctgtgaaaaacgcagaacacgcggtctgtcacggatcgtgccaaagtcaaaggagttcatcgaaacagaaagctcctcaagcagcagttcctcagactccgatctggaatcagaacaggaagaatatcccttgtctaaggcgcagactgtggctgcaagtgcatcctcaggcaatgaccagcgcctcaaggaggccgctgcaaatggtggaagcgggccacgcgctcctgtgggaagcatcaatgccagaactacctctgatatagccaaggagctggaagaacagttttacacgttggttccattcgggcgtaatgaactgctgagtcctctgaaagattcagacgaaatcagatccttgtgggtaaagattgacctgacattattgtctagaattcccgaacatctgccacaggagccgggagtccttagcgcaccagcaactaaggattcagagtccgcaccaccatcccacacctcagacacgccggctgagaaagccttgccaaaaagcaaaagaaagcgtaagtgcgacaatgaggacgactacagagagatcaagaaaagccagggggagaaggacagttcttcaaggttggccaccagcacatctaatacattgagcgcgaaccattgtaatatgaatataaattccctgtcacttccttag

SEQ ID NO: 300063 - DNA, 54 bp, Artificial Sequence
  derived and/or modified sequence
atggacagcttcgacctggccctgctgcaggagtgggacctggagagcctgtag

SEQ ID NO: 300064 - DNA, 3066 bp, Artificial Sequence
  derived and/or modified sequence
atgaccctgagactggacgccggcggcatccccagcctggcccccagagtgtacatcagcggcagccccagccagagattcctgcccagaaagagaaacaagggcgagagcgccggcagagacagcctgctggccggcagcgccagattcggcagcagaggcgaggcccagctgcagggcagcgagctgctgagcagaaacagcggcgagagcctggtgagaatcagaagctgcggccaggagctgatcacctgcctgagcagacccgagaccggcggcaagttcgaggtggacacccagagacccgtgtgcccccccagcagagccagagccgccagagccagcgccgccgccgtggccgccgccgccaccctgaccccccccaccatggacagcttcgacctggccctgctgcaggagtgggacctggagagcctgtggggcgaggacatcctgaaccagagaaacgacagcctggtggtggagttccagagcagcgccagcagatgcagaagcgtgtacgagcccgacagaaacgccctgagaagaaaggagagagagagaagaaaccaggagacccagcaggacgacggcaccttcaacagcagctacagcctgttcagcgagccctacaagaccaacaagggcgacgagctgagcaacagaatccagaacaccctgggcaactacgacgagatgaaggacttcctgaccgacagaagcaaccagagccacctggtgggcgtgcccaagcccggcgtgccccagacccccgtgaacaagatcgacgagcacttcgtggccgacagcagagcccagaaccagcccagcagcatctgcagcaccaccaccagcacccccgccgccgtgcccgtgcagcagagcaagagaggcaccatgggctggcagaaggccggccacccccccagcgacggccagcagagagccacccagcagggcagcctgagaaccctgctgggcgacggcgtgggcagacagcagcccagagccaagcaggtgtgcaacgtggaggtgggcctgcagacccaggagagaccccccgccatggccgccaagcacagcagcagcggccactgcgtgcagaacttcccccccagcctggccagcaagcccagcctggtgcagcagaagcccaccgcctacgtgagacccatggacggccaggaccaggcccccgacgagagccccaagctgaagagcagcagcgagaccagcgtgcactgcaccagctacagaggcgtgcccgccagcaagcccgagcccgccagagccaaggccaagctgagcaagttcagcatccccaagcagggcgaggagagcagaagcggcgagaccaacagctgcgtggaggagatcatcagagagatgacctggctgccccccctgagcgccatccaggcccccggcaaggtggagcccaccaagttccccttccccaacaaggacagccagctggtgagcagcggccacaacaaccccaagaagggcgacgccgagcccgagagccccgacagcggcaccagcaacaccagcatgctggaggacgacctgaagctgagcagcgacgaggaggagaacgagcaggccgcccagagaaccgccctgagagccctgagcgacagcgccgtggtgcagcagcccaactgcagaaccagcgtgcccagcagcaagggcagcagcagcagcagcagcagcggcagcagcagcagcagcagcgacagcgagagcagcagcggcagcgacagcgagaccgagagcagcagcagcgagagcgagggcagcaagcccccccacttcagcagccccgaggccgagcccgccagcagcaacaagtggcagctggacaagtggctgaacaaggtgaacccccacaagccccccatcctgatccagaacgagagccacggcagcgagagcaaccagtactacaaccccgtgaaggaggacgtgcaggactgcggcaaggtgcccgacgtgtgccagcccagcctgagagagaaggagatcaagagcacctgcaaggaggagcagagacccagaaccgccaacaaggcccccggcagcaagggcgtgaagcagaagagcccccccgccgccgtggccgtggccgtgagcgccgccgcccccccccccgccgtgccctgcgcccccgccgagaacgcccccgcccccgccagaagaagcgccggcaagaagcccaccagaagaaccgagagaaccagcgccggcgacggcgccaactgccacagacccgaggagcccgccgccgccgacgccctgggcaccagcgtggtggtgccccccgagcccaccaagaccagaccctgcggcaacaacagagccagccacagaaaggagctgagaagcagcgtgacctgcgagaagagaagaaccagaggcctgagcagaatcgtgcccaagagcaaggagttcatcgagaccgagagcagcagcagcagcagcagcagcgacagcgacctggagagcgagcaggaggagtaccccctgagcaaggcccagaccgtggccgccagcgccagcagcggcaacgaccagagactgaaggaggccgccgccaacggcggcagcggccccagagcccccgtgggcagcatcaacgccagaaccaccagcgacatcgccaaggagctggaggagcagttctacaccctggtgcccttcggcagaaacgagctgctgagccccctgaaggacagcgacgagatcagaagcctgtgggtgaagatcgacctgaccctgctgagcagaatccccgagcacctgccccaggagcccggcgtgctgagcgcccccgccaccaaggacagcgagagcgccccccccagccacaccagcgacacccccgccgagaaggccctgcccaagagcaagagaaagagaaagtgcgacaacgaggacgactacagagagatcaagaagagccagggcgagaaggacagcagcagcagactggccaccagcaccagcaacaccctgagcgccaaccactgcaacatgaacatcaacagcctgagcctgccctag

SEQ ID NO: 300065 - protein, 646 aa, Artificial Sequence
  derived and/or modified sequence
MLAQHCVDANNTFCFDNPRGLALHPQYGYLYWADWGHRAYIGRVGMDGTNKSVIISTKLEWPNGITIDYTNDLLYWADAHLGYIEYSDLEGHHRHTVYDGALPHPFAITIFEDTIYWTDWNTRTVEKGNKYDGSNRQTLVNTTHRPFDIHVYHPYRQPIVSNPCGTNNGGCSHLCLIKPGGKGFTCECPDDFRTLQLSGSTYCMPMCSSTQFLCANNEKCIPIWWKCDGQKDCSDGSDELALCPQRFCRLGQFQCSDGNCTSPQTLCNAHQNCPDGSDEDRLLCENHHCDSNEWQCANKRCIPESWQCDTFNDCEDNSDEDSSHCASRTCRPGQFRCANGRCIPQAWKCDVDNDCGDHSDEPIEECMSSAHLCDNFTEFSCKTNYRCIPKWAVCNGVDDCRDNSDEQGCEERTCHPVGDFRCKNHHCIPLRWQCDGQNDCGDNSDEENCAPRECTESEFRCVNQQCIPSRWICDHYNDCGDNSDERDCGMRLMKLIVPHAFLMVHTARLLCSNAKTMFVSRHIGNVMAMMTVAMVQMKNFTCAWMFPVIHQTVSGVTTIAAFIVMRCAMVWMTVEMELMRQRSTVENRPLNLVQNMNISVAMGIAFHMTMCVMMPMTVVTGPMNWVAIKEKKEHVLKIYASKIVPN

SEQ ID NO: 300066 - protein, 1225 aa, Artificial Sequence
  derived and/or modified sequence
MDRGPAAVACTLLLALVACLAPASGQECDSAHFRCGSGHCIPADWRCDGTKDCSDDADEIGCAVVTCQQGYFKCQSEGQCIPNSWVCDQDQDCDDGSDERQDCSQSTCSSHQITCSNGQCIPSEYRCDHVRDCPDGADENDCQYPTCEQLTCDNGACYNTSQKCDWKVDCRDSSDEINCTEICLHNEFSCGNGECIPRAYVCDHDNDCQDGSDEHACNYPTCGGYQFTCPSGRCIYQNWVCDGEDDCKDNGDEDGCESGPHDVHKCSPREWSCPESGRCISIYKVCDGILDCPGREDENNTSTGKYCSMTLCSALNCQYQCHETPYGGACFCPPGYIINHNDSRTCVEFDDCQIWGICDQKCESRPGRHLCHCEEGYILERGQYCKANDSFGEASIIFSNGRDLLIGDIHGRSFRILVESQNRGVAVGVAFHYHLQRVFWTDTVQNKVFSVDINGLNIQEVLNVSVETPENLAVDWVNNKIYLVETKVNRIDMVNLDGSYRVTLITENLGHPRGIAVDPTVGKTVVHGGSLIPHPFGVSLFEGQVFFTDWTKMAVLKANKFTETNPQVYYQASLRPYGVTVYHSLRQPYATNPCKDNNGGCEQVCVLSHRTDNDGLGFRCKCTFGFQLDTDERHCIGREILAANRVENVESLAFDWISKNLYWTDSHYKSISVMRLADKTRRTVVQYLNNPRSVVVHPFAGYLFFTDWFRPAKIMRAWSDGSHLLPVINTTLGWPNGLAIDWAASRLYWVDAYFDKIEHSTFDGLDRRRLGHIEQMTHPFGLAIFGEHLFFTDWRLGAIIRVRKADGGEMTVIRSGIAYILHLKSYDVNIQTGSNACNQPTHPNGDCSHFCFPVPNFQRVCGCPYGMRLASNHLTCEGDPTNEPPTEQCGLFSFPCKNGRCVPNYYLCDGVDDCHDNSDEQLCGTLNNTCSSSAFTCGHGECIPAHWRCDKRNDCVDGSDEHNCPTHAPASCLDTQYTCDNHQCISKNWVCDTDNDCGDGSDEKNCNSTETCQPSQFNCPNHRCIDLSFVCDGDKDCVDGSDEVGCVLNCTASQFKCASGDKCIGVTNRCDGVFDCSDNSDEAGCPTRPPGMCHSDEFQCQEDGICIPNFWECDGHPDCLYGSDEHNACVPKTCPSSYFHCDNGNCIHRAWLCDRDNDCGDMSDEKDCPTQPFRCPSWQWQCLGHNICVNLSVVCDGIFDCPNGTDESPLCSKFPDHSLLAINSF

SEQ ID NO: 300067 - protein, 106 aa, Artificial Sequence
  derived and/or modified sequence
MADERKDEAKAPHWTSAPLTEASAHSHPPEIKDQGGAGEGLVRSANGFPYREDEEGAFGEHGSQGTYSNTKENGINGELTSADRETAEEVSARIVQVVTAEAVAVL

SEQ ID NO: 300068 - protein, 1823 aa, Artificial Sequence
  derived and/or modified sequence
MADERKDEAKAPHWTSAPLTEASAHSHPPEIKDQGGAGEGLVRSANGFPYREDEEGAFGEHGSQGTYSNTKENGINGELTSADRETAEEVSARIVQVVTAEAVAVLKGEQEKEAQHKDQTAALPLAAEETANLPPSPPPSPASEQTVTVEEASKMEFHDQQELTPSTAEPSDQKEKESEKQSKPGEDLKHAALVSQPETTKTYPDKKDMQGTEEEKAPLALFGHTLVASLEDMKQKTEPSLVVPGIDLPKEPPTPKEQKDWFIEMPTEAKKDEWGLVAPISPGPLTPMREKDVFDDIPKWEGKQFDSPMPSPFQGGSFTLPLDVMKNEIVTETSPFAPAFLQPDDKKSLQQTSGPATAKDSFKIEEPHEAKPDKMAEAPPSEAMTLPKDAHIPVVEEHVMGKVLEEEKEAINQETVQQRDTFTPSGQEPILTEKETELKLEEKTTISDKEAVPKESKPPKPADEEIGIIQTSTEHTFSEQKDQEPTTDMLKQDSFPVSLEQAVTDSAMTSKTLEKAMTEPSALIEKSSIQELFEMRVDDKDKIEGVGAATSAELDMPFYEDKSGMSKYFETSALKEEATKSIEPGSDYYELSDTRESVHESIDTMSPMHKNGDKEFQTGKESQPSPPAQEAGYSTLAQSYPSDLPEEPSSPQERMFTIDPKVYGEKRDLHSKNKDDLTLSRSLGLGGRSAIEQRSMSINLPMSCLDSIALGFNFGRGHDLSPLASDILTNTSGSMDEGDDYLPATTPALEKAPCFPVESKEEEQIEKVKATGEESTQAEISCESPFLAKDFYKNGTVMAPDLPEMLDLAGTRSRLASVSADAEVARRKSVPSETVVEDSRTGLPPVTDENHVIVKTDSQLEDLGYCVFNKYTVPLPSPVQDSENLSGESGTFYEGTDDKVRRDLATDLSLIEVKLAAAGRVKDEFSVDKEASAHISGDKSGLSKEFDQEKKANDRLDTVLEKSEEHADSKEHAKKTEEAGDEIETFGLGVTYEQALAKDLSIPTDASSEKAEKGLSSVPEIAEVEPSKKVEQGLDFAVQGQLDVKISDFGQMASGLNIDDRRATELKLEATQDMTPSSKAPQEADAFMGVESGHMKEGTKVSETEVKEKVAKPDLVHQEAVDKEESYESSGEHESLTMESLKADEGKKETSPESSLIQDEIAVKLSVEIPCPPAVSEADLATDERADVQMEFIQGPKEESKETPDISITPSDVAEPLHETIVSEPAEIQSEEEEIEAQGEYDKLLFRSDTLQITDLGVSGAREEFVETCPSEHKGVIESVVTIEDDFITVVQTTTDEGESGSHSVRFAALEQPEVERRPSPHDEEEFEVEEAAEAQAEPKDGSPEAPASPEREEVALSEYKTETYDDYKDETTIDDSIMDADSLWVDTQDDDRSIMTEQLETIPKEEKAEKEARRSSLEKHRKEKPFKTGRGRISTPERKVAKKEPSTVSRDEVRRKKAVYKKAELAKKTEVQAHSPSRKFILKPAIKYTRPTHLSCVKRKTTAAGGESALAPSVFKQAKDKVSDGVTKSPEKRSSLPRPSSILPPRRGVSGDRDENSFSLNSSISSSARRTTRSEPIRRAGKSGTSTPTTPGSTAITPGTPPSYSSRTPGTPGTPSYPRTPHTPGTPKSAILVPSEKKVAIIRTPPKSPATPKQLRLINQPLPDLKNVKSKIGSTDNIKYQPKGGQVQIVTKKIDLSHVTSKCGSLKNIRHRPGGGRVKIESVKLDFKEKAQAKVGSLDNAHHVPGGGNVKIDSQKLNFREHAKARVDHGAEIITQSPGRSSVASPRRLSNVSSSGSINLLESPQLATLAEDVTAALAKQGL

SEQ ID NO: 300069 - DNA, 5472 bp, Artificial Sequence
  derived and/or modified sequence
atggctgacgaacgaaaggacgaggctaaggccccacattggaccagtgcgccgttgactgaggcctcagctcactctcaccccccagaaattaaagatcagggcggcgcgggtgagggcctggttaggtccgcgaatggatttccgtacagggaagacgaggagggggcatttggagagcatgggtcacagggcacatattcgaatacaaaggagaacggcatcaacggggagctcacctccgccgatagggaaaccgcagaagaggtatccgctcgcattgtccaggtagttacagctgaagccgtggcagtgctcaagggcgaacaagagaaagaagcccaacacaaggatcagaccgctgccctgccactagctgccgaggagactgctaacctgcccccctctccacctccaagtcctgcctcagaacaaaccgttactgtcgaagaggcttccaagatggagttccacgaccagcaggaactcacaccctcaacggctgagcctagcgaccaaaaggagaaggaatcagagaaacagagtaagcccggagaagatttgaaacacgccgcattagtgtcccagccggagacaaccaagacgtaccccgataagaaagacatgcaaggcacggaggaggaaaaggcccctctcgccttgtttggccacacactggtggcaagtctggaagacatgaagcagaaaaccgagcccagcctggtcgtgccaggcatcgacttacccaaagagcctcctacccccaaagaacagaaagactggtttatcgagatgcccactgaagctaaaaaggatgaatggggccttgtggccccaatctcccccggacctctgacgcctatgcgagagaaagacgtatttgacgatatcccgaaatgggagggaaagcagttcgatagtccaatgccttccccattccaaggtggcagtttcacgctgccgctggacgtaatgaaaaacgagatagtcaccgaaacatcccccttcgcccccgcgtttctgcagcccgatgacaaaaaatccctgcaacagacgagcgggccagctactgctaaggacagctttaaaatcgaggagcctcatgaggcaaagcccgacaaaatggctgaggcccctccctctgaagcgatgactctccctaaggacgcacatatccctgttgtggaagaacacgtcatgggcaaggtgctggaagaggaaaaagaagctattaaccaggaaaccgtgcagcagagggacacgtttacccctagcggacaagagcctatcctgactgaaaaagagactgaactgaagctcgaggaaaaaacaacgatctctgacaaggaggcagtgcccaaggagagcaagcctccgaaaccagccgatgaggagattggaattattcaaacttccacagaacacactttctcggagcaaaaagatcaggaacccacaactgatatgttaaaacaagattcatttcccgtgagcctcgaacaggccgtcacagactccgccatgacatcgaagaccctcgagaaagcaatgactgaaccaagcgcactgatcgagaagagttccatccaggagctattcgagatgcgggtcgatgacaaggacaaaatcgaaggtgtcggggccgctacaagcgccgaactcgatatgcccttctatgaagataaatcaggaatgtccaaatacttcgagacctctgcacttaaagaagaagccacaaagagcattgaacccggctccgactattacgagctttccgacacacgcgagtctgttcatgaatctatcgatacaatgagtccaatgcacaagaacggagacaaggagtttcagaccggtaaggaaagtcagccttcgccaccagctcaagaggctggttattctacccttgctcagagctatccctcggatcttcccgaagagccttcctccccacaggaacgcatgttcacaattgacccaaaggtatacggagaaaagagagatctgcatagcaaaaacaaggatgatttgactctctcgcgctcgttgggcctgggggggagatccgccatcgaacagagaagtatgagcatcaatcttcctatgtcgtgtctggattccatcgccttgggttttaacttcgggaggggccacgatcttagtcccctcgcctccgatatcctgaccaataccagtggaagtatggacgagggcgatgattatctgccagccactactcccgcactggagaaagctccgtgttttccagtcgagagcaaagaggaagagcagattgagaaagtcaaggccacgggtgaagagagcacccaagccgagatctcatgcgagagtccctttctggccaaagacttctacaagaatggcacagtaatggcgcctgacctgccggagatgttggatctggcggggacccggtcccgtctcgcttcagtaagcgccgatgccgaggttgcacgcagaaagtcagtgccaagcgaaaccgtggtagaagattcccgcaccggcctgccaccggtgaccgatgaaaaccatgtgatcgtgaaaacggactcccaacttgaagacctcggttattgtgtctttaataaatacaccgtcccactgcctagtcccgttcaggatagcgagaatctgtcaggtgaatccggaacattctacgaaggaactgatgacaaggtccggagggacttggcaacagacctatctcttattgaagtaaagctagccgctgctggccgcgtgaaggacgaattctccgtagacaaggaggcatccgcacatatttctggcgacaaaagcggtctgagcaaggagttcgaccaggagaaaaaggccaatgaccggctggacactgtcctagagaagtcggaagagcacgcagactctaaggaacatgctaaaaagaccgaagaagcaggcgacgagattgagacttttgggctcggagtaacctacgagcaggcattagccaaagatctctccatccccacggacgcaagttcggagaaggctgagaagggactcagcagcgtccccgagattgccgaggtggagccaagtaagaaagtggagcaaggcttagactttgctgtgcagggacagcttgacgttaagatatcagacttcggccagatggcatctggactgaatattgatgatagaagagcgacagaactgaagctggaggctactcaggacatgacacctagcagcaaagctcctcaggaagccgacgcattcatgggagtagaatccggacacatgaaagaagggaccaaggtatccgagaccgaggtcaaagagaaggtagcgaagcctgatctggtgcaccaggaagcggtggacaaggaagagtcatatgagtcttccggtgagcatgagagtctgacaatggagtctctgaaagcggatgaggggaagaaagagacatcacccgaatcatctctgatccaagacgaaatcgccgtgaaactgtctgttgaaatcccgtgcccccctgcagtgtccgaggctgaccttgctacagacgagcgcgccgacgtgcagatggagtttatccagggccccaaggaggagtctaaggagactccggatatctctatcaccccctctgacgtggctgaaccacttcacgaaacgatcgtaagcgaaccagcggagattcagtctgaggaagaagagatagaagctcaaggggagtacgacaaattactgtttcgttctgatactctgcagataactgacctgggagtcagcggtgcccgggaggagttcgtggaaacatgtcccagtgaacacaagggggtaatcgagtcagtcgtgaccattgaggacgatttcattacagtcgtgcagacaactactgatgaaggggagtccggaagccactccgtgagatttgcggcccttgagcaacctgaagtggaaaggagaccctccccccatgacgaagaggaatttgaagtcgaagaagcagcggaagcacaggcagaaccaaaggacggttctcctgaggcccccgcgtctcctgaacgcgaggaggtggccttgtccgagtacaagactgagacttacgatgattataaggacgagacgaccatagacgactcaatcatggatgcagacagtctctgggtcgatactcaggacgacgaccgcagcatcatgaccgaacagttggaaacaatccctaaggaagaaaaagccgaaaaggaggccaggcgtagctccttagagaaacaccgcaaggagaagccattcaagactgggcgaggccggatttcaacacctgaaaggaaagtggctaaaaaagagccctcgacggtctcacgggacgaagtgcggaggaaaaaggcagtatataaaaaagcggagctcgccaaaaagactgaagtgcaggcccattcaccctctcgcaaattcattctgaagccggctatcaaatacacaaggcccacccatttatcttgcgtgaaacgcaaaacaactgccgcaggaggggaaagcgctcttgccccatccgtattcaaacaggctaaggataaagtttctgacggagtcacaaagtctcctgagaagaggtccagtctgcctcgtcccagctctattctgcccccacgacggggtgtcagcggagacagggacgaaaactccttctctttgaactcttccattagcagctctgctcgcagaacaacaagatctgagccgatacggagggctggtaaatccggtacaagtacaccaaccacaccaggctctaccgcgataacaccaggcacaccaccatcgtactcttcacgaacaccaggaacgcctggcactccctcctaccctaggacccctcatacaccaggaacccccaagtccgccatcctggtaccatccgagaaaaaagtggcgattatacggactcctcctaaatctccagccacacccaagcagctcagattaatcaaccagccactgccagacctgaagaatgtaaaatctaagatcgggtcgaccgacaacatcaagtatcaacccaagggcggccaagtgcagattgtgacaaaaaaaatagatttgtctcatgtgaccagtaaatgtggatctcttaagaatattcgtcatcggccaggcggcggacgggtgaagattgaatctgtgaagctcgactttaaggagaaggctcaggccaaggttgggtcactggacaacgcgcaccatgtacctgggggcgggaatgtcaagattgattctcaaaaactaaacttccgcgagcatgccaaagccagagtggaccatggcgctgaaattattacacagtctcccggccggtcatctgtggcttctcctagacgactgtcgaacgtgagttcctcaggttccatcaacctgctcgagtccccacagctggccactctcgcggaggatgtaaccgctgccctggctaaacaaggcttgtag

SEQ ID NO: 300070 - DNA, 5472 bp, Artificial Sequence
  derived and/or modified sequence
atggctgatgagaggaaggatgaggccaaggccccccactggaccagcgcccccctgacagaggccagcgcccacagccaccccccagagatcaaggaccagggcggggccggggagggcctggtgcgcagcgccaacggcttcccctaccgggaggatgaggagggcgccttcggggagcacggcagccagggcacctacagcaacaccaaggaaaatggcatcaacggggagctgaccagcgctgaccgggagacagctgaggaggtgtctgcccgcatcgtgcaggtggtgacagctgaggccgtggccgtgctgaagggggagcaggagaaggaggcccagcacaaggaccagacagctgccctgcccctggccgctgaggagacagccaacctgccccccagccccccacccagccctgccagcgagcagacagtgacagtggaggaggccagcaagatggagttccatgaccagcaggagctgacccccagcacagctgagcccagcgaccagaaggagaaggagagcgagaagcagagcaagccaggagaggacctgaagcatgctgccctggtgtcccagcctgagaccaccaagacctacccagacaagaaggacatgcagggcacagaggaggagaaggcccccctggccctgtttggccacaccctggtggccagcctggaggacatgaagcagaagacagagcccagcctggtggtgcccggcatcgacctgcccaaggagccccccacccccaaggagcagaaggactggttcatcgagatgcccacagaggccaagaaggatgagtggggcctggtggcccccatcagccctggccccctgacccccatgagggagaaggatgtgtttgatgacatccccaagtgggagggcaagcagtttgacagccccatgcccagccccttccagggcggcagcttcaccctgcccctggatgtgatgaagaatgaaattgtgacagagaccagcccctttgccccagccttcctgcagccagatgacaagaagagcctgcagcagaccagcggccctgccacagccaaggacagcttcaagattgaggagccccatgaggccaagccagacaagatggccgaggcccctccttctgaggccatgaccctgcccaaggatgcccacatccctgtggtggaggagcacgtgatgggcaaggtgctggaggaggagaaggaggccatcaaccaggagaccgtgcagcagagggacaccttcaccccatctggccaggagcccatcctgacagagaaggagacagagctgaagctggaggagaagaccaccatcagtgacaaggaggccgtgcccaaggagagcaagccacccaagccagcagatgaggagatcggcatcatccagaccagcacagagcacaccttcagcgagcagaaggaccaggagcccaccacagacatgctgaagcaggacagcttccctgtgtccctggagcaggccgtgacagacagcgccatgaccagcaagaccctggagaaggccatgacagagcccagcgccctgattgagaagagcagcatccaggagctgtttgagatgagggtggatgacaaggacaagattgaaggagtgggcgccgccaccagcgctgagctggacatgcccttctatgaggacaagagcggcatgagcaagtactttgagaccagcgccctgaaggaggaggccaccaagagcattgagcccggcagtgactactatgagctgagtgacacccgggagagcgtgcatgagagcattgacaccatgagccccatgcacaagaatggagacaaggagttccagacaggcaaggagagccagcccagccccccagcccaggaggccggctacagcaccctggcccagagctaccccagcgacctgcctgaggagcccagcagcccccaggagaggatgttcaccatcgaccccaaggtgtatggagagaagagggacctgcacagcaagaacaaggatgacctgaccctgagccgcagcctgggcctgggcggccgcagcgccatcgagcagaggtccatgagcatcaacctgcccatgagctgcctggacagcatcgccctgggcttcaactttggccggggccatgacctgagccccctggccagtgacatcctgaccaacaccagcggctccatggatgaaggagatgactacctgcctgccaccaccccagccctggagaaggccccctgcttccctgtggagagcaaggaggaggagcagatcgagaaggtgaaggccactggagaggagagcacccaggccgagatcagctgtgagagccccttcctggccaaggacttctacaagaatggcaccgtgatggccccagacctgcctgagatgctggacctggccggcaccaggagccggctggcctctgtgtctgcagatgctgaggtggcccggaggaagtctgtgcccagcgagaccgtggtggaggacagcaggacaggcctgccccctgtgacagatgaaaatcatgtgattgtgaagacagacagccagctggaggacctgggctactgtgtgttcaacaagtacacagtgcccctgcccagccctgtgcaggacagcgagaacctgagcggggagagcggcaccttctatgagggcacagatgacaaggtgagaagagacctggccacagacctgagcctgattgaggtgaagctggccgccgccggccgggtgaaggatgagttctctgtggacaaggaggccagcgcccacatcagcggggacaagagcggcctgagcaaggagtttgaccaggagaagaaggccaatgaccggctggacacagtgctggagaagtctgaggagcacgccgacagcaaggagcacgccaagaagacagaggaggccggagatgaaattgagaccttcggcctgggcgtgacctatgagcaggccctggccaaggacctgagcatccccacagatgccagcagcgagaaggccgagaagggcctgagctctgtgcctgagattgctgaggtggagcccagcaagaaggtggagcagggcctggactttgctgtgcagggccagctggatgtgaagatcagtgactttggccagatggccagcggcctgaacattgatgacagaagagccacagagctgaagctggaggccacccaggacatgacccccagcagcaaggccccccaggaggctgatgccttcatgggcgtggagagcggccacatgaaggagggcaccaaggtgtctgaaacagaggtgaaggagaaggtggccaagccagacctggtgcaccaggaggccgtggacaaggaggagagctatgagagcagcggggagcacgagagcctgaccatggagagcctgaaggcagatgagggcaagaaggagaccagccctgagagcagcctcatccaggatgaaattgctgtgaagctgtctgtggagatcccctgccccccagctgtgtctgaggccgacctggccacagatgagcgggcagatgtgcagatggagttcatccagggccccaaggaggagagcaaggagaccccagacatcagcatcacccccagtgatgtggccgagcccctgcacgagaccatcgtgtctgagcctgctgagatccagagcgaggaggaggagattgaggcccagggcgagtatgacaagctgctcttcagaagtgacaccctgcagatcacagacctgggcgtgtctggggcccgggaggagtttgtggagacctgccccagcgagcacaagggcgtgattgaatctgtggtgaccattgaagatgacttcatcaccgtggtgcagaccaccacagatgaaggagagagcggcagccacagcgtgcgctttgctgccctggagcagcctgaggtggagcggcggcccagcccccatgatgaggaggagtttgaggtggaggaggccgctgaggcccaggccgagcccaaggatggcagccctgaggccccagccagccctgagcgggaggaggtggccctgtctgagtacaagacagagacctatgatgactacaaggatgagaccaccattgatgacagcatcatggatgctgacagcctgtgggtggacacccaggatgatgacaggagcatcatgacagagcagctggagaccatccccaaggaggagaaggccgagaaggaggcccggcgcagcagcctggagaagcacaggaaggagaagcccttcaagacaggccggggccgcatcagcaccccagagaggaaggtggccaagaaggagcccagcacagtgtccagagatgaggtgcggaggaagaaggctgtgtacaagaaggccgagctggccaagaagacagaggtgcaggcccacagccccagcaggaagttcatcctgaagccagccatcaagtacacccggcccacccacctgagctgtgtgaagaggaagaccacagctgctggaggagagagcgccctggcccccagcgtcttcaagcaggccaaggacaaggtgtctgatggagtgaccaagagccctgagaagaggagcagcctgccccggcccagcagcatcctgcccccaagaagaggagtgtctggggacagagatgagaacagcttcagcctgaacagcagcatcagcagcagcgcccggaggaccaccaggtctgagcccatcagaagagctgggaagagcggcaccagcacccccaccaccccaggcagcacagccatcaccccaggcaccccacccagctacagcagcaggaccccaggcaccccaggcacccccagctaccccaggaccccccacaccccaggcacccccaagagcgccatcctggtgcccagcgagaagaaggtggccatcatccgcaccccacccaagagccctgccacccccaagcagctgcggctcatcaaccagcccctgcctgacctgaagaatgtgaagagcaagattggcagcacagacaacatcaagtaccagcccaagggcggccaggtgcagatcgtgaccaagaagattgacctgagccacgtgaccagcaaatgtggcagcctgaagaacatccgccacaggcctgggggcggccgggtgaagattgaatctgtgaagctggacttcaaggagaaggcccaggccaaggtgggcagcctggacaatgcccaccacgtgcctgggggcggcaatgtgaagattgacagccagaagctgaacttccgggagcacgccaaggcccgggtggaccacggggctgagatcatcacccagagccctggccgcagctctgtggccagcccccggcggctgagcaatgtgagcagcagcggcagcatcaacctgctggagagcccccagctggccaccctggccgaggatgtgacagctgccctggccaagcagggcctgtag

SEQ ID NO: 300071 - DNA, 5472 bp, Artificial Sequence
  derived and/or modified sequence
atggcagatgaacggaaagatgaagcaaaggcacctcactggacctcagcaccgctaacagaggcatctgcacactcacatccacctgagattaaggatcaaggcggagcaggggaaggacttgtccgaagcgccaatggattcccatacagggaggatgaagagggtgcctttggagagcatgggtcacagggcacctattcaaataccaaagagaatgggatcaacggagagctgacctcagctgacagagaaacagcagaggaggtgtctgcaaggatagttcaagtagtcactgctgaggctgtagcagtcctgaaaggtgaacaagagaaagaagctcaacataaagaccagactgcagctctgcctttagcagctgaagaaacagctaatctgcctccttctccacccccatcacctgcctcagaacagactgtcacagtggaggaagcctcgaagatggagttccacgatcaacaggaattgactccctctacagctgagccttcagaccagaaggaaaaggagtcagagaagcaaagtaagcctggtgaagaccttaaacatgctgccttagtttctcagccagagacaactaaaacttaccctgataaaaaggacatgcaaggcacggaagaagaaaaagcacccctagctttgtttgggcacactcttgttgccagcctggaagacatgaaacagaagacagaaccaagccttgtagtacctggcattgacctccctaaagagcctccaactccaaaagaacaaaaggactggttcatcgaaatgccaacggaagcaaaaaaggatgagtggggtttagttgcccccatatctcctggccctctgactcccatgagggaaaaagatgtatttgatgatatcccaaaatgggaagggaaacagtttgattctcccatgccaagtccctttcaagggggaagcttcactcttcctttagatgtcatgaagaatgaaatagttacagaaacatcgccctttgcccctgcctttttacagccagatgacaaaaaatctctgcaacaaaccagtggcccagctactgccaaagatagttttaaaattgaagagccccatgaggctaaacctgacaaaatggcagaagcaccaccctcagaggcaatgaccttacccaaagatgctcacattccagttgtagaagaacatgttatggggaaagttttagaggaagaaaaggaggccataaatcaagagactgtgcagcaaagggatactttcacccccagtggacaggaacctatacttactgaaaaggaaactgagctgaagcttgaagaaaaaaccaccatttctgacaaagaagctgtgccaaaagagagtaaacccccaaaacctgcagatgaagaaataggcataattcagacctccacagagcacactttctcagaacagaaagaccaagagcctaccacagatatgttgaaacaggactcgttccctgtaagtttggagcaagcagttacagattcagccatgacctctaaaacactggagaaagccatgaccgaaccatctgcattaattgaaaagagctcaattcaggaactttttgaaatgagagttgatgacaaagataagattgaaggagttggagctgcaacatcagctgagcttgatatgccattttatgaagataaatcaggaatgtccaagtactttgaaacatctgccttgaaagaagaagcaacaaaaagcattgagccaggcagtgattactatgaactgagtgacactagagaaagtgtccatgagtctattgataccatgtctcccatgcataaaaatggtgacaaggagtttcaaacaggaaaagaatcccagcccagtcctccagcacaagaagcagggtacagcactctcgcacagagttatccatcagatttacctgaagaacccagttctcctcaagaaagaatgttcactattgatccaaaagtgtatggagagaaaagggacctccacagtaagaataaggatgatttgacccttagcaggagtttaggacttggtggtaggtctgcaatagaacaaagaagcatgtcaatcaatttgccgatgtcttgcctagattccatagcccttggatttaactttggtcggggacatgatctttctcctctggcttccgatattctaaccaacactagtggaagtatggatgaaggggatgattaccttccagccaccacacctgcactggagaaagccccttgcttccctgtagaaagcaaagaggaagaacagatagagaaagtaaaagctactggagaagaaagtactcaagcggagatatcatgtgagtctcctttcctagccaaagatttttacaaaaatggtactgtcatggcacctgaccttcctgaaatgctagatctggcaggcacaaggtcaagattggcttctgtgagtgcagatgctgaggttgccaggaggaaatcagtcccatcagagactgtggttgaggatagtcgtactggcttgcccccggtaactgatgaaaaccatgtcattgtaaaaacggacagtcagctcgaagacctgggctactgtgtgttcaataagtacacagtcccattgccatcacctgttcaagacagtgagaatttatcaggggagagtggtaccttttacgaaggcactgatgataaagttcgaagagatttggccacagacctttcactgattgaagtgaaactggcagcagccggaagagtcaaagatgagttcagtgttgacaaagaagcatccgcgcatatctctggtgacaaatcaggactgagtaaggagtttgaccaagagaagaaagctaatgataggttggatactgtactagaaaagagtgaagaacatgctgattcaaaagaacatgccaagaaaactgaagaggctggtgatgaaatagaaacattcggattaggagtaacctatgagcaagctttggccaaagatttgtcaataccaacagatgcatcctctgagaaagcagagaagggtcttagttcagtgccagagatagctgaggtagaaccatccaaaaaggtggaacaaggtctggattttgctgtccagggtcaactagatgttaaaattagtgactttggacagatggcttcagggctaaacatagatgatagaagggcaacagagctaaaacttgaggctacacaggacatgaccccctcatccaaagcaccgcaggaggcagatgcatttatgggtgttgagtctggccacatgaaagaaggcactaaagttagtgagacagaagtcaaagagaaggtggccaagcctgacttggtgcaccaggaggctgtagacaaggaggagtcctatgaatctagtggtgagcatgaaagtctcaccatggagtccttgaaagctgatgagggcaagaaggaaacatctccagaatcatctctaattcaagatgagattgccgtcaaattgtcagtggaaataccttgcccacctgctgtttcagaggctgatttagccacagatgagagagctgatgtccagatggaatttattcaggggccaaaagaagaaagcaaagagaccccagatatatccatcacgccttctgatgttgcagagccattgcatgaaacgatcgtatctgaaccagcagagattcagagtgaggaagaagagatagaagcccagggagaatatgataaactgctcttccgctcagacacccttcagataactgacctgggtgtctcaggtgccagggaggaatttgtggagacctgcccaagtgaacacaaaggagtgattgagtctgttgtgaccatcgaggatgatttcatcactgtagtgcaaaccacaactgatgaaggggagtcagggtcccacagcgtgcgttttgcagccctagagcagcctgaggtggaaaggagaccatctcctcatgatgaagaagagtttgaagtagaagaggcagctgaagcccaggcagaacccaaagatggttccccagaggctccagcttcccctgagagagaagaggttgcactttctgaatataagacagaaacctatgacgattacaaagatgagaccaccattgacgactccatcatggacgctgacagcctctgggtggacactcaagatgatgataggagcatcatgacagaacagttagaaactattcctaaagaggagaaagctgaaaaggaagctcggagatcatctcttgagaaacatagaaaagaaaagccttttaaaaccgggagaggcagaatttccactcctgaaagaaaagtagctaaaaaggaacctagcacagtctccagagatgaagtgagaaggaaaaaagcagtttataagaaggctgaacttgctaaaaaaacagaagttcaggcccactctccctccaggaaattcattttaaaacctgctatcaaatatactagaccaactcatctctcctgtgttaagcggaaaaccacagcagcaggtggggaatcagctctggctcccagtgtatttaaacaggcaaaggacaaagtctctgacggagtaaccaagagcccagaaaagcgctcttctctcccaagaccttcctccattctccctcctcggcgaggtgtgtcaggagacagagatgagaattccttctctctcaacagttctatctcttcttcagcacggcggaccaccaggtcagagccaattcgcagagcagggaagagtggtacctcaacacccactacccctgggtctactgccatcactcctggcaccccaccaagttattcttcacgcacaccaggcactcctggaacccctagctatcccaggacccctcacacaccaggaacccccaagtctgccatcttggtgccgagtgagaagaaggtcgccatcatacgtactcctccaaaatctcctgcgactcccaagcagcttcggcttattaaccaaccactgccagacctgaagaatgtcaaatccaaaatcggatcaacagacaacatcaaataccagcctaaaggggggcaggtacaaattgttaccaagaaaatagacctaagccatgtgacatccaaatgtggctctctgaagaacatccgccacaggccaggtggcggacgtgtgaaaattgagagtgtaaaactagatttcaaagaaaaggcccaagctaaagttggttctcttgataatgctcatcatgtacctggaggtggtaatgtcaagattgacagccaaaagttgaacttcagagagcatgctaaagcccgtgtggaccatggggctgagatcattacacagtccccaggcagatccagcgtggcatcaccccgacgactcagcaatgtctcctcgtctggaagcatcaacctgctcgaatctcctcagcttgccactttggctgaggatgtcactgctgcactcgctaagcagggcttgtga

SEQ ID NO: 300072 - DNA, 5472 bp, Artificial Sequence
  derived and/or modified sequence
atggccgacgagcggaaggacgaggccaaggccccccactggacctcagcccccctaaccgaggcttcagcccactcccatccacctgaaatcaaggaccaaggcggagccggcgagggcctcgtgcgtagtgccaacggattcccttacagggaggacgaagagggcgcttttggcgaacatggaagtcagggcacctactccaacaccaaagaaaacgggatcaatggcgagctcacgtcggcggatcgggaaactgcagaggaggtctcagcacgaattgttcaggtggtcactgctgaggccgtggcagttttgaagggtgagcaggagaaggaggcacaacataaggaccagacagccgcccttcccctcgcggccgaggagacagctaatctgcccccaagcccaccacctagccctgccagcgaacaaacagtgaccgtagaggaagccagtaagatggaattccatgatcaacaggagctgacccccagcaccgccgagccatcagaccagaaggagaaggagtctgagaaacagtccaagcctggagaggatttgaagcatgccgcactggtcagccagcccgaaactacaaaaacctaccccgacaaaaaggatatgcaaggaacagaagaagaaaaggcgcctttagcactcttcggtcatacgctcgtcgcctctcttgaggatatgaagcagaaaactgaaccttcactcgtggtcccgggcattgacctcccaaaagaaccaccaacccctaaggagcaaaaagattggttcatcgaaatgccaacagaggctaagaaagatgagtgggggttagtcgcccctataagtcctggccccctgacaccaatgagggagaaggatgtatttgatgatattcctaagtgggaggggaaacagtttgactcgcctatgccctccccgttccagggcggctccttcaccctgcccctagacgtgatgaagaacgagatcgtcactgaaacgagcccatttgctccggcattcctgcagcccgatgataagaaatccttgcagcaaacctcagggcctgccaccgccaaggactctttcaagatcgaagaaccgcatgaagctaagcctgacaagatggccgaagccccaccatctgaggccatgactctccccaaagacgcgcacatccccgtggtggaggaacatgtgatgggtaaagtgttggaagaggagaaagaagccattaaccaggaaacagttcagcagcgagatacatttactcctagtgggcaggagcccatactcacagagaaggagacggaacttaagcttgaggagaaaacgaccataagcgacaaggaggctgtccccaaagagagcaaaccgcccaagccagctgacgaagagatagggatcattcaaacttctaccgaacacactttcagcgaacagaaagaccaggagcctactactgacatgctcaagcaggactcctttcctgtcagtctcgaacaggccgtgacggattccgccatgacttcaaaaactctggagaaggccatgaccgagccctcggctctgatcgaaaaatcatcaattcaagagctgtttgagatgagagttgatgacaaggacaagattgaaggcgtcggtgccgccacttctgctgaattagacatgcctttttacgaagataagtctggcatgtccaaatacttcgagacttcagctcttaaagaagaggccactaagtccattgaaccggggtctgactattatgagctgtctgacaccagggaaagcgttcacgaatctatcgacacgatgtcacctatgcacaaaaacggggataaggaattccagaccggcaaagagagccaacctagtcctcccgcacaggaagcaggatattctactctcgcacagagttatccaagtgatctgcctgaagagcccagcagtccccaggaacgcatgttcacaatcgacccgaaggtgtacggcgaaaagcgcgatctccactcgaaaaataaggacgacctgactctaagcaggtctctggggttaggaggcaggagcgctatcgagcaacgatcaatgtctatcaacctgcccatgtcctgcctggattcgattgcacttggctttaactttggacgaggacatgacctcagtcctctggcgagcgacattctgactaacacctctgggtcgatggatgagggagacgattacctgccagctactacccctgccctggaaaaggcaccgtgcttcccagtggagtccaaagaagaagagcagatcgagaaggtgaaggctaccggtgaggaatccacgcaggcagaaattagctgtgaatcaccttttctggcgaaagacttttataagaacggcaccgttatggcgcctgacctgccagaaatgctggacctcgcgggcactcgttcgaggctggcgtcggtttctgccgatgccgaggtcgcacgccggaaatccgttccaagtgaaactgttgttgaggatagtcgcacagggctgccccccgtgaccgatgagaatcatgtaatcgttaaaaccgatagccagctggaagacctcgggtattgcgtgtttaacaaatacacagtaccactgcccagccctgtgcaagatagtgaaaacctttctggcgagtcaggcacattttacgaggggaccgacgacaaagtaagacgggatctggccactgacctgagtctgatcgaggttaagctggccgcagcagggcgagtgaaggacgaattcagcgtggacaaggaagcgagcgcccacatctctggagataagtccggattgagcaaagagtttgaccaagaaaagaaagcgaacgacaggctggatacagttttagaaaagagcgaggaacacgccgattccaaagagcatgccaagaagacagaggaagctggggatgagatcgagaccttcgggctcggcgtgacatatgaacaggcgttagcaaaggatcttagcattccaactgatgcgtcttcggagaaagccgagaaaggactgtctagtgttcccgaaattgccgaagtggaacctagtaagaaggtggagcaaggcttggacttcgccgtgcagggccagctggatgtgaaaatttccgatttcgggcaaatggcctcaggattaaatatcgacgataggagagcgaccgaactcaagttggaagccactcaggacatgacgcccagctccaaggccccacaggaggcagacgcgtttatgggagtggaatcgggtcacatgaaggagggcaccaaggtttcggaaactgaggtgaaggagaaagtagccaaacccgacctggtgcatcaagaagccgttgataaagaggagtcctacgaaagctctggcgagcacgaatccttgactatggaaagtctgaaggccgacgaagggaaaaaagagacctcccccgagagctctctgatccaggatgaaatcgctgtgaaactatcagtcgaaatcccttgtcccccggcagtctccgaagcagatttggcaacagacgaaagagccgacgttcagatggagtttattcagggtcccaaggaagaatctaaagaaacacccgatatcagcatcactccctcagacgtggctgagcctctccatgagacaattgtgtcagaacctgccgagatacagtccgaggaggaggaaattgaagctcagggggaatacgacaagctgctgtttcggtccgacacactgcagatcacagatttgggtgtgagcggagccagggaagaattcgtggaaacctgtccatccgaacataagggtgttattgaatcagtggtgaccattgaggacgactttatcaccgtagtccagacaacaaccgatgaaggagagtccggatcccattctgttcgtttcgcagccctggagcagcccgaggtagaacgcagaccttccccccacgacgaggaagagttcgaggtggaagaagcggcggaggcccaggcggagccgaaggatggttcacccgaggcaccagctagtcccgagcgtgaagaggtagcccttagcgagtacaagaccgaaacatacgatgactataaagacgaaaccacaattgatgatagcattatggacgcagactccctgtgggtcgacacacaggatgatgaccggtcaattatgacagaacagctagaaaccataccaaaggaagagaaagccgagaaggaggctaggcggtccagtctggagaagcaccgcaaagaaaagcctttcaaaacaggtagaggacgtatcagcaccccagagcgaaaagtggctaagaaagagccctctactgtgagccgggatgaggtccgacgaaaaaaggccgtgtataagaaggctgagctggctaagaagaccgaagttcaggcccactctccatcccgtaaatttattcttaagcctgcaattaagtacacacggcccacccatctgagttgcgtgaagcgcaagaccaccgccgccggcggtgagtcagcactggcaccttccgtgttcaagcaggcaaaagataaagtttccgacggcgtgaccaagagcccagaaaagcgaagtagcctgccacgcccctcctctatcctcccacctagaaggggcgttagcggggatagagacgaaaactccttcagcttgaatagtagtatttctagctccgctcgccgcacaacgcgctctgaaccaatacgacgagctggcaaatctggcactagcactccgaccactccgggaagcactgcaattaccccaggcacgcccccgtcttattcaagccgaacccctggcacccctggcacacccagttatcctcggacgccgcacacccctggcacaccaaaaagcgccatcctcgttccatcagaaaagaaagtcgcaatcatccgtacccctcctaagagccctgccacaccaaagcagctgagactcataaatcaacctctgcctgacctgaagaatgtgaagtctaagatcggctctactgacaacatcaaataccagccaaagggcggccaggttcagattgttacgaagaagatagacctgtcccatgtcacttcaaaatgcggaagtctgaagaatattcgccacaggcccggaggcggacgggtcaagattgagtctgtaaaactcgacttcaaggagaaagcacaagcaaaggttggcagcctggataacgctcatcacgtgccgggaggcggaaatgtgaaaattgattctcagaaattgaatttcagagaacacgcgaaggctcgcgtggatcacggagcggagatcatcacccagtcgcctggaagaagcagcgtggctagcccacgacgcctgagcaatgtttccagctccggatctattaacttgcttgagagtcctcagttagccacgctggcagaggatgtgaccgccgcactggctaagcagggactgtag

SEQ ID NO: 300073 - DNA, 5471 bp, Artificial Sequence
  derived and/or modified sequence
atggcagacgagcgtaaagatgaagcgaaggcaccccactggacttctgcccctctcaccgaggcatcagcacactcccaccctcccgagatcaaagatcaggggggagccggtgagggattggtgagatccgccaatggcttcccatacagagaagatgaagagggtgctttcggcgagcacggctctcagggaacctactcgaataccaaggagaacgggatcaacggggagctcacaagcgctgatcgggaaaccgctgaagaagtctccgcccgaattgtccaggttgtgaccgctgaggctgtcgccgttttaaagggggaacaggagaaagaagcacagcacaaggatcaaaccgcagcacttcccttggctgccgaagaaacagccaatctgcccccaagtcctcccccaagcccggctagcgagcagaccgttaccgttgaagaagcctctaagatggagttccacgatcagcaggagctgacaccatcaacagccgagcctagtgatcaaaaggaaaaagaatctgaaaagcaatcaaaaccaggagaagatttgaagcacgccgctttagtgtctcagcccgagacaacaaagacttaccccgataagaaggacatgcagggcacagaagaagagaaggctcctctcgcgctgttcggccatacactcgtcgctagcttggaggacatgaaacagaagaccgaaccatccctggtggttcctggaatcgacctcccaaaagaaccacccacaccaaaggagcagaaggattggttcatcgaaatgcccacagaggcgaagaaggatgagtgggggcttgtggcacctatttctccagggccactgacccccatgcgggagaaggacgtatttgacgacattccgaaatgggaagggaagcagtttgatagtcccatgccatcacctttccagggcggtagttttaccctaccactggatgtcatgaagaatgaaattgtgactgaaacgtccccctttgccccagcatttctgcaaccagatgataaaaaatccctgcagcagacctctgggccagccactgccaaggacagctttaaaattgaggaaccccacgaggcaaagcctgacaagatggcagaggccccaccatcggaagccatgacgcttccaaaggatgcgcatattcctgtcgtggaggagcatgttatgggcaaagtcctcgaagaagaaaaagaggctattaatcaagagaccgtgcagcagcgagacaccttcacaccttctggacaagaaccgatactaacggagaaggaaacggaactgaagctcgaggaaaagaccacaatcagcgataaggaagcagtgccaaaggaatctaaaccgccaaagcctgctgatgaggaaattggtatcattcagacatcaactgagcacaccttttctgaacagaaggaccaggagcctaccaccgatatgcttaagcaggatagctttccagtgagtctggagcaggccgtgacggattctgcaatgacttctaagaccttagaaaaagcgatgacagagccaagtgccctgatcgagaagagttccatacaggagttatttgaaatgagagttgacgataaggataaaatagagggggtcggggctgccaccagtgctgagctggatatgccgttttacgaggacaagagtgggatgagtaaatacttcgaaacaagcgccctcaaggaagaagcaacgaaatctatcgagcccggatccgactactatgaattaagcgacactagagagagtgttcatgagtctattgatacgatgtctcctatgcataagaatggagataaggagtttcagacaggaaaggagtctcagccatcaccccctgcccaagaggccggatattccacccttgctcaaagttacccttcagatttgccagaggagccctcgtctccccaggagcgtatgttcaccattgacccaaaagtgtatggggagaagagggacctgcatagcaaaaataaggatgatctgacattgtctcgctccctgggactcggcggtcgctcagcaatagagcaaaggagcatgtcgataaacctgccaatgagttgcctggatagtatcgccctgggtttcaattttgggaggggccatgacctgtctcctcttgcctccgacattttaaccaacaccagcggaagcatggatgaaggtgatgactatctacctgccactacacccgctctggagaaagcaccttgtttccctgtggaatctaaagaggaggaacagatagaaaaggtaaaagccacgggagaagaaagcacacaggcggagataagctgtgagtcaccgttccttgccaaggacttttacaagaatggtacagtcatggcacccgatctgccagagatgctggacctcgccggtactaggtcacgcctggccagtgtcagcgctgatgcggaagtggctaggcgaaaatccgttccatccgagaccgtggtggaagattccagaacgggccttccccctgtgactgacgagaatcacgttattgttaaaacagacagtcagctcgaggatttagggtactgcgtgtttaacaagtatacagtgccactcccttctcccgtccaggacagtgaaaacttgagcggtgagtcagggacattttatgaggggactgatgacaaggtgcggagagacctggccacagacctgagcctaatcgaggtcaaactcgcagcagcaggccgagtgaaggatgagtttagtgtggacaaagaggcctctgcacatatcagtggggataaaagtggactgtccaaagagttcgaccaagagaaaaaggctaacgacaggcttgataccgtacttgagaagtctgaggaacacgcagacagcaaggagcacgctaagaagacggaggaggcgggagatgagatcgaaacattcggattgggggtgacgtacgagcaggctttggcgaaggatttatcaatacccaccgacgcttcatctgagaaagccgagaagggcctctcctctgtgcccgagatagcggaagtggaaccctctaaaaaagttgagcagggcctggactttgccgttcaagggcaactggatgtgaagatctcagactttggtcagatggctagtggcctgaatattgacgaccggcgagctaccgaactgaagctggaagctacccaagacatgacgccttcctcaaaagccccacaggaggcagacgctttcatgggggtcgaatccgggcacatgaaagagggaaccaaagtgagtgagactgaggtcaaggagaaggtagccaagcctgacttagtacaccaggaggctgtcgacaaagaagaatcttacgaatcctccggcgagcacgagtcactgacgatggaatctctaaaagccgatgaagggaaaaaagagactagcccagagagttcgctcattcaggacgagatcgctgtaaagctgagtgtagagattccatgtcctccagccgtatccgaggctgacctcgctactgacgagcgcgctgacgtgcagatggaattcattcagggcccaaaagaagagtcgaaagagactccagacataagcatcactccctcagacgtggctgagccactgcacgaaacaattgtgtcagagccggctgagatacagtccgaagaggaagagatagaagcccaaggcgaatatgataaactgcttttccgctctgacactcttcagattaccgacctgggcgtatccggcgcacgggaagagtttgtggaaacatgtccctctgagcataagggtgtcattgagtccgtggtcactatcgaggacgactttatcacagtcgttcagactacaactgatgagggggaatcaggcagccactctgttagatttgctgccctggagcaacccgaagtcgagagacgccctagcccccacgatgaggaggagttcgaggtggaggaagcggcagaagcgcaggctgagccaaaggacgggagtcccgaagcccctgcctccccagagagagaggaggtcgcgctgagcgagtataaaactgaaacatacgatgactacaaagatgaaaccactatcgacgattccatcatggacgcggattcattatgggtcgatactcaggacgatgatcgatcaatcatgaccgaacagctggagaccatacctaaggaggagaaggcagagaaggaggctagacgttccagtctcgagaagcatcggaaagaaaagccattcaaaactgggaggggacgtatatccactcccgaacggaaggtcgctaaaaaggaaccctctacagtatctcgagatgaagttagacggaaaaaggcagtctacaagaaggctgaactggccaagaaaactgaggtgcaggcccatagcccgagccgaaaattcattctgaaaccagccatcaagtacacacgcccaacgcacctgtcatgtgtgaaacgaaaaacaaccgctgcgggaggggagagcgcattggccccttcagtatttaagcaggccaaggacaaggtatctgacggcgttaccaagagcccagagaagagaagttcactcccgcgacctagcagtattctaccaccacggaggggcgtgtccggcgatagggatgagaattccttttccctgaacagtagcatctcatccagtgctaggagaactaccaggtccgagcctattagacgcgctggtaaaagcggtacctctactcctaccaccccaggatcaaccgcgatcacaccgggtacaccgccatcatactcttcgagaactccaggcacaccgggtaccccctcttatcccagaacaccacacaccccaggtacccccaaatccgcaattctggtgccctccgaaaagaaggtagcaattatcaggacacccccaaaatcccctgcaactcccaaacagctgcgactcataaatcagccactgccagatctgaagaacgtgaaaagcaagatcggctccacagacaacatcaaataccaacccaaaggcggacaggtacagatcgtgacaaagaaaatcgacctgtcacacgtgacctctaaatgtgggtctttgaagaatatcaggcatcggcctggcggaggcagagtcaaaatcgaaagtgtcaaactcgatttcaaagaaaaggcgcaggctaaggtggggagtctagacaacgctcatcatgtgcctgggggaggcaatgtgaaaatcgactctcaaaagctgaattttcgcgagcacgcaaaggccagggtggaccacggggcagagatcatcacccagagtcctgggagaagcagtgtggctagcccacgacgtcttagtaacgtgtccagcagcggctctattaacctgctggagagcccccagctggcgacactggcagaggatgttactgcggcattggcaaagcaaggtctgta

SEQ ID NO: 300074 - DNA, 5472 bp, Artificial Sequence
  derived and/or modified sequence
atggccgacgagagaaaggacgaggccaaggccccccactggaccagcgcccccctgaccgaggccagcgcccacagccacccccccgagatcaaggaccagggcggcgccggcgagggcctggtgagaagcgccaacggcttcccctacagagaggacgaggagggcgccttcggcgagcacggcagccagggcacctacagcaacaccaaggagaacggcatcaacggcgagctgaccagcgccgacagagagaccgccgaggaggtgagcgccagaatcgtgcaggtggtgaccgccgaggccgtggccgtgctgaagggcgagcaggagaaggaggcccagcacaaggaccagaccgccgccctgcccctggccgccgaggagaccgccaacctgccccccagccccccccccagccccgccagcgagcagaccgtgaccgtggaggaggccagcaagatggagttccacgaccagcaggagctgacccccagcaccgccgagcccagcgaccagaaggagaaggagagcgagaagcagagcaagcccggcgaggacctgaagcacgccgccctggtgagccagcccgagaccaccaagacctaccccgacaagaaggacatgcagggcaccgaggaggagaaggcccccctggccctgttcggccacaccctggtggccagcctggaggacatgaagcagaagaccgagcccagcctggtggtgcccggcatcgacctgcccaaggagccccccacccccaaggagcagaaggactggttcatcgagatgcccaccgaggccaagaaggacgagtggggcctggtggcccccatcagccccggccccctgacccccatgagagagaaggacgtgttcgacgacatccccaagtgggagggcaagcagttcgacagccccatgcccagccccttccagggcggcagcttcaccctgcccctggacgtgatgaagaacgagatcgtgaccgagaccagccccttcgcccccgccttcctgcagcccgacgacaagaagagcctgcagcagaccagcggccccgccaccgccaaggacagcttcaagatcgaggagccccacgaggccaagcccgacaagatggccgaggccccccccagcgaggccatgaccctgcccaaggacgcccacatccccgtggtggaggagcacgtgatgggcaaggtgctggaggaggagaaggaggccatcaaccaggagaccgtgcagcagagagacaccttcacccccagcggccaggagcccatcctgaccgagaaggagaccgagctgaagctggaggagaagaccaccatcagcgacaaggaggccgtgcccaaggagagcaagccccccaagcccgccgacgaggagatcggcatcatccagaccagcaccgagcacaccttcagcgagcagaaggaccaggagcccaccaccgacatgctgaagcaggacagcttccccgtgagcctggagcaggccgtgaccgacagcgccatgaccagcaagaccctggagaaggccatgaccgagcccagcgccctgatcgagaagagcagcatccaggagctgttcgagatgagagtggacgacaaggacaagatcgagggcgtgggcgccgccaccagcgccgagctggacatgcccttctacgaggacaagagcggcatgagcaagtacttcgagaccagcgccctgaaggaggaggccaccaagagcatcgagcccggcagcgactactacgagctgagcgacaccagagagagcgtgcacgagagcatcgacaccatgagccccatgcacaagaacggcgacaaggagttccagaccggcaaggagagccagcccagcccccccgcccaggaggccggctacagcaccctggcccagagctaccccagcgacctgcccgaggagcccagcagcccccaggagagaatgttcaccatcgaccccaaggtgtacggcgagaagagagacctgcacagcaagaacaaggacgacctgaccctgagcagaagcctgggcctgggcggcagaagcgccatcgagcagagaagcatgagcatcaacctgcccatgagctgcctggacagcatcgccctgggcttcaacttcggcagaggccacgacctgagccccctggccagcgacatcctgaccaacaccagcggcagcatggacgagggcgacgactacctgcccgccaccacccccgccctggagaaggccccctgcttccccgtggagagcaaggaggaggagcagatcgagaaggtgaaggccaccggcgaggagagcacccaggccgagatcagctgcgagagccccttcctggccaaggacttctacaagaacggcaccgtgatggcccccgacctgcccgagatgctggacctggccggcaccagaagcagactggccagcgtgagcgccgacgccgaggtggccagaagaaagagcgtgcccagcgagaccgtggtggaggacagcagaaccggcctgccccccgtgaccgacgagaaccacgtgatcgtgaagaccgacagccagctggaggacctgggctactgcgtgttcaacaagtacaccgtgcccctgcccagccccgtgcaggacagcgagaacctgagcggcgagagcggcaccttctacgagggcaccgacgacaaggtgagaagagacctggccaccgacctgagcctgatcgaggtgaagctggccgccgccggcagagtgaaggacgagttcagcgtggacaaggaggccagcgcccacatcagcggcgacaagagcggcctgagcaaggagttcgaccaggagaagaaggccaacgacagactggacaccgtgctggagaagagcgaggagcacgccgacagcaaggagcacgccaagaagaccgaggaggccggcgacgagatcgagaccttcggcctgggcgtgacctacgagcaggccctggccaaggacctgagcatccccaccgacgccagcagcgagaaggccgagaagggcctgagcagcgtgcccgagatcgccgaggtggagcccagcaagaaggtggagcagggcctggacttcgccgtgcagggccagctggacgtgaagatcagcgacttcggccagatggccagcggcctgaacatcgacgacagaagagccaccgagctgaagctggaggccacccaggacatgacccccagcagcaaggccccccaggaggccgacgccttcatgggcgtggagagcggccacatgaaggagggcaccaaggtgagcgagaccgaggtgaaggagaaggtggccaagcccgacctggtgcaccaggaggccgtggacaaggaggagagctacgagagcagcggcgagcacgagagcctgaccatggagagcctgaaggccgacgagggcaagaaggagaccagccccgagagcagcctgatccaggacgagatcgccgtgaagctgagcgtggagatcccctgcccccccgccgtgagcgaggccgacctggccaccgacgagagagccgacgtgcagatggagttcatccagggccccaaggaggagagcaaggagacccccgacatcagcatcacccccagcgacgtggccgagcccctgcacgagaccatcgtgagcgagcccgccgagatccagagcgaggaggaggagatcgaggcccagggcgagtacgacaagctgctgttcagaagcgacaccctgcagatcaccgacctgggcgtgagcggcgccagagaggagttcgtggagacctgccccagcgagcacaagggcgtgatcgagagcgtggtgaccatcgaggacgacttcatcaccgtggtgcagaccaccaccgacgagggcgagagcggcagccacagcgtgagattcgccgccctggagcagcccgaggtggagagaagacccagcccccacgacgaggaggagttcgaggtggaggaggccgccgaggcccaggccgagcccaaggacggcagccccgaggcccccgccagccccgagagagaggaggtggccctgagcgagtacaagaccgagacctacgacgactacaaggacgagaccaccatcgacgacagcatcatggacgccgacagcctgtgggtggacacccaggacgacgacagaagcatcatgaccgagcagctggagaccatccccaaggaggagaaggccgagaaggaggccagaagaagcagcctggagaagcacagaaaggagaagcccttcaagaccggcagaggcagaatcagcacccccgagagaaaggtggccaagaaggagcccagcaccgtgagcagagacgaggtgagaagaaagaaggccgtgtacaagaaggccgagctggccaagaagaccgaggtgcaggcccacagccccagcagaaagttcatcctgaagcccgccatcaagtacaccagacccacccacctgagctgcgtgaagagaaagaccaccgccgccggcggcgagagcgccctggcccccagcgtgttcaagcaggccaaggacaaggtgagcgacggcgtgaccaagagccccgagaagagaagcagcctgcccagacccagcagcatcctgccccccagaagaggcgtgagcggcgacagagacgagaacagcttcagcctgaacagcagcatcagcagcagcgccagaagaaccaccagaagcgagcccatcagaagagccggcaagagcggcaccagcacccccaccacccccggcagcaccgccatcacccccggcaccccccccagctacagcagcagaacccccggcacccccggcacccccagctaccccagaaccccccacacccccggcacccccaagagcgccatcctggtgcccagcgagaagaaggtggccatcatcagaaccccccccaagagccccgccacccccaagcagctgagactgatcaaccagcccctgcccgacctgaagaacgtgaagagcaagatcggcagcaccgacaacatcaagtaccagcccaagggcggccaggtgcagatcgtgaccaagaagatcgacctgagccacgtgaccagcaagtgcggcagcctgaagaacatcagacacagacccggcggcggcagagtgaagatcgagagcgtgaagctggacttcaaggagaaggcccaggccaaggtgggcagcctggacaacgcccaccacgtgcccggcggcggcaacgtgaagatcgacagccagaagctgaacttcagagagcacgccaaggccagagtggaccacggcgccgagatcatcacccagagccccggcagaagcagcgtggccagccccagaagactgagcaacgtgagcagcagcggcagcatcaacctgctggagagcccccagctggccaccctggccgaggacgtgaccgccgccctggccaagcagggcctgtag

SEQ ID NO: 300075 - protein, 741 aa, Artificial Sequence
  derived and/or modified sequence
MALFTPWKLSSQKLGFFLVTFGFIWGMMLLHFTIQQRTQPESSSMLREQILDLSKRYIKALAEENRNVVDGPYAGVMTAYDLKKTLAVLLDNILQRIGKLESKVDNLVVNGTGTNSTNSTTAVPSLVALEKINVADIINGAQEKCVLPPMDGYPHCEGKIKWMKDMWRSDPCYADYGVDGSTCSFFIYLSEVENWCPHLPWRAKNPYEEADHNSLAEIRTDFNILYSMMKKHEEFRWMRLRIRRMADAWIQAIKSLAEKQNLEKRKRKKVLVHLGLLTKESGFKIAETAFSGGPLGELVQWSDLITSLYLLGHDIRISASLAELKEIMKKVVGNRSGCPTVGDRIVELIYIDIVGLAQFKKTLGPSWVHYQCMLRVLDSFGTEPEFNHANYAQSKGHKTPWGKWNLNPQQFYTMFPHTPDNSFLGFVVEQHLNSSDIHHINEIKRQNQSLVYGKVDSFWKNKKIYLDIIHTYMEVHATVYGSSTKNIPSYVKNHGILSGRDLQFLLRETKLFVGLGFPYEGPAPLEAIANGCAFLNPKFNPPKSSKNTDFFIGKPTLRELTSQHPYAEVFIGRPHVWTVDLNNQEEVEDAVKAILNQKIEPYMPYEFTCEGMLQRINAFIEKQDFCHGQVMWPPLSALQVKLAEPGQSCKQVCQESQLICEPSFFQHLNKDKDMLKYKVTCQSSELAKDILVPSFDPKNKHCVFQGDLLLFSCAGAHPRHQRVCPCRDFIKGQVALCKDCL

SEQ ID NO: 300076 - DNA, 2226 bp, Artificial Sequence
  derived and/or modified sequence
atggccctgttcaccccctggaagctgagcagccagaagctgggcttcttcctggtgaccttcggcttcatctggggcatgatgctgctgcacttcaccatccagcagagaacccagcccgagagcagcagcatgctgagagagcagatcctggacctgagcaagagatacatcaaggccctggccgaggagaacagaaacgtggtggacggcccctacgccggcgtgatgaccgcctacgacctgaagaagaccctggccgtgctgctggacaacatcctgcagagaatcggcaagctggagagcaaggtggacaacctggtggtgaacggcaccggcaccaacagcaccaacagcaccaccgccgtgcccagcctggtggccctggagaagatcaacgtggccgacatcatcaacggcgcccaggagaagtgcgtgctgccccccatggacggctacccccactgcgagggcaagatcaagtggatgaaggacatgtggagaagcgacccctgctacgccgactacggcgtggacggcagcacctgcagcttcttcatctacctgagcgaggtggagaactggtgcccccacctgccctggagagccaagaacccctacgaggaggccgaccacaacagcctggccgagatcagaaccgacttcaacatcctgtacagcatgatgaagaagcacgaggagttcagatggatgagactgagaatcagaagaatggccgacgcctggatccaggccatcaagagcctggccgagaagcagaacctggagaagagaaagagaaagaaggtgctggtgcacctgggcctgctgaccaaggagagcggcttcaagatcgccgagaccgccttcagcggcggccccctgggcgagctggtgcagtggagcgacctgatcaccagcctgtacctgctgggccacgacatcagaatcagcgccagcctggccgagctgaaggagatcatgaagaaggtggtgggcaacagaagcggctgccccaccgtgggcgacagaatcgtggagctgatctacatcgacatcgtgggcctggcccagttcaagaagaccctgggccccagctgggtgcactaccagtgcatgctgagagtgctggacagcttcggcaccgagcccgagttcaaccacgccaactacgcccagagcaagggccacaagaccccctggggcaagtggaacctgaacccccagcagttctacaccatgttcccccacacccccgacaacagcttcctgggcttcgtggtggagcagcacctgaacagcagcgacatccaccacatcaacgagatcaagagacagaaccagagcctggtgtacggcaaggtggacagcttctggaagaacaagaagatctacctggacatcatccacacctacatggaggtgcacgccaccgtgtacggcagcagcaccaagaacatccccagctacgtgaagaaccacggcatcctgagcggcagagacctgcagttcctgctgagagagaccaagctgttcgtgggcctgggcttcccctacgagggccccgcccccctggaggccatcgccaacggctgcgccttcctgaaccccaagttcaacccccccaagagcagcaagaacaccgacttcttcatcggcaagcccaccctgagagagctgaccagccagcacccctacgccgaggtgttcatcggcagaccccacgtgtggaccgtggacctgaacaaccaggaggaggtggaggacgccgtgaaggccatcctgaaccagaagatcgagccctacatgccctacgagttcacctgcgagggcatgctgcagagaatcaacgccttcatcgagaagcaggacttctgccacggccaggtgatgtggccccccctgagcgccctgcaggtgaagctggccgagcccggccagagctgcaagcaggtgtgccaggagagccagctgatctgcgagcccagcttcttccagcacctgaacaaggacaaggacatgctgaagtacaaggtgacctgccagagcagcgagctggccaaggacatcctggtgcccagcttcgaccccaagaacaagcactgcgtgttccagggcgacctgctgctgttcagctgcgccggcgcccaccccagacaccagagagtgtgcccctgcagagacttcatcaagggccaggtggccctgtgcaaggactgcctgtag

SEQ ID NO: 300077 - DNA, 2226 bp, Artificial Sequence
  derived and/or modified sequence
atggcactctttaccccttggaaattatcaagtcagaaattaggctttttcctcgtgacattcggatttatctgggggatgatgttactgcatttcactattcaacagaggacacagccagagtccagctccatgttgagagagcagattctagacttgtctaagcggtacataaaggccctcgccgaggagaaccgaaacgtggtcgacggcccttatgcaggcgtcatgacagcctacgacctcaaaaaaacactggcggttctcttggataatatcctccagagaattgggaagttagagtcaaaagtagataatctggtggtcaatggtacaggtacaaactccaccaactccaccacagcagtaccttcactggtggcacttgagaaaattaacgtggcagacattatcaacggtgcacaggagaagtgtgtccttcctccgatggatggttatccccactgcgaggggaagatcaagtggatgaaggatatgtggcgcagcgacccctgctacgccgactatggggtagacggctccacttgctctttctttatttacctgtcagaggtcgagaattggtgtcctcatctcccttggagagccaagaacccctatgaagaagctgatcataattcgctcgccgaaattaggactgatttcaacattctgtacagtatgatgaagaagcatgaggaattcaggtggatgagactgagaataagacgaatggccgacgcttggattcaggcaatcaaatcactggccgagaaacagaacttggaaaaacggaaaaggaaaaaggtgctggtgcatctcgggctgctgaccaaggaatcaggatttaagatcgccgagaccgcattctctggaggaccactaggggagcttgtgcaatggtccgaccttatcacatccctctacttgcttggccacgacatcagaattagcgccagtctggccgagttgaaggagatcatgaagaaggttgtgggaaacagaagtggctgcccaacggtcggcgaccggattgtagaactgatctacatcgatattgtgggcttagcccagtttaaaaagacattaggaccttcctgggtccattatcagtgtatgctgcgagttctggatagcttcggcaccgaaccagaattcaatcatgccaactacgcccaaagcaaaggacacaagacaccatggggcaagtggaatctgaaccctcagcagttttacactatgttccctcatacacctgataacagctttctggggttcgtcgttgagcagcatttgaactcatccgacatccaccacattaatgagatcaaacgtcaaaaccagtctttggtgtatgggaaggtggatagcttttggaagaataagaagatctacctggatataatccacacctacatggaagtgcacgctacggtgtacgggagcagcacaaaaaacatcccatcttacgtgaagaatcatggcatcctaagtggcagggatcttcagtttcttctgcgcgagacaaagctgttcgttggtcttggatttccctatgaaggaccagctccccttgaggccattgccaacggatgtgcttttctgaatccaaaatttaatcccccgaaaagcagtaagaatacagactttttcatcgggaagcccactctgcgggaactgacaagccagcatccatatgcagaggtgtttatagggcgcccgcacgtgtggaccgtggatctgaacaaccaggaagaagtggaagatgcagtgaaggcaattttgaatcaaaagatcgaaccctacatgccttatgaattcacatgtgagggcatgttgcagcggattaacgcgtttatagagaaacaggatttctgtcatggacaagtgatgtggccacccctcagcgctctgcaggttaaactggcggagcccggccagagctgcaagcaagtctgccaggagtctcagcttatctgtgagccatctttcttccagcacttgaataaagacaaggatatgttgaagtacaaagtaacatgtcagtccagcgagcttgctaaggacatcctggtgccatcattcgaccctaaaaataaacactgtgttttccagggagatctgctactgttttcctgcgcgggagcccatcctcgccatcagcgtgtctgcccctgccgagattttattaaaggccaggtcgcactgtgtaaagattgcttgtag

SEQ ID NO: 300078 - DNA, 2226 bp, Artificial Sequence
  derived and/or modified sequence
atggctctgttcacaccatggaagttatcgagtcagaaactgggattcttcctagtcactttcggcttcatatggggtatgatgctgctccattttaccattcaacagcgtacacagcctgaaagctcttctatgctgagggaacaaattcttgatctgagtaagcggtacattaaggcgctcgccgaagagaaccgcaacgttgtcgacggaccctacgcgggcgtgatgactgcctacgacctgaaaaaaacccttgcggttctactcgacaacatcctgcaaagaatcgggaagctcgagagtaaagtggataatttggtggtgaacggaaccgggaccaatagtaccaattccacaaccgccgttccatctttggttgctctggagaagataaatgttgctgatataattaacggcgcccaagagaaatgcgtcctccccccaatggatgggtacccacactgtgaaggaaaaattaaatggatgaaggacatgtggcggtcggatccgtgttacgctgattacggcgtggatgggagcacctgcagcttctttatctacctctcagaggtggagaactggtgcccacacctgccttggagagcgaaaaatccttatgaggaggctgatcataacagtctggctgagataaggaccgattttaacatcctgtatagcatgatgaagaagcacgaagagttcaggtggatgagattaaggataaggaggatggcagatgcttggattcaggctatcaagtccttggccgaaaagcagaatttagagaagaggaaaaggaagaaagttcttgtccacctggggctactgacaaaagaatcaggatttaaaatagccgaaactgctttctcagggggcccattgggcgagctggttcagtggtccgatctgatcacatccctctatttgctggggcatgatatccgtatcagcgccagcctcgcagaactcaaagagattatgaagaaggtggttggaaacaggagtggctgccccaccgtcggggacaggatcgtggagctgatttatattgacatcgtcggtctcgcgcagtttaagaaaacattaggaccatcctgggtgcactaccagtgcatgctcagagttctagacagctttggtactgagccggagttcaatcatgccaattatgctcaaagtaagggccacaagaccccctgggggaagtggaacttaaatcctcaacagttctataccatgttcccacatacccctgacaattccttcctaggcttcgtggtggagcagcacttaaatagtagtgatatccaccacataaatgagattaaacggcagaatcaatctctcgtgtacggtaaggtggactcgttctggaagaacaagaaaatctatctggacataattcacacgtacatggaagtgcatgctacagtttacggcagctcgaccaaaaatatccccagctacgtgaagaatcatgggatcctgtcaggccgcgatctccagttccttctgcgggaaacaaagcttttcgtgggcttaggctttccttatgaaggccccgctccacttgaagctatcgccaatggctgtgctttcttgaaccctaaattcaacccaccaaaaagctccaaaaataccgacttttttataggtaagccaaccctgcgcgaactgactagccagcacccttacgctgaggttttcataggacgccctcacgtgtggaccgttgacctcaataatcaggaggaagtagaagacgctgtgaaagcgattttgaatcagaagatcgagccatatatgccgtacgagtttacttgcgaagggatgttgcagcgaataaacgcatttattgagaaacaggatttctgtcacggccaggttatgtggcctccactgtccgcccttcaagtcaagcttgcagagcccggccaaagttgcaaacaggtgtgccaggaatctcagctgatctgcgaaccctcattcttccagcacctgaacaaagataaagacatgctaaaatacaaagtaacctgtcagtcctcagaactcgctaaagatattcttgttccatcctttgacccaaaaaataagcattgcgtgttccaaggcgatctgttgctgttcagctgtgctggcgctcatccacggcaccagcgggtgtgcccatgccgagacttcatcaaaggccaggtcgccctgtgcaaggattgtctgtag

SEQ ID NO: 300079 - DNA, 2226 bp, Artificial Sequence
  derived and/or modified sequence
atggccctcttcaccccctggaagctgagcagccagaagctgggcttcttcctggtgaccttcggcttcatctggggcatgatgctgctgcacttcaccatccagcagaggacccagcctgagagcagctccatgctgcgggagcagatcctggacctgagcaagcgctacatcaaggccctggccgaggagaacagaaatgtggtggatggcccctatgctggggtgatgacagcctatgacctgaagaagaccctggccgtgctgctggacaacatcctgcagagaattggcaagctggagagcaaggtggacaacctggtggtgaatggcaccggcaccaacagcaccaacagcaccacagctgtgcccagcctggtggccctggagaagatcaacgtggccgacatcatcaatggagcccaggagaagtgtgtgctgccccccatggatggctacccccactgtgagggcaagatcaagtggatgaaggacatgtggaggagtgacccctgctacgccgactatggagtggatggcagcacctgcagcttcttcatctacctgtctgaggtggagaactggtgcccccacctgccctggagggccaagaacccctatgaggaggccgaccacaacagcctggccgagatcagaacagacttcaacatcctgtacagcatgatgaagaagcatgaggagttccgctggatgaggctgcgcatccggaggatggctgatgcctggatccaggccatcaagagcctggccgagaagcagaacctggagaagaggaagaggaagaaggtgctggtgcacctgggcctgctgaccaaggagagcggcttcaagattgctgagacagccttcagcggcggccccctgggggagctggtgcagtggagcgacctgatcaccagcctgtacctgctgggccatgacatccgcatcagcgccagcctggccgagctgaaggagatcatgaagaaggtggtgggcaacagaagtggctgccccaccgtgggggacagaattgtggagctgatctacattgatattgtgggcctggcccagttcaagaagaccctgggccccagctgggtgcactaccagtgcatgctgcgggtgctggacagctttggaacagagcctgagttcaaccacgccaactatgcccagagcaagggccacaagaccccctggggcaagtggaacctgaacccccagcagttctacaccatgttcccccacaccccagacaacagcttcctgggctttgtggtggagcagcacctgaacagcagtgacatccaccacatcaatgagatcaagaggcagaaccagagcctggtgtatggcaaggtggacagcttctggaagaacaagaagatctacctggacatcatccacacctacatggaggtgcacgccaccgtgtatggcagcagcaccaagaacatccccagctatgtgaagaaccacggcatcctgagcggccgggacctgcagttcctgctgcgggagaccaagctgtttgtgggcctgggcttcccctatgagggccctgcccccctggaggccatcgccaacggctgtgccttcctgaaccccaagttcaacccccccaagagcagcaagaacacagacttcttcatcggcaagcccaccctgcgggagctgaccagccagcacccctatgcagaggtgttcatcggccggccccacgtgtggacagtggacctgaacaaccaggaggaggtggaggatgctgtgaaggccatcctgaaccagaagattgagccctacatgccctatgagttcacctgtgagggcatgctgcagaggatcaatgccttcatcgagaagcaggacttctgccacggccaggtgatgtggccacccctgagcgccctgcaggtgaagctggccgagcccggccagagctgcaagcaggtgtgccaggagagccagctgatctgtgagcccagcttcttccagcacctgaacaaggacaaggacatgctgaagtacaaggtgacctgccagagcagcgagctggccaaggacatcctggtgcccagctttgaccccaagaacaagcactgtgtgttccagggcgacctgctgctcttcagctgtgccggggcccaccccaggcaccagagggtgtgcccctgccgggacttcatcaagggccaggtggccctgtgcaaggactgcctgtag

SEQ ID NO: 300080 - DNA, 2421 bp, Artificial Sequence
  derived and/or modified sequence
cagcagaatggaagtgaggaaaggcaaccagctgacacaggagccagagtgagaccagcagactctcacactcaacctacaccatgaatttgtgtctatcttctacgcgttaagagccaaggacaggtgaagttgccagagagcaatggctctcttcactccgtggaagttgtcctctcagaagctgggctttttcctggtgacttttggcttcatttggggtatgatgcttctgcactttaccatccagcagcgaactcagcctgaaagcagctccatgctgcgcgagcagatcctggacctcagcaaaaggtacatcaaggcactggcagaagaaaacaggaatgtggtggatgggccatacgctggagtcatgacagcttatgatctgaagaaaacccttgctgtgttattagataacattttgcagcgcattggcaagttggagtcgaaggtggacaatcttgttgtcaatggcaccggaacaaactcaaccaactccactacagctgttcccagcttggttgcacttgagaaaattaatgtggcagatatcattaacggagctcaagaaaaatgtgtattgcctcctatggacggctaccctcactgtgagggaaagatcaagtggatgaaagacatgtggcgttcagatccctgctacgcagactatggagtggatggatccacctgctctttttttatttacctcagtgaggttgaaaattggtgtcctcatttaccttggagagcaaaaaatccctacgaagaagctgatcataattcattggcggaaattcgtacagattttaatattctctacagtatgatgaaaaagcatgaagaattccggtggatgagactacggatccggcgaatggctgacgcatggatccaagcaatcaagtccctggcagaaaagcagaaccttgaaaagagaaagcggaagaaagtcctcgttcacctgggactcctgaccaaggaatctggatttaagattgcagagacagctttcagtggtggccctcttggtgaattagttcaatggagtgatttaattacatctctgtacttactgggccatgacattaggatttcagcttcactggctgagctcaaggaaatcatgaagaaggttgtaggaaaccgatctggctgcccaactgtaggagacagaattgttgagctcatttacattgatattgtaggacttgctcaattcaagaaaactcttggaccatcctgggttcattaccagtgcatgctccgagtccttgattcatttggtactgaacccgaatttaatcatgcaaattatgcccaatcgaaaggccacaagaccccttggggaaaatggaatctgaaccctcagcagttttataccatgttccctcataccccagacaacagctttctggggtttgtggttgagcagcacctgaactccagtgatatccaccacattaatgaaatcaaaaggcagaaccagtcccttgtgtatggcaaagtggatagcttctggaagaataagaagatctacttggacattattcacacatacatggaagtgcatgcaactgtttatggctccagcacaaagaatattcccagttacgtgaaaaaccatggtatcctcagtggacgggacctgcagttccttcttcgagaaaccaagttgtttgttggacttgggttcccttacgagggcccagctcccctggaagctatcgcaaatggatgtgcttttctgaatcccaagttcaacccacccaaaagcagcaaaaacacagactttttcattggcaagccaactctgagagagctgacatcccagcatccttacgctgaagttttcatcgggcggccacatgtgtggactgttgacctcaacaatcaggaggaagtagaggatgcagtgaaagcaattttaaatcagaagattgagccatacatgccatatgaatttacgtgcgaggggatgctacagagaatcaatgctttcattgaaaaacaggacttctgccatgggcaagtgatgtggccacccctcagcgccctacaggtcaagcttgctgagcccgggcagtcctgcaagcaggtgtgccaggagagccagctcatctgcgagccttctttcttccagcacctcaacaaggacaaggacatgctgaagtacaaggtgacctgccaaagctcagagctggccaaggacatcctggtgccctcctttgaccctaagaataagcactgtgtgtttcaaggtgacctcctgctcttcagctgtgcaggcgcccaccccaggcaccagagggtctgcccctgccgggacttcatcaagggccaggtggctctctgcaaagactgcctatagcagctacctgctcagccctgcaccatgctgctggggaagacagtggcccc

SEQ ID NO: 300081 - DNA, 8252 bp, Artificial Sequence
  derived and/or modified sequence
agcccaggtagccgcgccgcaggctcggggcgtcgcgacctcgcgcctcgggccgcgtgggcacggcggccggcgggtgctcccggctgctgctgctgcccaacaaggagcagaatggaagtgaggaaaggcaaccagctgacacaggagccagagtgagaccagcagactctcacactcaacctacaccatgaatttgtgtctatcttctacgcgttaagagccaaggacaggtgaagttgccagagagcaatggctctcttcactccgtggaagttgtcctctcagaagctgggctttttcctggtgacttttggcttcatttggggtatgatgcttctgcactttaccatccagcagcgaactcagcctgaaagcagctccatgctgcgcgagcagatcctggacctcagcaaaaggtacatcaaggcactggcagaagaaaacaggaatgtggtggatgggccatacgctggagtcatgacagcttatgatctgaagaaaacccttgctgtgttattagataacattttgcagcgcattggcaagttggagtcgaaggtggacaatcttgttgtcaatggcaccggaacaaactcaaccaactccactacagctgttcccagcttggttgcacttgagaaaattaatgtggcagatatcattaacggagctcaagaaaaatgtgtattgcctcctatggacggctaccctcactgtgagggaaagatcaagtggatgaaagacatgtggcgttcagatccctgctacgcagactatggagtggatggatccacctgctctttttttatttacctcagtgaggttgaaaattggtgtcctcatttaccttggagagcaaaaaatccctacgaagaagctgatcataattcattggcggaaattcgtacagattttaatattctctacagtatgatgaaaaagcatgaagaattccggtggatgagactacggatccggcgaatggctgacgcatggatccaagcaatcaagtccctggcagaaaagcagaaccttgaaaagagaaagcggaagaaagtcctcgttcacctgggactcctgaccaaggaatctggatttaagattgcagagacagctttcagtggtggccctcttggtgaattagttcaatggagtgatttaattacatctctgtacttactgggccatgacattaggatttcagcttcactggctgagctcaaggaaatcatgaagaaggttgtaggaaaccgatctggctgcccaactgtaggagacagaattgttgagctcatttacattgatattgtaggacttgctcaattcaagaaaactcttggaccatcctgggttcattaccagtgcatgctccgagtccttgattcatttggtactgaacccgaatttaatcatgcaaattatgcccaatcgaaaggccacaagaccccttggggaaaatggaatctgaaccctcagcagttttataccatgttccctcataccccagacaacagctttctggggtttgtggttgagcagcacctgaactccagtgatatccaccacattaatgaaatcaaaaggcagaaccagtcccttgtgtatggcaaagtggatagcttctggaagaataagaagatctacttggacattattcacacatacatggaagtgcatgcaactgtttatggctccagcacaaagaatattcccagttacgtgaaaaaccatggtatcctcagtggacgggacctgcagttccttcttcgagaaaccaagttgtttgttggacttgggttcccttacgagggcccagctcccctggaagctatcgcaaatggatgtgcttttctgaatcccaagttcaacccacccaaaagcagcaaaaacacagactttttcattggcaagccaactctgagagagctgacatcccagcatccttacgctgaagttttcatcgggcggccacatgtgtggactgttgacctcaacaatcaggaggaagtagaggatgcagtgaaagcaattttaaatcagaagattgagccatacatgccatatgaatttacgtgcgaggggatgctacagagaatcaatgctttcattgaaaaacaggacttctgccatgggcaagtgatgtggccacccctcagcgccctacaggtcaagcttgctgagcccgggcagtcctgcaagcaggtgtgccaggagagccagctcatctgcgagccttctttcttccagcacctcaacaaggacaaggacatgctgaagtacaaggtgacctgccaaagctcagagctggccaaggacatcctggtgccctcctttgaccctaagaataagcactgtgtgtttcaaggtgacctcctgctcttcagctgtgcaggcgcccaccccaggcaccagagggtctgcccctgccgggacttcatcaagggccaggtggctctctgcaaagactgcctatagcagctacctgctcagccctgcaccatgctgctggggaagacagtggccccagccccgtcaggcagggccagggacagaagtcatgcagggactctggcaagagcctgaactttttcgtagaaggttctgaattggcattgcccttgctgcactccgagcaacccagtggagtcttcaccaaaacaaaacaagagcgtatgtcaggccaggagcctggcttgtccctggcacaacatcatttctgtttctcaaggagcaactgtgggaagactgtcactgcagctgctccagggcaaaagaaagtctcaagagtcctttaaaacaaaacaggaggaattgagctgatgggaaagaactctgaatgggaatattcctaaacccattaacttatttattcgggtgggagggaggggaccgcgggagggagaggagggattgatcacaggcttcttttatttccactgttaatcatccaccttcactatactgttgttctgtctgctttgggcagggtgcaggagagagaccgtgtgccgtggggctggtggcctgctcagggacagccatggggacctggcagctcaaaacagatggcagcagaacaaaagaaacttttgctttggaagcacagccaaactccccagggcatcgtcatagatggcacctagagcatgggctgcctcagtcagggggacgtgcctgtgttgtccagagagcccagccagggacgaaaaaggagatgaggcccctttcctccatgtccccatgcccagacacataccttggccgtaatttcttttagaatccctttgggaaggaaatacaggattgagggattttggagtttctggtaaactcaccctccctccagccccgctatgaggaggaaagtagagatgaaagactcacgctgttcatggacttggagaggattatctttgagccaagatttggacaggagtgaagtcggtccttaagaatttgtggcgcgaccggagctgggctcctgacaggtgggcttgtgttgtgtcccctctgatggcaccaaagtccagggaagggggctcttgatgtctgctgggggagtgggggcagctcaggatgaatgcagtgccctgtcctggctactcacctgagggtgtagctcgcaaaggtgggaatctggtgctggcttttccttcaggcaggatcactctgacttgttgagtaatcagtcatcaggttggcctggtcagacacactggaccccaccttccaaaccctggacccccccatgctctgcctttgtataagttcccaccccactgaatcattgctgccatgctctgtacaagtttgtaagtttctgaaaagcccctgacatctccatgctgatgcaagtgagaccccttctgcctaatgtgagcggttggcgtcctccacttggcctctgctgggcgcctcagtcgctcaatgatgtgctctgtgccggggcttccaagcacccttcctgctaacagagggcggcccagtggagcctccgctgggcagaactgatgggcaaggcgtaatggctggtagctttcagaatgtgagggaaaggaagaattccgcttcatggggactagagttagtgtggggcctttaagtctgggaagttacattctgcttctttctcaattgctacacaaatgtgcagccagccttttttcttaggcccactgagatccctgctcagtgcgtctcaattgtatctccagtctaagaggagggtggggggcacccggggcctcctccactccttaggtggcccccaagcacatctgccaggtagagtaccatggggaggcctctgccctgagcatcatcacaggggcgcctccagacctggctgagaatagcctctgcttgggcctaggaagaagggcagaagtccaaaggaaaccttggtgagtgagtgtgtgtgtgtgtgtgtgtgtgtgtgtgtgtgtgtgtgtgtgtgtgtatgagcctgtgcatttcttttaagcaagggcagtttcctgcagtaggagggcagatgactggcatccttgctgtaaggaagagctttttccttgtgaatgggcctcttggctgtaccctagggtgtgggaatttgctagagttccctgacctgcaatccctgggccagtgccgccctctcctgggctcttccaggagcattgaacactgaggatgtcaatgcaagtatctgaccaacagggggagcctgcaggccgagcaaagtttaacccacttagccactgctacttaagcaaggaagctgaaaggtaaccttagccctgccttgtgttccaaaagctgcaaggatcatttgctggctgtccctaagttcaaggcctccctaccttccccttcttttccaagtcacaacccgccctgcccgggccagacagcccagaagaacacttttctgccatttaaaaatccctctttcatcccccccagtccagtattgagtggaagtgcgccggagttccactgacagggcagctgctcttggagcaaacaagcccacactccagttgtttagggcattatctgaagagtcagtgacccctgaatgtgtactggctcccaggcctcctcagacttggcccaggtctagtcagtgatcctggagaggaaactggggagggggcttccaactgccctgcatggaagaggagaggaaggtgcccctgtgtgggctggaagcctgcggaggttttgccattgctgatcttgatagaatcctaaaccgatttatagctgataacagttccatggggagagaaatcctaagttatgattaatgtttttccccgctataatatcttgcctgtttttttggattattttccccattgtgatcctaagctcttaaaaaacttgagggaaaacattcatctaatttactaaaagagaaagctttccattgaaaggtagatactttgaggagtaaaaagacttctttgaatgctggtaaacaccgcatttattttgtgtatgcagtttgatttgcacatgtataaatggagatgcttttcatttttgtttggactgggtttgtgtcactgctcattacagtttgcttttttgtgtgtttgctgtgcgtttggagatattagtcagtttctttagtgatatttgtttccttgatgtgccttttcgtttttctttggggtttttggaatccggatgctgttgaagggcaatagcagactcctccagctaagagacaggacatgttcttgagccactgtagctgttgaagctggacaccagacgctccctataacccccccgccaggccatagcgtgtatgcatgtgcacttccacccacagaggagggtgtgaagccttgagaacctcaagaaagggctggattctgccatacctttgggtctaccttgggactgctggttgccaacgtgtcaaccagcctgtgttccctgccacccacgcacttgctgaggtgtggctgaggcagaatcatgtgaatgggtgcatccaaggagttcagggccctgcttggagaagaaatactttagcatcatgaaagggaaagaacgtgcaccccttttttgtttctttagtgaatgcaagatttaataaaagtgaataatgagcttcccctttgggagtggagcccagtgcagctcactgacagggttgacatcagtatgatgtgttggactgaaactgtatgtctgtaggtaggtgtgtgccttttagggcagaccacggtggccaccccatttctccaaggtggtttacctagcttgtgtatattagacattgccaccctcacctctggccaaaaattcttgatttaaaaagaaaagtctattttgttaacgacaggctctgttgtatgtgttactatcccaagcctggattattttatttatttaaaagtattttaatttccatattggctttattctaatcccatccatccctgtggagctgcagagcatcttcatgtgagtagacggatggacataaatagattcatgctcatttaggaagctgggagtttcgtgaagctgagggtgagttcctgtgattcttgttcgcttcaacaaaaagtgggagaccaagtttttatagcaaaagaccaaattagctgtagagtcttgaatgcagaaaaaaattaccctagctttcttagcacttagggttttgtgaggattcagtgtttagcacagtgcttggcacatagtaagccctagtaaatgttaaatattgttattagtgtttcgtaaaacttgagaaatagagctgagctcattcccttcctgttgattcaaaaataatacctacatgaaaacatgattccaagttgattgaatgttgtaggaattactggtttagagtagcccagttctcggcctaccctgctggttgggatcttactgtattcttgaatgcactggtttgaaaatatgccagacttcagcccccaaggaaacaaggctgcaagaatttatgaactccagctggaaaaggtaaaggtgacctttggctagccacatactggaccttaccccactgacgtctttcagaacattccaagggttttcctcaaggaacatttttgagctagaaattaaaatgggttctctggcagactgcaccccttgagtcaaagttaacagtattcctttgaatgcaataatagaggcttttctgcgttaagggagaaggaatgaccaattgaacttacacattccccaggcaggtccctttgccggcccctacaggctggggtggcccctcctgtcctcagggatcagactcccagactggttagttctgcatgtttccatcaaattaaaggttattccctggccgcctcctggagaaaaccaaccccaccctgccagctgggggcaatggggcagggattttggcctctcagaacagctcctagaggctgctcatgactgaatgttttcccaaatcacctaaatatcggtttgctttttgttttgggggagaggatttagcctcttacttccctgatggattcaaagttttatctatctccttatctcctgccctgtcttggcacaactctggatagattgcaggtgtggaatttgctggagtttggtgacttcgtcaaattcctttggattctgttccgccaaatcagcagtctcgtcctgtggatgcagtgactggaatttcccatctgcaaagcatctctgtagcccagattttgtggagccttaagacactccctcaatgccaccctgaccccacggctggagaaccctgtgcttatgtggtgggcagggccactgttgatggaggatggcggggacggggtggtgctcaaaggatctgtggtgctggaggtctacacgcctctcaggacagcgtgtcaggaacctcagagcagcttcacatctgccaaagctgagagggagcgaacttgggaagcattttgctcattgtcctacccaagtattaatagcataatagttgatgccaaaggagatggtgacgtcccttccactgtagttgctgtcacaaccttgacgtctttaagctaatggccgtttgcatctgtgtcttcaaacagatcctggttacagccattttgtgtgattcacttcgggggttaagtaatgcaggattctgcaaacaaggtgtcgccgtccaaatgtactgtcctggcatagagagcactgctttgttttccactgttgtagagaaaactagggagaactttatttttcaataaacttttcttgtgtga

SEQ ID NO: 300082 - DNA, 2226 bp, Artificial Sequence
  derived and/or modified sequence
atggccctgttcaccccctggaagctgagcagccagaagctgggcttttttcttgttacattcggctttatctggggcatgatgctgctacactttactattcaacaaagaactcagcctgagtcttccagcatgttgcgggagcagatcttagatctatctaagagatatataaaagctctggctgaggagaaccgcaatgtggtggatgggccctacgccggcgtcatgacagcctatgaccttaaaaagacccttgcggtcctcctggacaacattctgcagagaatcggaaaattagagtctaaagtggacaatcttgtcgtcaatggaacagggaccaattcgactaactccacgactgcggtgccctctcttgttgctcttgaaaagattaatgtggccgatataatcaacggggctcaggaaaaatgcgtgctcccccctatggatgggtatccccactgtgaagggaaaatcaaatggatgaaggacatgtggagatctgacccatgttatgccgattacggagtggatgggtctacttgtagcttttttatctatctgtcggaggttgagaactggtgtccccatctgccctggcgcgcaaagaatccgtacgaggaggccgatcataactctctggccgaaataaggacagactttaacatcttgtactcgatgatgaagaaacacgaggaatttaggtggatgagactaagaatccgacgcatggctgatgcatggatacaggctatcaagagcctggcggaaaagcagaacttggagaaaagaaagcgtaagaaggtccttgtccatcttggccttcttaccaaagagtcaggcttcaaaatcgcggaaaccgccttctcaggcggcccattaggagagcttgtgcagtggtcggaccttattaccagcttgtacttgcttggacatgacatcaggatctcagcttctctggccgaactcaaggagattatgaaaaaggtagtgggcaatcgttctggctgcccgaccgtaggcgacagaattgtcgagctgatctacatagacatcgtaggattggcccagttcaaaaaaacgttgggaccttcatgggtgcactaccagtgcatgctgagagtccttgacagcttcggcaccgagccggagtttaaccatgcaaactacgcacagtccaagggccacaaaaccccatggggcaaatggaacctaaatcctcagcagttttacacgatgttccctcatactcccgacaacagtttcctgggatttgtggtggaacagcatttaaatagtagtgacattcaccacattaatgaaatcaaacggcagaatcaatctttggtatacgggaaggtggatagtttctggaaaaacaagaaaatctacctagatatcatccatacttatatggaggtgcacgcaacagtgtatggatcgtccacaaaaaatattccaagctatgttaagaatcacgggatcctctctgggcgcgacctgcaatttctcctgcgggaaaccaagctgtttgtcggactgggatttccttatgaggggccggcacccttggaagctatcgccaatggctgtgcttttctgaacccaaaatttaatccacccaaaagctctaagaacactgactttttcattgggaaacccactctccgggagttgacaagtcagcatccttatgcagaggtttttatcggcagaccacatgtgtggactgtggatctgaataaccaggaagaggttgaggacgcagtgaaggccattctgaaccagaagattgaaccgtacatgccttacgaatttacatgtgaagggatgcttcagagaatcaatgcctttattgaaaaacaggacttttgtcacggacaggtcatgtggccccctctgtctgctcttcaggtgaaattggcagagcctggtcagtcttgtaagcaagtctgccaggagagccagcttatttgcgaacctagtttcttccaacacctcaacaaagacaaagacatgttgaagtataaggtgacctgtcaatcttctgaattagctaaggatattttggttccatcatttgaccccaagaacaagcattgtgtgtttcagggcgaccttctccttttctcatgcgcaggggcccaccctagacaccagagagtgtgtccctgcagagatttcattaaggggcaggtggcactgtgcaaggactgtctgtag

SEQ ID NO: 300083 - DNA, 2226 bp, Artificial Sequence
  derived and/or modified sequence
atggccctgttcaccccctggaagctgagcagccagaagctgggcttcttcctcgtaacctttggatttatttggggaatgatgctattgcacttcaccattcaacagcggacgcagcctgagtcctctagtatgctaagggaacagatcttggacctgtccaagcgatatattaaggccctggctgaagaaaatcgaaacgtcgtggacggaccatacgcaggggttatgacagcatacgatctcaagaagaccctggctgttctgctcgacaatattctgcagcgtattgggaagctcgagtctaaggtcgacaaccttgtggtgaatggaacagggaccaactcgaccaactctacgactgccgttccttccttggttgcattggaaaagataaatgtagctgacatcattaacggagcccaggagaagtgtgtgcttcctcccatggacggctacccacattgcgaggggaagatcaagtggatgaaggacatgtggcgctctgatccttgttacgccgattacggagtcgatggaagtacatgctctttctttatctatctttccgaggtggagaactggtgccctcatctgccatggcgcgccaaaaacccatacgaggaggcggaccataattcgctcgctgaaatcaggacagacttcaatatcctgtactccatgatgaaaaagcatgaggaattccggtggatgcgccttcgcattagacggatggctgatgcatggatacaggcaatcaaaagcctggcagagaagcagaacctggaaaagcggaaacgtaaaaaagtcctggtacacctgggcttgctgactaaagagtccggatttaagatcgctgagactgctttcagtggtggtcccctgggagagctagtccagtggagtgacctcattaccagcctctatttattgggacatgatatcaggattagtgctagcctggccgaattgaaggagataatgaaaaaagtggttggcaaccggagcggctgtcctacagtcggagacagaatagtcgaactgatctatatcgacatcgtggggctagctcagttcaagaagaccctgggcccctcatgggtgcattatcagtgcatgctaagagttctggacagtttcgggaccgaacctgagtttaatcatgccaattacgcacagtccaaaggtcacaagacaccttgggggaagtggaatttgaatccacagcagttctacaccatgtttccccacacaccggataacagttttttggggttcgtcgttgaacagcatctaaatagttctgacatccaccacattaacgaaattaaacgccagaaccagagtctggtctatggaaaagtggattctttctggaagaataaaaagatctatctggacattattcacacctacatggaagtgcacgccacagtttacgggtctagtacaaagaacatcccaagttatgttaagaatcatggtatcctgagcgggcgggacctccaatttttgctgcgtgaaactaagctgttcgtggggcttggattcccctacgagggtcccgctcctctggaggccattgctaatggctgcgctttcctcaatcccaagttcaaccctcccaaatccagtaaaaacacagatttctttattggaaagcccacattgagggagctaacttctcagcatccatacgccgaggttttcatcggccgtccccacgtttggaccgtcgatctcaacaaccaggaggaagtcgaagatgccgtgaaagcaatactgaatcagaagattgaaccctacatgccctatgaatttacttgtgaagggatgctgcagcgtattaatgcattcatcgaaaagcaagacttttgccacgggcaggtgatgtggccccctctctccgccctacaggtgaagcttgctgaacccgggcaatcctgcaagcaagtgtgccaggagtcacaactaatatgcgaacccagcttcttccaacacctgaacaaggataaagatatgctaaagtacaaggtgacgtgccagtcatcagaactcgcaaaggacattctcgtgccaagctttgatcccaagaataagcattgcgtcttccagggagatttgctgctttttagttgcgccggtgcacacccccggcatcagcgcgtatgtccatgcagagatttcatcaaggggcaggttgcgctgtgtaaagattgcctgtag

SEQ ID NO: 300084 - DNA, 2226 bp, Artificial Sequence
  derived and/or modified sequence
atggccctgttcaccccatggaagctgtcatctcaaaaactgggattttttcttgtcacttttggcttcatctggggcatgatgctgctacatttcacaattcagcagaggacacagcccgaatctagcagtatgctgcgggaacagattctcgacctgtctaagcgttatataaaagctttagctgaggagaataggaacgtggttgacggaccttatgctggggtcatgactgcttacgatttgaaaaagaccctggcagtgctcctggataacatccttcagcggattggcaagttagaaagtaaagtggataacctggttgtgaacgggacaggaactaattcaacgaacagcacgacagccgtgcctagcctggttgcgctggaaaaaatcaatgtggctgacattattaatggggctcaggaaaagtgtgtgctgcctcccatggatggctatccccattgcgaggggaaaatcaagtggatgaaggacatgtggaggtcagacccgtgctatgccgattatggcgttgatgggtctacctgctcttttttcatctacctttccgaggtggagaactggtgcccccacctgccatggcgggctaagaatccgtatgaagaagcagaccacaattcactcgccgagatacgcacagatttcaatattttgtattctatgatgaagaagcatgaggaatttaggtggatgcgtctgaggattagaaggatggctgacgcatggatccaagcaatcaagtctctggccgagaagcagaatcttgaaaaacggaagagaaagaaggtattggtccatctgggcttgctgacaaaagaatcaggatttaaaattgctgaaaccgcattttcaggcggacctctgggtgaacttgttcaatggtctgatcttatcactagcctgtatttgctgggtcacgatatccggatttcggcttccctggcagaattgaaggaaattatgaaaaaggtagtcgggaaccggagcggctgccctacagtcggggatagaatcgtggagctgatctacattgacatcgtaggcctggcccaatttaagaagactctcggaccatcatgggtgcattatcagtgtatgctccgtgtgctggactcatttgggactgaacctgaattcaatcatgctaactacgctcaaagcaagggacataagacaccatggggcaagtggaatctgaaccctcagcagttttacacgatgtttccgcacacccctgataacagttttctcggcttcgtggtggagcagcatctgaacagctccgacatccaccacatcaacgagattaaaaggcagaaccagagtcttgtttacggcaaagtggattccttttggaagaacaaaaagatctacttggacataattcacacctacatggaagtgcacgcgaccgtctatgggagttctacgaaaaacataccgagttatgttaaaaatcacggcatccttagcggcagggacctgcagtttttactccgcgagaccaaactctttgtgggactgggattcccctatgaaggacctgcacctttggaagcaatcgccaacgggtgcgctttcttaaatcccaagttcaacccaccgaaatcatcaaagaataccgacttcttcattggcaaaccaaccctgcgggagcttacatcgcaacacccctatgctgaggttttcattgggcgaccccatgtgtggaccgttgaccttaataatcaggaggaggtggaggacgctgtaaaggcgatcttaaaccagaaaatcgaaccctatatgccatatgagttcacctgtgaggggatgttacagcgcatcaacgctttcatcgagaaacaagatttttgccacggtcaagtgatgtggcctccactctcagcccttcaagtcaaacttgccgagcccggacaatcctgtaagcaagtttgccaagaaagtcaacttatttgtgagccatcatttttccagcatctcaataaggataaggatatgctaaaatacaaggtgacctgccagtccagtgaattggccaaggatattctggtaccttctttcgatcccaaaaacaagcactgcgtgtttcaaggggatctgctccttttcagctgtgccggagcccacccccgtcaccagcgtgtctgtccttgcagagacttcatcaaaggtcaggtggccctctgcaaagattgtctgtag

SEQ ID NO: 300085 - DNA, 2226 bp, Artificial Sequence
  derived and/or modified sequence
atggcactgttcactccctggaagctgtcatctcagaaactcggcttcttcctggttacctttggatttatttggggaatgatgttactccacttcactatacaacaacgcacacagccagagagctcttccatgttaagagagcagatcctggatttatccaagcggtatattaaggcactcgctgaggagaatcgtaacgtggtggacggcccatatgcaggagtgatgacggcctacgacctgaagaaaaccctggccgtccttctcgacaacatactgcaacggattggaaagctggagtccaaggtagacaaccttgttgtcaacggcaccggtacgaactccaccaactccacaacagcagtacctagccttgtggccttagagaagatcaatgtggctgatatcattaatggcgctcaggagaaatgtgtcctgccccctatggatggctaccctcactgcgagggtaaaatcaaatggatgaaagacatgtggagatcagatccgtgttatgctgactatggggtcgatgggagtacttgcagtttcttcatctacctttccgaggttgaaaattggtgtccccacctgccgtggcgcgcaaaaaatccttatgaagaggctgaccacaactcacttgcagaaattcgcaccgactttaatatcctatactcaatgatgaaaaaacatgaggaatttaggtggatgagactgcgtatacgccgtatggctgatgcctggatccaagctatcaaatcactagcagagaaacaaaatctggaaaaaaggaagaggaagaaggtgctggttcacctgggcctccttaccaaagaaagtgggtttaagatagccgaaaccgcattctctggcggaccactcggggaattggtacaatggagcgatctcatcacaagtctgtatctgctcggccatgacatccgaattagtgcttccctggctgagctaaaagaaattatgaagaaggtggttgggaatcggtcgggatgccctaccgtgggggataggatcgttgaactaatctatattgatattgtaggcctcgcgcagttcaagaaaaccctcggaccttcttgggtgcattatcaatgtatgctccgcgtcttagacagcttcgggaccgagccagaattcaaccacgcaaattatgcccagtcaaaaggacacaaaactccatgggggaagtggaacctgaaccctcaacagttttatacaatgttcccccacacacctgataacagcttcctgggctttgtggtggagcagcatctgaattctagtgatatacaccacatcaacgaaatcaagcggcaaaaccagtcattggtttatggaaaagtggattcattctggaagaacaagaaaatatatctagatatcatccacacttacatggaggtccacgccactgtttatggctctagtaccaagaacattcccagttatgtgaagaaccacggaatattaagtgggcgagacctccaatttctgcttagggagacgaagctgtttgtcgggcttggtttcccttatgagggccctgctccactggaagccatcgcaaatggctgcgcattcctgaacccaaaatttaatcccccaaagagcagcaaaaatacagatttttttatcggaaaaccaacacttagagaactgacttcacagcacccttacgccgaagtgtttattggaagaccgcacgtgtggactgtcgatttgaacaaccaggaggaagtcgaggatgccgtgaaggctattctgaatcagaagatagagccttatatgccgtacgagttcacgtgtgagggcatgctccaaaggataaatgccttcatagagaaacaagacttctgccacgggcaggtgatgtggcccccactcagcgcccttcaagtcaagcttgcagagccaggacagtcatgcaagcaggtctgccaggagtcccagctcatctgtgagccttcatttttccagcacctgaacaaagacaaagacatgttgaaatacaaggtgacttgtcagtcttcagaactggcaaaagacattctagtgcccagtttcgacccaaaaaacaaacattgtgtcttccaaggcgacttgctcctgttcagttgtgcaggtgcacatccaaggcaccagcgggtatgcccctgccgagactttatcaagggtcaggtggccttatgcaaggattgcctgtag

SEQ ID NO: 300086 - protein, 1136 aa, Artificial Sequence
  derived and/or modified sequence
MAKMEVKTSLLDNMIGVGDMVLLEPLNEETFINNLKKRFDHSEIYTYIGSVVISVNPYRSLPIYSPEKVEEYRNRNFYELSPHIFALSDEAYRSLRDQDKDQCILITGESGAGKTEASKLVMSYVAAVCGKGAEVNQVKEQLLQSNPVLEAFGNAKTVRNDNSSRFGKYMDIEFDFKGDPLGGVISNYLLEKSRVVKQPRGERNFHVFYQLLSGASEELLNKLKLERDFSRYNYLSLDSAKVNGVDDAANFRTVRNAMQIVGFMDHEAESVLAVVAAVLKLGNIEFKPESRVNGLDESKIKDKNELKEICELTGIDQSVLERAFSFRTVEAKQEKVSTTLNVAQAYYARDALAKNLYSRLFSWLVNRINESIKAQTKVRKKVMGVLDIYGFEIFEDNSFEQFIINYCNEKLQQIFIELTLKEEQEEYIREDIEWTHIDYFNNAIICDLIENNTNGILAMLDEECLRPGTVTDETFLEKLNQVCATHQHFESRMSKCSRFLNDTSLPHSCFRIQHYAGKVLYQVEGFVDKNNDLLYRDLSQAMWKASHALIKSLFPEGNPAKINLKRPPTAGSQFKASVATLMKNLQTKNPNYIRCIKPNDKKAAHIFNEALVCHQIRYLGLLENVRVRRAGYAFRQAYEPCLERYKMLCKQTWPHWKGPARSGVEVLFNELEIPVEEYSFGRSKIFIRNPRTLFKLEDLRKQRLEDLATLIQKIYRGWKCRTHFLLMKKSQIVIAAWYRRYAQQKRYQQTKSSALVIQSYIRGWKARKILRELKHQKRCKEAVTTIAAYWHGTQARRELRRLKEEARNKHAIAVIWAYWLGSKARRELKRLKEEARRKHAVAVIWAYWLGLKVRREYRKFFRANAGKKIYEFTLQRIVQKYFLEMKNKMPSLSPIDKNWPSRPYLFLDSTHKELKRIFHLWRCKKYRDQFTDQQKLIYEEKLEASELFKDKKALYPSSVGQPFQGAYLEINKNPKYKKLKDAIEEKIIIAEVVNKINRANGKSTSRIFLLTNNNLLLADQKSGQIKSEVPLVDVTKVSMSSQNDGFFAVHLKEGSEAASKGDFLFSSDHLIEMATKLYRTTLSQTKQKLNIEISDEFLVQFRQDKVCVKFIQGNQKNGSVPTCKRKNNRLLEVAVP

SEQ ID NO: 300087 - protein, 163 aa, Artificial Sequence
  derived and/or modified sequence
MAKMEVKTSLLDNMIGVGDMVLLEPLNEETFINNLKKRFDHSEIYTYIGSVVISVNPYRSLPIYSPEKVEEYRNRNFYELSPHIFALSDEAYRSLRDQDKDQCILITGESGAGKTEASKLVMSYVAAVCGKGAEVNQVKEQLLQSNPVLEAFGNAKTVRNDNS

SEQ ID NO: 300088 - protein, 149 aa, Artificial Sequence
  derived and/or modified sequence
MAKMEVKTSLLDNMIGVGDMVLLEPLNEETFINNLKKRFDHSEIYTYIGSVVISVNPYRSLPIYSPEKVEEYRNRNFYELSPHIFALSDEAYRSLRDQDKDQCILITGESGAGKTEASKLVMSYVAAVCGKGAEVNQVKEQLLQSNPVL

SEQ ID NO: 300089 - protein, 307 aa, Artificial Sequence
  derived and/or modified sequence
MAKMEVKTSLLDNMIGVGDMVLLEPLNEETFINNLKKRFDHSEIYTYIGSVVISVNPYRSLPIYSPEKVEEYRNRNFYELSPHIFALSDEAYRSLRDQDKDQCILITGESGAGKTEASKLVMSYVAAVCGKGAEVNQVKEQLLQSNPVLEAFGNAKTVRNDNSSRFGKYMDIEFDFKGDPLGGVISNYLLEKSRVVKQPRGERNFHVFYQLLSGASEELLNKLKLERDFSRYNYLSLDSAKVNGVDDAANFRTVRNAMQIVGFMDHEAESVLAVVAAVLKLGNIEFKPESRVNGLDESKIKDKNESK

SEQ ID NO: 300090 - DNA, 3411 bp, Artificial Sequence
  derived and/or modified sequence
atggccaaaatggaggtgaagacatcgcttttggataacatgatcggcgtgggagacatggtcctgctggagcccctaaacgaggaaactttcataaacaacttgaagaaacgattcgatcactcggagatctatacatatattggtagtgttgtgatcagcgtcaacccataccggtcactacctatttatagtcctgagaaagtagaggaatacaggaatcgtaatttctatgaactctctccccacatcttcgctttgtccgatgaagcttacagatctttaagggatcaggataaagaccaatgcattttaatcaccggggaatctggagctggcaagaccgaagcctccaaactcgttatgagctatgtagctgcagtatgtggaaaaggggccgaagtcaatcaggtgaaggagcagcttcttcaatctaatcccgtcctggaggcatttgggaatgcgaagactgttaggaatgacaacagctccagattcgggaagtacatggatatagagttcgacttcaagggagaccccctgggaggggtcatttcaaattatctcctggaaaagagtagggtcgttaagcagccccggggcgaacgtaatttccacgttttctatcagctcctttccggggcctccgaggaactgctgaataaattgaaattggagagggacttcagccgctataattaccttagtctggattcagcaaaagtgaatggtgtggacgacgcggcaaacttccggaccgtccggaatgctatgcagatcgtcggattcatggatcatgaggctgaatctgtactggcagttgttgccgctgtcctgaagctgggaaatattgaattcaaaccggagtcccgggtgaacgggctcgatgaaagcaagatcaaggataaaaatgagctgaaagaaatctgcgagctcaccggcatcgatcagagcgtgctcgagcgagcatttagctttcgtactgtagaggctaagcaggaaaaagtctctactaccctgaatgtggcgcaggcctattacgctagagacgcactggcaaaaaatttatacagtcgcctctttagttggttggtgaatcggataaatgagtctattaaagcccaaaccaaagtacgcaagaaggttatgggagtgctggatatctacggcttcgaaatattcgaggataatagctttgagcaatttatcatcaattactgcaatgagaagctacagcagatttttatcgagctgacgctcaaggaagagcaggaagagtatatccgagaagatatcgaatggacacacattgactatttcaacaacgctattatctgtgatcttattgagaacaacacgaacgggatcctggccatgctggacgaagaatgtctgcggccgggcaccgtgactgacgaaacgttcctagagaagcttaatcaggtgtgtgccacccatcagcatttcgagagtcgaatgagcaaatgctctcggttccttaatgacacctctctgccccactcatgctttcgcatacaacactacgccggtaaagtcctgtaccaggtggaaggctttgttgataagaataacgacctgttgtatcgggacctttcacaagcaatgtggaaggcctcccatgcactgataaagtcattattccctgaggggaatcccgcgaaaattaacctgaagcggcccccaactgctggtagccagttcaaagctagcgtagccaccctcatgaagaatttacagacgaagaatccgaactatatcaggtgtatcaaaccgaatgataagaaagcagctcatatttttaacgaggcactcgtttgtcatcagattagatatctgggtctattggagaacgtgagggtccgcagagccggctatgcctttagacaggcgtatgaaccctgtttagaaagatacaagatgctttgcaagcagacctggccgcattggaaaggccctgctaggtctggagtcgaagtgcttttcaacgaattggagattcctgtcgaggaatattcttttggccggtcgaaaatttttatcagaaaccccagaacgctgttcaaactggaggacctgcgtaagcagcgccttgaggatctcgccactttgattcagaagatctaccgaggatggaagtgtcggacgcactttcttctcatgaagaaaagccagattgtgattgccgcctggtataggagatatgcccaacaaaaacgataccagcaaaccaaatcgtctgcacttgtgattcagagttatatccgtggctggaaagctagaaaaatactgcgagaattgaaacaccagaaacggtgtaaggaggcggtaacaaccattgccgcttactggcatggcacccaagctcgtcgggagttacgtcgcctaaaggaagaagcaaggaacaaacacgcgattgctgtgatctgggcgtactggttgggctctaaagcacggcgagaactgaaaaggttgaaagaggaggcgcggaggaagcatgccgtggccgtcatttgggcctattggctcggtctcaaagttaggagggaataccggaaatttttccgcgccaatgctggtaaaaagatatacgagtttacactgcagcgcatcgtccagaagtactttttggagatgaaaaataagatgccctcgctctctccgatcgacaagaactggccgtctcgcccctacctctttctagattccacccataaagagcttaaaagaattttccacctctggcgctgcaagaagtatagagatcagtttacagaccagcagaaattgatctatgaggagaagcttgaggctagtgaattatttaaggataagaaggccctctatcctagctccgtggggcaaccgttccagggcgcctatttagagatcaataagaatccaaagtacaagaaactcaaggacgcaatcgaggagaagattatcatagccgaagtagtcaataagattaatagagcaaatggcaagtccacaagcagaatatttctgttaaccaacaataatttactattggctgaccagaagtctggacagattaagagcgaggtccccctcgttgacgtcactaaagtcagtatgagctcccagaacgatggtttctttgctgtgcatctgaaggagggaagtgaagcagctagcaaaggcgactttttgttcagtagtgatcacttgattgaaatggctactaagctgtacagaactaccctgtcccagaccaagcagaaactgaacattgaaatttcagacgaattcctggtacagttcaggcaggataaggtttgcgtgaaatttatccaggggaatcagaagaacgggtctgtgccgacatgtaagagaaagaacaataggcttctcgaagttgcagtcccatag

SEQ ID NO: 300091 - DNA, 3411 bp, Artificial Sequence
  derived and/or modified sequence
atggccaaaatggaagttaagacaagcctgcttgacaacatgatcggtgtcggagacatggttctcctggaacctctgaatgaggagacattcattaataacctgaagaaacgattcgatcacagcgaaatctatacatacattgggtcggttgtgatctccgtcaacccttatagaagcctgcctatatatagccccgaaaaggtagaggaatatcgcaaccggaacttttacgagttgagtccccatatctttgcactgagcgacgaagcctacaggtcactaagagatcaggataaggaccaatgcatcctgatcaccggggaatcaggagccgggaaaactgaggctagcaaactagtaatgagctacgtggccgctgtttgtggcaaaggggccgaagtgaatcaggtgaaggaacaattattgcagagtaatccagttctggaggctttcggtaacgctaagaccgtaagaaacgataatagcagtaggtttggcaagtacatggacatagaattcgatttcaagggagaccctctcggcggcgtgatatccaattatcttctggagaaaagtcgcgttgtgaaacaacctcgaggagaaagaaattttcatgtgttttaccagctgttgtccggcgcttctgaggaactcctgaataagcttaaattggagcgcgacttctctcggtacaactacctttcactggacagcgctaaagtgaatggtgtcgatgacgctgcaaattttcgtacagtgagaaatgctatgcagatagtgggcttcatggatcacgaagcggagtccgtactggcagtcgtcgccgctgtgctgaagctaggcaatatagagttcaagcccgagagtcgagtaaacggcctcgatgaaagcaagatcaaggataaaaatgagctgaaagagatctgtgaactcactggcattgaccaaagcgtcctggaacgggcctttagtttccgcacggttgaggcgaaacaggagaaggtatccactacactgaacgtcgcacaggcctattacgcacgtgatgcactcgcaaaaaacctgtatagccgcctctttagttggctcgtgaacaggatcaacgagtcaatcaaggcccaaactaaagtgcgcaagaaagtcatgggcgtactggacatatatggtttcgaaattttcgaagataatagcttcgagcagtttattattaactattgtaacgagaagctgcaacagattttcatcgaacttactctgaaagaggagcaggaggagtatatacgagaggacattgagtggacccacattgactatttcaacaacgctattatatgcgatttgatcgaaaataatacaaacggcattctggcaatgctggacgaagagtgcctgcgacccggtacagtaactgacgaaacatttcttgaaaagctgaaccaggtctgcgctactcatcagcactttgaaagcagaatgtccaagtgttctaggttcttgaatgatacaagtcttccccactcctgttttcggatccagcattatgccgggaaggtcttgtatcaggtggagggtttcgttgataaaaataatgatctgctttatcgggatttgtcccaggccatgtggaaggcctcacacgccctgatcaagtcattatttccagaaggaaatccggcgaaaattaacctgaagcggcctcctactgccggatcccagtttaaggcatccgtcgccacgctcatgaagaaccttcagacaaaaaatcctaactatattcgatgcatcaagcccaacgacaagaaagccgcccacatcttcaacgaagcccttgtttgccaccagattcggtacctgggcctgctggaaaacgtccgcgttcgaagggccggatatgccttccgacaggcttatgaaccctgcctggagcgctacaagatgctttgtaaacaaacctggccgcactggaaaggccccgcaaggagcggtgtggaagtgctgttcaatgagctggaaattcccgttgaagagtatagctttggtcgatctaagatatttatccggaacccaaggactctgtttaagcttgaagatttaagaaaacagcggctggaagacctggctaccctgattcaaaagatttatcggggttggaagtgtcgtactcactttctcctgatgaaaaagtcccagatagtgattgcagcatggtaccgaagatacgcacagcagaagcggtaccagcagacaaaatctagcgcactggtgattcaatcttatatcagaggatggaaggcaagaaagattctgcgggaattgaagcatcagaagcggtgtaaggaggcagtaactaccatcgccgcttactggcacgggacacaggccaggcgggaactacgccgtcttaaagaggaagccagaaataagcatgctattgctgttatctgggcctactggcttggaagcaaggcccgaagagagttgaaaaggctgaaggaagaggcccgacggaagcatgcagtggctgtcatttgggcatattggctcggtttgaaggtgcggcgggagtatcgcaaattttttagggctaatgccggaaagaagatctacgaattcacactccagcgcatcgtgcaaaagtattttctggaaatgaaaaataagatgccttccctaagccctatcgacaaaaactggcctagcagaccatacctgttcctggattcaacccataaggagctaaaacgtatcttccacctctggcggtgtaagaaatacagggaccagttcacagaccagcagaagctcatttacgaggagaaactcgaggctagcgaactgttcaaagacaaaaaggccctgtacccctcctctgtgggccagccattccaaggagcctatttagagatcaataagaaccctaagtacaaaaaactgaaggatgctattgaggagaagattataattgcggaggtggtcaataagatcaacagggctaacgggaagtctaccagccgaatcttcctcctgacaaataataacctgctactggctgatcaaaaaagcgggcagataaagtctgaagtgcctttagtggatgttactaaggtgagcatgagcagccagaatgacggatttttcgctgttcacctgaaagaaggctctgaagccgcgagcaagggtgacttcctgttttccagcgaccacctgatcgagatggctacaaaactgtatcgaaccaccctgagccagaccaagcagaaactgaacatcgaaatcagcgatgagttcttagtgcaattcaggcaggataaagtctgcgtgaagtttatccaagggaatcaaaaaaatggttctgtgcccacctgcaaacgaaagaacaaccggctcctggaagtcgccgtgccatag

SEQ ID NO: 300092 - DNA, 252 bp, Artificial Sequence
  derived and/or modified sequence
atggccaagatggaggtaaagactagtctgctagacaacatgatcggcgtcggtgacatggttctcctggagccccttaacgaggaaacttttatcaacaaccttaaaaaacgctttgatcatagcgagatctacacatacattggctcagtggtgataagcgtcaatccctacaggtctttacctatctactctcctgagaaagtcgaagaatacagaaatcgcaacttctacgaactctcccctcattag

SEQ ID NO: 300093 - DNA, 3411 bp, Artificial Sequence
  derived and/or modified sequence
atggccaagatggaggtgaagaccagcctgctggacaacatgattggagtgggggacatggtgctgctggagcccctgaatgaggagaccttcatcaacaacctgaagaagagatttgaccacagcgagatctacacctacatcggctctgtggtgatctctgtgaacccctaccgcagcctgcccatctacagccctgagaaggtggaggagtacagaaacagaaacttctatgagctgagcccccacatctttgccctgagtgatgaggcctaccgcagcctgcgggaccaggacaaggaccagtgcatcctgatcactggagagagcggggccggcaagacagaggccagcaagctggtgatgtcctatgtggccgctgtgtgtgggaaaggagctgaggtgaaccaggtgaaggagcagctgctgcagagcaaccctgtgctggaggcctttggaaatgccaagacagtgagaaatgacaacagcagcagatttgggaagtacatggacatcgagtttgacttcaagggggaccccctgggcggcgtcatcagcaactacctgctggagaagagccgggtggtgaagcagcccagaggagagaggaacttccacgtgttctaccagctgctgagcggggccagcgaggagctgctgaacaagctgaagctggagcgggacttcagccgctacaactacctgagcctggacagcgccaaggtgaatggagtggatgatgctgccaacttcagaacagtgagaaatgccatgcagatcgtgggcttcatggaccacgaggccgagagcgtgctggccgtggtggccgctgtgctgaagctgggcaacatcgagttcaagccagagagccgggtgaatggcctggatgagagcaagatcaaggacaagaatgagctgaaggagatctgtgagctgactggaattgaccagagcgtgctggagcgggccttctccttcagaacagtggaggccaagcaggagaaggtgtccaccaccctgaatgtggcccaggcctactatgccagagatgccctggccaagaacctgtacagccgcctcttctcctggctggtgaaccgcatcaatgaaagcatcaaggcccagaccaaggtgaggaagaaggtgatgggcgtgctggacatctacggctttgagatctttgaggacaacagctttgagcagttcatcatcaactactgcaatgagaagctgcagcagatcttcatcgagctgaccctgaaggaggagcaggaggagtacatccgggaggacatcgagtggacccacatcgactacttcaacaatgccatcatctgtgacctgattgagaacaacaccaacggcatcctggccatgctggatgaagaatgtctgcggcccggcaccgtgacagatgagaccttcctggagaagctgaaccaggtgtgtgccacccaccagcactttgagagcaggatgagcaagtgcagccgcttcctgaatgacaccagcctgccccacagctgcttccgcatccagcactacgccggcaaggtgctgtaccaggtggagggctttgtggacaagaacaatgacctgctgtacagagacctgagccaggccatgtggaaggccagccacgccctgatcaagagcctcttccctgagggcaacccagccaagatcaacctgaagaggcctcccacagctggcagccagttcaaggcctctgtggccaccctgatgaagaacctgcagaccaagaaccccaactacatccgctgcatcaagcccaatgacaagaaggccgcccacatcttcaatgaggccctggtgtgccaccagatccgctacctgggcctgctggagaatgtgcgggtgcggcgggccggctacgccttccggcaggcctatgagccctgcctggagcgctacaagatgctgtgcaagcagacctggccccactggaagggccctgcccggtctggagtggaggtgctcttcaatgagctggagatccctgtggaggagtacagctttggccgcagcaagatcttcatccggaaccccaggaccctcttcaagctggaggacctgaggaagcagaggctggaggacctggccaccctcatccagaagatctaccggggctggaagtgcaggacccacttcctgctgatgaagaagagccagatcgtgattgctgcctggtacagaagatatgcccagcagaagcgctaccagcagaccaagagcagcgccctggtgatccagagctacatccggggctggaaggccaggaagatcctgcgggagctgaagcaccagaagcgctgcaaggaggccgtgaccaccatcgccgcctactggcacggcacccaggcccggcgggagctgcggcggctgaaggaggaggccaggaacaagcacgccatcgctgtgatctgggcctactggctgggcagcaaggcccggcgggagctgaagaggctgaaggaggaggcccggaggaagcatgctgtggccgtcatctgggcctactggctgggcctgaaggtgcggcgggagtacaggaagttcttccgggccaatgccggcaagaagatctatgagttcaccctgcagagaattgtgcagaagtacttcctggagatgaagaacaagatgcccagcctgagccccatcgacaagaactggcccagccggccctacctgttcctggacagcacccacaaggagctgaagaggatcttccacctgtggcgctgcaagaagtacagagaccagttcacagaccagcagaagctgatctatgaggagaagctggaggccagcgagctgttcaaggacaagaaggccctgtaccccagctctgtgggccagcccttccagggcgcctacctggagatcaacaagaaccccaagtacaagaagctgaaggatgccatcgaggagaagatcatcatcgccgaggtggtgaacaagatcaacagagccaacgggaagagcaccagccgcatcttcctgctgaccaacaacaacctgctgctggccgaccagaagagcggccagatcaagtctgaggtgcccctggtggatgtgaccaaggtgtccatgagcagccagaatgatggcttctttgctgtgcacctgaaggagggcagcgaggccgccagcaagggggacttcctgttcagcagtgaccacctgattgagatggccaccaagctgtaccgcaccaccctgagccagaccaagcagaagctgaacatcgagatcagtgatgagttcctggtgcagttccggcaggacaaggtgtgtgtgaagttcatccagggcaaccagaagaatggatctgtgcccacctgcaagaggaagaacaaccggctgctggaggtggccgtgccctag

SEQ ID NO: 300094 - DNA, 252 bp, Artificial Sequence
  derived and/or modified sequence
atggccaagatggaggtgaagaccagcctgctggacaacatgattggagtgggggacatggtgctgctggagcccctgaatgaggagaccttcatcaacaacctgaagaagagatttgaccacagcgagatctacacctacatcggctctgtggtgatctctgtgaacccctaccgcagcctgcccatctacagccctgagaaggtggaggagtacagaaacagaaacttctatgagctgagcccccactag

SEQ ID NO: 300095 - DNA, 4933 bp, Artificial Sequence
  derived and/or modified sequence
gccccgcagccccgggctgggcccgcgtcccggagcgccaccggagagcgaggacgacgtggaggcggagtggcgcccggcgagctggagaccatggccaaaatggaggtgaaaacctcacttctggacaatatgattggagttggggatatggttcttttagaacctctcaatgaggagaccttcatcaacaacctcaagaagcgctttgaccacagtgaaatatacacatacattggaagtgtggttatatctgttaacccataccggtctttacccatttattcaccagagaaagtggaagaatacaggaacagaaatttttatgaactgagccctcacatctttgccctttcggatgaagcatacagatccctacgagatcaagataaggaccaatgtattctcattactggggaaagtggagcaggaaaaacagaggccagtaagcttgtcatgtcctatgtggcagctgtttgtggaaaaggagcagaagttaatcaagttaaagaacagcttttacagtccaacccggtcctggaagcttttggaaatgccaaaactgtaaggaatgacaactcctctagatttggcaaatatatggatattgaatttgactttaaaggcgatccactaggaggagtaataagtaactatcttttagagaaatctcgggttgttaaacagccaagaggtgaaagaaacttccatgtgttctatcagctgctctctggtgcctctgaagagctcctcaataaacttaagcttgagagggatttcagcaggtataactacctgagtctggattcggccaaagtgaatggagtggatgatgcagcaaattttagaaccgtgcggaatgccatgcagattgtgggctttatggatcatgaagctgagtctgtcttggcggtggtggcagcagtgttgaaactggggaacattgagttcaagcccgaatctcgagtgaatggtctagatgaaagcaaaatcaaagataaaaatgagttaaaagaaatttgtgaattgaccggcattgatcaatcagttctagaacgagcattcagtttccgaacagttgaggccaaacaggagaaagtttcaactacactgaatgtggctcaggcttattatgcccgtgatgctctggctaaaaacctctacagcaggttgttttcatggttggtaaatcgaatcaatgaaagcattaaggcacaaacaaaagtgagaaagaaggtcatgggtgttctggacatttatggctttgagattttcgaggacaacagctttgagcagttcattattaattattgtaacgaaaagctgcaacaaatcttcattgaacttactcttaaagaagagcaggaggagtatatacgggaggatatagaatggactcacattgactacttcaataatgctatcatttgtgacctaatagaaaataacacaaatggaatcctggccatgctggatgaagagtgcctcagacctggcacagtcactgatgagaccttcttagaaaagctgaaccaagtatgtgccacccaccagcattttgagagcaggatgagcaagtgctctcggttcctcaatgacacgtctctgcctcacagctgcttcaggatccagcattatgctggaaaggtgctgtaccaggtggaaggattcgttgacaaaaacaatgaccttctctatcgagacctgtcccaagccatgtggaaggccagccatgccctcatcaagtctttgttccccgaagggaatcccgccaagatcaacctgaaaaggcctcctacagcaggctcacagttcaaggcatccgtggccactctgatgaaaaacctacagaccaagaacccaaactatattaggtgtatcaaaccgaatgataaaaaagcagcacacatcttcaacgaggctctagtgtgtcatcagatcaggtacctggggcttttggagaacgtccgagtgcggagggcaggctacgccttcaggcaggcctatgaaccttgcctagaaagatacaaaatgctttgtaaacaaacatggcctcattggaaaggaccagccaggtctggtgtggaggtcctatttaatgaattagaaattcccgtggaagaatactcctttggtagatcaaagatattcatccgaaacccaagaacattattcaaattagaagacctgaggaagcaacgcctggaggacttggccactctcattcagaagatatatcgggggtggaaatgccgcacacacttcctgctaatgaaaaaaagccaaattgtgattgccgcctggtacaggagatatgcgcaacaaaagaggtaccagcagacaaagagttccgccttagtaattcagtcttatatccggggttggaaggctcgaaaaattctgcgggaactgaagcatcaaaagcgctgtaaggaagcagtcacgaccattgctgcatattggcatgggacccaggcacgaagggaactgagacggctgaaggaggaggctaggaataaacatgctattgcagttatttgggcttactggcttggatctaaggctcgaagggaattgaaacgcttgaaggaggaggctaggcgtaagcatgcagttgctgtcatttgggcttactggcttggactgaaggtacgtagagaatacaggaaattcttcagagccaatgctggaaagaaaatctatgagtttacgcttcagagaattgtgcaaaaatacttcttggaaatgaaaaataagatgccttccttatctccaatagacaagaattggccctcaagaccttacttattcttggattctactcacaaggagctaaaaaggattttccacttgtggaggtgtaaaaaatacagggaccaattcacagaccagcagaaacttatttatgaagagaaactagaagccagtgaactcttcaaagacaagaaggctttatacccatctagtgttgggcaaccattccaaggggcttacctggaaatcaacaagaaccccaagtataagaaactcaaagatgccattgaagaaaagatcatcattgctgaagtcgtgaacaaaattaaccgtgctaatgggaagagtacatctcggattttcctcttaacaaacaataatctccttcttgctgaccaaaagtctggacaaatcaagtcagaggttccattggtggatgtgaccaaggtatcaatgagctcacaaaatgatggcttcttcgccgtccacctcaaagagggctcagaagcagctagtaaaggagactttctcttcagcagtgatcacctgattgaaatggccaccaagctctatcgcacaactctcagccaaaccaaacagaagctcaatattgagatttccgatgagttcctggtacagttcagacaggacaaagtatgtgtgaagtttattcagggaaaccagaaaaatgggagtgtcccaacatgtaaacgaaaaaacaaccgtctccttgaagttgctgtcccttaactggcgcctcctctctactttcatggacttgttcctttgtaatagtgcaatttggttttgttttatttggggttcattgtatgtttgggaatcaccaaaggcttttagagttctttggcaaaataaaaatatttgactaatcaatttttattattggaatagttttaacctttcaaatacatgttctgtcctggagcaggattgtagaaactaacagtgtctattttcatgtctgatgtgttcttcctttagtcatcatgttaggtctgtgtaccctaaatcagcatattactcataaatcattaattaatataagcataggaaatggtcttaaaagatactgcattcattcatcagatatttattccatgcctactctatgctaggcactgtgctagatggtatgaaaacttattaggaacctttttgtttttgagaccattgcattctggctggtttgtgctggtttaacgacatctaagaaggtttagaaatggtgagaccaaaacaataactgttaatgatggacagcattattaggaaccctgtagtatgatatttaacaatataggcttcaagaagggctggtcctaagagggggcagaaatgaatgaccaggttaaatccctctacatgtggtttctgtttgaaaaaaagaaaactgacatttgaacaggacttttaatttgtttaaaactctggtaattacttgtaacagtagaaaatagaagtcattcttattttagaaaaagtgacagaagcagtccagtaagattatatgtttctgtttctggtaaataccatatatgatcctcgaaatgataatatctccagaatattgttttcacccaaatttgagtagatattttaaacacctaacaaagtaaagggctaaaagccattcagatagcagtaaaacattctgtatgatgtgcaataaaacatccaagatcttttttgaaagttttatttataatatacatttttgtatgagaaaggtgattggtacagggtgcctattttagtcatggatcaaaatttgtgtaacttgcagggctttctttctttttcttcaaatttacaagggttcattttggaaactacattttaaactttggaatcaaattgtttcttatttgggaggataatgtatatacattggtattatgttaaataataaaattgttctaatttggtgccatttcctgaatcacaactgtatttttgtatctcaagctattttcatatgttgtgtgtcaatgtatcatctctcagaaaggttttacaatccaaacattatatgttctctgtgtaactgaatttcacttatcttttataaaccagaaacattaattgaaaatattttctggggattttctcttgacttgtatttttaaaaattgctcacataaagaagttctcagaagtc

SEQ ID NO: 300096 - DNA, 5082 bp, Artificial Sequence
  derived and/or modified sequence
cctcccgccgccgctgagcactccgcagctgggtgcgcacgggagcctcaaccgcggcgcgtggaggcagtaccagagcgcgcggcgcgcagtcggccggcagccgcgggacagccttggcagaacagccgcggcgggagccccgcagccccgggctgggcccgcgtcccggagcgccaccggagagcgaggacgacgtggaggcggagtggcgcccggcgaggtagcgccaggcgagctggagaccatggccaaaatggaggtgaaaacctcacttctggacaatatgattggagttggggatatggttcttttagaacctctcaatgaggagaccttcatcaacaacctcaagaagcgctttgaccacagtgaaatatacacatacattggaagtgtggttatatctgttaacccataccggtctttacccatttattcaccagagaaagtggaagaatacaggaacagaaatttttatgaactgagccctcacatctttgccctttcggatgaagcatacagatccctacgagatcaagataaggaccaatgtattctcattactggggaaagtggagcaggaaaaacagaggccagtaagcttgtcatgtcctatgtggcagctgtttgtggaaaaggagcagaagttaatcaagttaaagaacagcttttacagtccaacccggtcctggaagcttttggaaatgccaaaactgtaaggaatgacaactcctctagatttggcaaatatatggatattgaatttgactttaaaggcgatccactaggaggagtaataagtaactatcttttagagaaatctcgggttgttaaacagccaagaggtgaaagaaacttccatgtgttctatcagctgctctctggtgcctctgaagagctcctcaataaacttaagcttgagagggatttcagcaggtataactacctgagtctggattcggccaaagtgaatggagtggatgatgcagcaaattttagaaccgtgcggaatgccatgcagattgtgggctttatggatcatgaagctgagtctgtcttggcggtggtggcagcagtgttgaaactggggaacattgagttcaagcccgaatctcgagtgaatggtctagatgaaagcaaaatcaaagataaaaatgagttaaaagaaatttgtgaattgaccggcattgatcaatcagttctagaacgagcattcagtttccgaacagttgaggccaaacaggagaaagtttcaactacactgaatgtggctcaggcttattatgcccgtgatgctctggctaaaaacctctacagcaggttgttttcatggttggtaaatcgaatcaatgaaagcattaaggcacaaacaaaagtgagaaagaaggtcatgggtgttctggacatttatggctttgagattttcgaggacaacagctttgagcagttcattattaattattgtaacgaaaagctgcaacaaatcttcattgaacttactcttaaagaagagcaggaggagtatatacgggaggatatagaatggactcacattgactacttcaataatgctatcatttgtgacctaatagaaaataacacaaatggaatcctggccatgctggatgaagagtgcctcagacctggcacagtcactgatgagaccttcttagaaaagctgaaccaagtatgtgccacccaccagcattttgagagcaggatgagcaagtgctctcggttcctcaatgacacgtctctgcctcacagctgcttcaggatccagcattatgctggaaaggtgctgtaccaggtggaaggattcgttgacaaaaacaatgaccttctctatcgagacctgtcccaagccatgtggaaggccagccatgccctcatcaagtctttgttccccgaagggaatcccgccaagatcaacctgaaaaggcctcctacagcaggctcacagttcaaggcatccgtggccactctgatgaaaaacctacagaccaagaacccaaactatattaggtgtatcaaaccgaatgataaaaaagcagcacacatcttcaacgaggctctagtgtgtcatcagatcaggtacctggggcttttggagaacgtccgagtgcggagggcaggctacgccttcaggcaggcctatgaaccttgcctagaaagatacaaaatgctttgtaaacaaacatggcctcattggaaaggaccagccaggtctggtgtggaggtcctatttaatgaattagaaattcccgtggaagaatactcctttggtagatcaaagatattcatccgaaacccaagaacattattcaaattagaagacctgaggaagcaacgcctggaggacttggccactctcattcagaagatatatcgggggtggaaatgccgcacacacttcctgctaatgaaaaaaagccaaattgtgattgccgcctggtacaggagatatgcgcaacaaaagaggtaccagcagacaaagagttccgccttagtaattcagtcttatatccggggttggaaggctcgaaaaattctgcgggaactgaagcatcaaaagcgctgtaaggaagcagtcacgaccattgctgcatattggcatgggacccaggcacgaagggaactgagacggctgaaggaggaggctaggaataaacatgctattgcagttatttgggcttactggcttggatctaaggctcgaagggaattgaaacgcttgaaggaggaggctaggcgtaagcatgcagttgctgtcatttgggcttactggcttggactgaaggtacgtagagaatacaggaaattcttcagagccaatgctggaaagaaaatctatgagtttacgcttcagagaattgtgcaaaaatacttcttggaaatgaaaaataagatgccttccttatctccaatagacaagaattggccctcaagaccttacttattcttggattctactcacaaggagctaaaaaggattttccacttgtggaggtgtaaaaaatacagggaccaattcacagaccagcagaaacttatttatgaagagaaactagaagccagtgaactcttcaaagacaagaaggctttatacccatctagtgttgggcaaccattccaaggggcttacctggaaatcaacaagaaccccaagtataagaaactcaaagatgccattgaagaaaagatcatcattgctgaagtcgtgaacaaaattaaccgtgctaatgggaagagtacatctcggattttcctcttaacaaacaataatctccttcttgctgaccaaaagtctggacaaatcaagtcagaggttccattggtggatgtgaccaaggtatcaatgagctcacaaaatgatggcttcttcgccgtccacctcaaagagggctcagaagcagctagtaaaggagactttctcttcagcagtgatcacctgattgaaatggccaccaagctctatcgcacaactctcagccaaaccaaacagaagctcaatattgagatttccgatgagttcctggtacagttcagacaggacaaagtatgtgtgaagtttattcagggaaaccagaaaaatgggagtgtcccaacatgtaaacgaaaaaacaaccgtctccttgaagttgctgtcccttaactggcgcctcctctctactttcatggacttgttcctttgtaatagtgcaatttggttttgttttatttggggttcattgtatgtttgggaatcaccaaaggcttttagagttctttggcaaaataaaaatatttgactaatcaatttttattattggaatagttttaacctttcaaatacatgttctgtcctggagcaggattgtagaaactaacagtgtctattttcatgtctgatgtgttcttcctttagtcatcatgttaggtctgtgtaccctaaatcagcatattactcataaatcattaattaatataagcataggaaatggtcttaaaagatactgcattcattcatcagatatttattccatgcctactctatgctaggcactgtgctagatggtatgaaaacttattaggaacctttttgtttttgagaccattgcattctggctggtttgtgctggtttaacgacatctaagaaggtttagaaatggtgagaccaaaacaataactgttaatgatggacagcattattaggaaccctgtagtatgatatttaacaatataggcttcaagaagggctggtcctaagagggggcagaaatgaatgaccaggttaaatccctctacatgtggtttctgtttgaaaaaaagaaaactgacatttgaacaggacttttaatttgtttaaaactctggtaattacttgtaacagtagaaaatagaagtcattcttattttagaaaaagtgacagaagcagtccagtaagattatatgtttctgtttctggtaaataccatatatgatcctcgaaatgataatatctccagaatattgttttcacccaaatttgagtagatattttaaacacctaacaaagtaaagggctaaaagccattcagatagcagtaaaacattctgtatgatgtgcaataaaacatccaagatcttttttgaaagttttatttataatatacatttttgtatgagaaaggtgattggtacagggtgcctattttagtcatggatcaaaatttgtgtaacttgcagggctttctttctttttcttcaaatttacaagggttcattttggaaactacattttaaactttggaatcaaattgtttcttatttgggaggataatgtatatacattggtattatgttaaataataaaattgttctaatttggtgccatttcctgaatcacaactgtatttttgtatctcaagctattttcatatgttgtgtgtcaatgtatcatctctcagaaaggttttacaatccaaacattatatgttctctgtgtaactgaatttcacttatcttttataaaccagaaacattaattgaaaatattttctggggattttctcttgacttgtatttttaaaaattgctcacataaagaagttctcag

SEQ ID NO: 300097 - DNA, 3411 bp, Artificial Sequence
  derived and/or modified sequence
atggccaagatggaggtgaagaccagcctgctggacaacatgatcggtgtgggagacatggttctgcttgaacctttgaacgaagagacttttatcaataacctgaagaaacgattcgaccattccgagatttatacatatatcgggagcgtggtcattagtgtgaatccctacagaagcctgcctatctatagtccagagaaggtagaagaataccgcaaccgcaatttctatgaactgagcccccacatcttcgcgctaagcgacgaagcctatcggtctctccgagaccaggacaaagaccaatgcattctcatcaccggagagtcaggagctggcaagactgaggccagtaaactggtgatgtcgtatgtcgccgcagtgtgtgggaagggagctgaagtgaaccaagtaaaggagcagctccttcagtctaaccctgtgttagaggccttcggtaatgccaaaacagtgcggaacgacaactcttctcggttcggaaaatatatggacattgaattcgattttaaaggcgatccccttggaggcgtcatcagcaactacctcctggagaaatcacgggtcgtgaagcagcctaggggggagcgaaatttccatgttttttaccagctgttgtctggtgcctcagaagaactgctgaataaacttaagcttgagcgcgatttctcccgctacaattacctgagtctcgacagtgccaaagtcaacggcgtggacgatgcagccaacttccgaaccgtcaggaacgctatgcagatcgtgggatttatggatcacgaggctgagtccgtgctcgctgttgtggccgctgtgctcaagttggggaacattgaatttaaacccgagtccagagtcaacggcctggacgaatccaagattaaggataagaatgaattaaaagaaatatgtgaattgaccgggatcgatcagtctgttctcgagcgggccttttcctttcgcacggttgaagcaaaacaggaaaaggtctctaccacacttaacgtcgctcaggcttactatgcacgggatgctttagctaaaaatctgtactctagactgtttagctggctggtcaaccgtatcaacgaaagcattaaggcgcaaaccaaagtccgcaagaaagtgatgggagtactcgacatatacgggtttgaaatcttcgaagataactctttcgagcagtttataatcaactattgcaatgaaaaactgcagcaaatctttatcgagctgaccttgaaagaagaacaggaggaatacattagggaggatattgaatggacacacattgattatttcaacaacgcaattatctgtgacttgatcgagaataacactaacggcatcctcgcgatgctagatgaggagtgtctgaggccaggaacggtaaccgacgaaaccttccttgagaagttgaaccaggtgtgcgccactcatcagcattttgagtcaagaatgtccaagtgtagccgattcctcaatgacacttcattgccccacagctgttttcggattcagcactacgccgggaaggtactgtaccaagtagaaggctttgttgacaaaaataacgatcttctctacagagacctcagtcaagctatgtggaaagcctcccacgcattgatcaagagcctgttccccgagggcaatcccgcaaagataaacttaaagagacccccaaccgctgggagtcagttcaaggcgagcgtggcaacccttatgaaaaacttgcaaacaaaaaatccaaactacattcgttgcatcaagcccaatgacaaaaaagcggcgcatatcttcaacgaagccctggtctgtcatcagattagatacctgggtctattagaaaacgttcgcgtgagacgcgctggatacgccttcagacaggcttacgagccatgtctggaacgttataaaatgctgtgcaagcagacgtggccccactggaagggccctgcccgttctggagttgaggtgctgttcaacgagctggaaatccccgtagaggaatactctttcggccggagtaaaattttcattaggaatcctagaaccttgtttaagctggaggatctacgtaagcaaaggctggaagatctcgctacccttatccagaaaatctaccgggggtggaaatgtcggacgcactttcttttgatgaagaagagtcagatcgttatcgctgcctggtaccgaagatacgcacagcaaaagcggtatcagcagacaaaaagctccgctctggtgatccagtcttatatacgagggtggaaagcacgcaagattctgagggaactgaagcatcagaagcgctgcaaggaggccgtcactaccatcgcagcttattggcatggaacacaagctagacgagagctgcggcggctcaaggaagaagccaggaacaagcacgctattgccgtgatatgggcttactggctcgggagcaaggccagacgagagttgaagagactgaaggaagaggcccggagaaaacatgccgtcgctgtgatctgggcctactggttagggctgaaggtgcgtcgagaataccgaaagttcttcagagccaatgcaggcaagaagatatatgagttcacactgcagcggattgtgcagaaatacttcctagagatgaaaaacaaaatgccttcactctctccgatcgataaaaactggccgagtaggccatacctgttcctcgattcgactcacaaagagttaaagaggatatttcacttatggcgctgtaaaaaataccgggatcagtttaccgatcagcagaagctcatttacgaggagaagttagaggcctcagaactgtttaaggacaagaaagccttgtacccttctagcgtggggcagcccttccaaggcgcctacctggaaataaataagaaccctaagtacaagaaactgaaggacgctatagaagaaaagataattatcgctgaagtcgtgaacaaaataaatagggctaatggcaaatccacctcacgaatcttcctcttgaccaacaacaatctactcttggccgaccaaaaatctgggcaaattaaatccgaagttccactggtagacgtgacgaaagtgagcatgtcaagtcagaatgatgggttttttgcagttcatttgaaggagggcagcgaagctgcttccaaaggtgactttctgttctcctctgaccacctcatcgagatggctaccaagttgtaccgaacgactctctcccaaacgaagcagaagctgaacattgagatttcggatgagtttttagtccagtttcgccaggacaaagtctgtgtcaaattcatccagggcaatcagaagaatggaagcgtgcctacctgcaaacggaagaataaccggttactggaagtcgcggtgccttag

SEQ ID NO: 300098 - DNA, 3411 bp, Artificial Sequence
  derived and/or modified sequence
atggccaagatggaggtgaagaccagcctgctggacaacatgatcggtgtaggggacatggtgctgcttgagcctctgaacgaagaaacttttatcaataacctgaagaagcgcttcgaccacagcgagatctacacctatattggcagcgtcgtgattagcgtgaatccctataggtcgcttccaatctattcaccagaaaaggtcgaggagtaccgcaacagaaacttctatgaattgtctcctcacattttcgctctttccgatgaggcatacaggagtctgagagatcaggacaaggatcagtgtattttgatcactggagagtccggcgcaggaaagaccgaggcgagtaaactggttatgagttatgtggctgccgtttgtggcaagggggcagaagtaaatcaggtcaaagaacaacttctccaaagtaacccagtgctggaggcctttgggaacgccaagaccgtgaggaatgataatagtagcaggtttggaaaatacatggacattgaattcgattttaaaggagacccactgggaggagtgatctctaactacctgctggagaaaagccgcgtggtgaagcagccaagaggcgaaaggaacttccacgtgttttatcagctgctctccggcgcaagcgaagagctccttaataaactgaagcttgaacgcgatttctcccgctacaattacctgtctctcgattctgccaaggttaacggtgtggacgacgcggccaattttaggacggtacgaaatgctatgcaaatcgtgggattcatggatcatgaggcggagtcagttctagcggttgtggccgctgtgctgaaacttggaaacattgaattcaagcctgaatctcgagtcaacggacttgacgagagtaagataaaagacaagaacgagctcaaagagatctgcgaactaacagggattgaccagtccgtgttggagagggccttctcattccgaacggttgaggctaagcaagaaaaggtgtccacaactttgaatgtggcccaggcatattacgcaagagatgctttggcaaaaaacctctattccagactcttctcttggctagtaaatcgcatcaatgagagtatcaaagctcagacaaaggtgcgtaagaaagtgatgggcgtgctggacatctacggcttcgaaattttcgaggacaacagttttgagcagtttattataaattattgtaacgagaaattgcagcagatttttattgaattgactttaaaggaagagcaagaagaatacatacgtgaggatatcgagtggacacacatcgattacttcaacaacgcgatcatttgcgacctgatcgagaacaacaccaacggcattcttgctatgctggacgaggagtgcttgcgaccaggaacagtgactgacgagaccttcttggagaagctgaatcaggtttgcgcaacccatcagcacttcgaatcgcgtatgtcgaagtgcagccgatttcttaatgacacctcactcccgcattcctgcttcaggatccagcattatgctggaaaagtcctttaccaagttgagggtttcgttgataagaataacgacttgctgtaccgcgatttatctcaggccatgtggaaggctagtcacgctctcatcaagtccttattccctgagggaaatcctgctaagatcaatctgaagaggccaccaacagccggctctcagtttaaggcgagcgtcgccacactgatgaagaatttgcagacaaagaacccaaattacatccgctgtatcaaaccaaatgacaaaaaggccgcacatatcttcaacgaagccctggtgtgccaccaaataaggtatctgggtttgcttgagaatgtgcgcgttcggcgggctggatatgcatttcgacaggcttacgaaccctgcctggagcgctacaagatgctgtgcaagcaaacatggccacattggaaaggcccggctaggagtggcgtggaggtgttgtttaacgaactggagatccccgtggaagagtacagctttgggcgctcaaaaatctttatcagaaacccccgtactctgtttaagctggaggatttgagaaaacagcggctggaggacctggctaccctcatccagaaaatctacaggggatggaagtgtagaacacacttcctcctgatgaaaaaaagccagatagtgatcgccgcttggtacagaagatatgctcaacagaaaagataccagcagacaaaatcaagcgcacttgtcattcagagctacattcgaggatggaaagcacgtaagatacttcgcgagttaaagcatcagaaaaggtgcaaagaggctgtgaccaccatcgcagcatactggcacggcacccaggccagacgcgagctgcggcggttgaaggaggaggccagaaacaagcacgcaatcgcagtgatctgggcctactggctgggaagcaaagcaaggcgagaactgaaaagactcaaggaagaagcccgtagaaaacacgccgtcgctgtgatttgggcatactggcttggactaaaggtgcggagagagtacaggaaattctttagggccaacgccgggaaaaagatctacgaattcaccctgcaaaggattgtccagaaatactttcttgaaatgaagaataagatgccgtctctgtcccccatcgataagaactggccatccaggccctacctcttcctcgactccacccataaagagctgaaaagaatctttcacctgtggcgttgcaagaaataccgggaccagttcacggaccagcaaaaactgatctacgaagaaaaactggaggcttccgagttgtttaaagataaaaaggccctgtaccccagctccgttggccagcccttccagggggcgtaccttgaaattaacaagaatccaaagtacaaaaagttaaaggacgccattgaggagaagatcatcatcgccgaggtcgtgaacaagattaaccgcgccaacgggaaaagtacttccagaattttcttgctgaccaacaacaatttgctcctcgccgatcagaagagcggacagattaaatctgaggtgcctctggtcgatgttacaaaagtatctatgtcttcacaaaatgatggtttttttgccgttcacttaaaagaaggctcagaagctgccagcaagggggactttctgtttagttccgatcatctgatcgagatggctactaaactgtaccgcactactctcagccagactaagcagaaattgaacatagagatttcagacgagttcctagtccagtttagacaggataaagtttgtgtgaagttcatccaaggaaatcaaaaaaacggtagtgtaccaacatgtaagaggaaaaacaatagactcctcgaggttgccgttccatag

SEQ ID NO: 300099 - DNA, 252 bp, Artificial Sequence
  derived and/or modified sequence
atggccaagatggaggtgaagaccagcctgctggacaacatgatcggggtgggggatatggtcctgctggaacctttaaacgaagagacatttatcaacaaccttaaaaagcgatttgaccatagtgagatttatacatatatcggatctgtggtgatttcggtgaatccatacagatccctgcccatttatagtcctgaaaaggtggaggagtataggaaccgaaacttctatgaactgtcaccgcattag

SEQ ID NO: 300100 - DNA, 3411 bp, Artificial Sequence
  derived and/or modified sequence
atggcaaaaatggaggtcaagacgtccttactggacaacatgatcggcgtgggggatatggtgctgttggaacctcttaatgaagaaacctttattaataatctgaaaaagagatttgatcacagcgagatatacacatacattggttctgtggtcatcagtgtcaatccataccggtcccttcctatatattccccggaaaaggtggaagagtataggaataggaacttctatgaactgtcccctcacatcttcgccctgagtgatgaggcatataggtccttgagggatcaggataaagaccagtgcatattgatcacaggtgaaagcggcgcaggaaagacagaagcgagcaagctggtaatgagctacgttgccgctgtatgcggaaagggtgcggaggtgaatcaggtaaaagaacaactgcttcaaagcaatcctgtcctggaagctttcggtaatgctaaaactgtgcgcaacgataacagctcccgatttggcaaatacatggatattgagtttgacttcaaaggggaccccctcggcggagtcatatcgaactatctgctggagaaatccagggttgtcaaacaaccaaggggggagcgtaatttccacgtcttctatcagctactctctggggctagtgaggagttgttaaataagcttaaactggagcgagacttttcccggtacaactatctttcactggatagcgctaaggtgaatggtgtggacgacgccgcaaacttcaggactgttcggaacgccatgcagatcgtcgggtttatggatcacgaagctgaatcggtactggcggtggttgctgcggtgctcaaacttggcaacattgagtttaagcccgaatcgagagtgaacggactagacgaatcgaagatcaaagacaaaaatgagctcaaagaaatctgcgagctcaccggaattgaccagtcagtgctcgagcgagcattttcattcagaacagttgaggccaaacaagaaaaagtcagtaccaccctgaacgtcgcccaagcttattatgccagagatgctctcgctaagaacttatacagccggttattctcatggcttgtcaataggataaacgagtccattaaggctcaaaccaaagtcaggaagaaggtgatgggcgtcctggatatttacgggtttgaaatctttgaagacaactcatttgagcagttcattatcaactactgtaacgaaaagctgcaacagatcttcatcgagctgacgttaaaggaagagcaagaggagtacatccgagaagacatcgagtggacacatatcgattactttaataacgcgatcatctgcgacctgatcgagaacaacaccaacgggattctagctatgctggacgaggaatgcctccggccaggtacagtgacggatgagacatttctcgagaaacttaatcaggtctgtgctacgcaccagcatttcgagtcccgcatgtctaagtgctcaagatttttaaacgacacatctttgccccacagctgtttcaggattcagcattatgcaggaaaggtgctgtatcaagtcgagggtttcgtggacaagaataacgaccttctgtatagggatctgtcccaggctatgtggaaggcttctcacgcactgattaagtctcttttccccgaaggtaacccagccaagatcaatctaaagaggccacctacggctggctcccaatttaaagccagcgtcgcaacactgatgaagaacctgcaaaccaagaatccaaactacatccggtgcatcaagcctaacgataagaaggccgcacatatctttaacgaagcgctggtgtgtcaccagattcgatacctgggcttgctcgagaatgtcagagtgagaagagctggctatgcatttcggcaagcatacgagccttgtctggaaagatataaaatgctctgtaagcaaacctggccccactggaaggggcctgccaggtccggggttgaagttctctttaatgagctcgagatcccagtggaagagtacagtttcggtcgttctaaaattttcattcgtaaccccagaacattatttaagctagaagatctgaggaaacagcggctcgaagacctggctacgctgattcaaaagatctatcgcggatggaaatgccgaacccatttcctgcttatgaaaaagtctcagattgtcatagctgcatggtacaggaggtacgcccagcagaagagatatcagcagacaaaatcctctgcattggtgattcagagctatatccgagggtggaaagccaggaaaatcctacgggaactcaagcatcaaaagcggtgcaaggaggcagtgactacaatcgcagcatactggcacggcactcaagccagacgagagctccggcgtctgaaagaagaagcacggaataaacacgccatcgccgtcatatgggcatattggctgggctctaaggctcgcagagagttgaagcggctgaaggaggaggccagaagaaaacacgccgtggctgtgatctgggcttattggctggggctaaaggttaggcgggagtaccggaagttttttcgcgctaatgcaggtaagaaaatatatgagttcactctgcagcgcatcgtccagaagtattttctcgagatgaaaaacaagatgccttccctgtcacctatcgacaagaattggccctcccgtccctatttgtttctagattccactcataaagagctaaaacgaatttttcatttatggcgctgcaagaagtaccgggaccaattcactgatcagcaaaagctgatctacgaggagaaattggaggcaagcgaactatttaaggacaaaaaagcactttatccaagctcagttggccagccctttcagggcgcttatctggaaataaataaaaacccaaagtacaaaaagctgaaagatgctatcgaagaaaagattatcattgcggaagtagttaataaaatcaaccgtgctaacggaaaaagtacgagccggatcttcctgctgacaaacaacaacctgttgcttgcagaccagaaaagcggacaaatcaaaagcgaagtccctctcgtggacgtgacaaaggtctcaatgagcagccagaatgacgggttctttgcggtccacctcaaagagggatcagaggctgcctccaaaggagatttcctgttcagctctgaccatcttattgagatggctactaaactttacagaaccactctgtcccagactaagcagaaactcaacattgagattagcgacgaattcttagtccagttccgccaggacaaggtctgtgtcaagttcatccagggtaaccagaaaaatggatctgtgcctacctgcaagcgaaagaacaatagacttttggaggttgcagtaccctag

SEQ ID NO: 300101 - DNA, 3411 bp, Artificial Sequence
  derived and/or modified sequence
atggcaaaaatggaagtcaaaacctcgctgctggataatatgattggcgtcggggacatggttttgctcgagccattgaatgaggagaccttcatcaataacttgaagaaacgctttgatcactccgaaatctacacttacattggctctgtggtcatctctgtgaatccctataggagtctgccaatatattctcccgagaaggttgaggagtaccgcaatcgtaatttctatgaactgagcccccacatattcgcgctgagcgatgaagcctaccgttcgttacgagatcaggataaggatcagtgcatcctaattacaggagagagtggggcaggcaagaccgaggcctcaaagctcgtaatgtcctacgtagccgctgtgtgcggtaagggagccgaggtaaaccaggtcaaagagcagttgcttcagtccaaccctgtcctcgaggcctttggtaacgcgaaaacagttcgtaatgataattcttcgagatttggcaaatacatggacatcgagttcgacttcaaaggcgacccactgggcggagtcataagcaattatttgcttgaaaagagcagggtggtgaaacagccacgcggagagagaaacttccacgtgttctaccagctcctctctggagccagcgaagaactgctgaacaagctgaaacttgagcgcgacttcagcagatacaactacttgtcattagattccgctaaggtcaacggagttgacgacgccgcaaactttcgcaccgtcagaaatgcaatgcagattgtgggattcatggaccacgaggcggaatctgtgctcgccgtggtggcagccgtcctgaagttagggaatatcgaattcaagccagagagccgtgtaaacgggctggatgaaagtaaaattaaagacaaaaatgaactaaaggagatctgtgagctcactggtatcgatcaatcagttctcgaacgtgccttttccttccggaccgtggaggcgaagcaggaaaaagtttcaaccaccttaaacgtggcacaggcctattatgctagagatgctctggcaaagaatctctacagccgtcttttctcatggttggtcaacaggatcaacgaatcaattaaagcccaaaccaaggttaggaagaaagtgatgggcgtgctggacatctacggcttcgagatatttgaggacaattcttttgagcagttcatcatcaactattgtaacgaaaaacttcagcagatcttcatcgaactgacactcaaggaagagcaggaggagtacattagggaggatattgagtggacccacattgattattttaacaacgccatcatatgcgatctgattgagaataataccaatgggattcttgccatgctggacgaagagtgtctgaggcctggcaccgttacagacgaaaccttcttagaaaagctcaatcaggtctgcgccacccaccagcacttcgaatcccgcatgtcaaagtgcagcaggtttctcaacgatactagtcttccgcactcatgctttagaatccagcactacgcaggcaaagtattgtaccaggtggaaggatttgtggataagaacaatgatctcctctacagggacctctcccaggccatgtggaaggcttcacatgctctaatcaagagccttttccccgaagggaaccccgcaaaaattaatctgaagagaccccctaccgctggttcacagttcaaagctagtgtggcgacactcatgaagaatctgcaaacaaaaaatccgaattatatccggtgtattaagccaaatgacaagaaggcggcacacatctttaacgaagctctggtgtgtcaccaaatccgttatctcggtctcctggagaatgtgcgtgttaggcgcgcaggatacgctttccgccaagcctatgagccttgcctagagcgctacaaaatgctctgcaagcagacctggccacactggaagggcccagcacgctctggggttgaagtgctcttcaatgaactcgagattccagtggaggagtacagttttggccgttccaaaatctttataaggaatcccaggactctgtttaagttggaggacttgaggaaacagagactcgaagacctggccacactgatacagaaaatttatcgcggatggaagtgccgcacgcacttcctcctgatgaagaaatctcagattgtgatcgctgcctggtaccgcaggtatgctcagcagaaaaggtaccagcagaccaagagttccgccctggttattcagagctacattcgcggatggaaagctcgcaagatcctgcgtgagctgaaacaccaaaaacggtgtaaggaagccgtaacaacaatcgctgcttattggcatggcacccaggccagacgtgagctgagaagactgaaagaggaggccagaaataaacacgccattgccgtgatatgggcgtactggctgggatctaaagcaagacgggagctgaaaagactcaaggaggaggctcggagaaagcacgctgtggccgttatttgggcgtattggctgggtctgaaagtgaggcgggaataccggaagtttttccgcgcaaatgcgggaaaaaagatttacgagtttaccctccagaggattgtccagaagtattttctggaaatgaagaacaaaatgccgtccttgagtccgattgacaaaaactggcccagccgcccttacctttttctggatagcacgcataaagaattgaagcggatctttcatctctggcgttgcaagaaatatagagaccagtttactgaccagcagaaacttatttatgaggagaaattagaggcctcggagctatttaaggataaaaaggcactttacccgtcttccgttggccagcccttccagggcgcataccttgagatcaacaaaaaccctaaatacaaaaagttgaaggatgccattgaggaaaaaattattatcgcagaggtcgtgaacaagattaatcgcgctaatggtaagtccacttcgagaatattcctgctgacaaacaacaacctcctcctcgcagatcaaaagtctggccagatcaagtctgaggtgccactagttgatgtgaccaaagtttcaatgtctagccagaatgatgggttcttcgcggtccacctgaaggagggctccgaagctgccagcaagggcgacttcctgttttcatctgatcacctcattgagatggccactaaactgtacagaaccacgctttcccaaactaagcaaaagctgaacatcgaaatttcagatgagtttttggtgcaattccggcaggataaagtatgcgtgaaattcattcaggggaatcagaagaatgggtccgtgcctacttgcaagagaaaaaacaaccggctcctcgaagtcgctgtcccatag

SEQ ID NO: 300102 - DNA, 252 bp, Artificial Sequence
  derived and/or modified sequence
atggccaaaatggaggtaaagacctccctgttggacaacatgatcggagtgggggacatggtgctgcttgagcccctaaacgaagaaacctttatcaacaatcttaagaaaaggttcgaccattctgagatttacacttacatcggaagtgtcgtgatatccgttaacccatacagatcgctgcccatttactcacctgaaaaggtggaagagtataggaatcgcaacttttatgagctctcaccccactag

SEQ ID NO: 300103 - DNA, 3411 bp, Artificial Sequence
  derived and/or modified sequence
atggccaagatggaggtgaagaccagcctgctggacaacatgatcggcgtgggcgacatggtgctgctggagcccctgaacgaggagaccttcatcaacaacctgaagaagagattcgaccacagcgagatctacacctacatcggcagcgtggtgatcagcgtgaacccctacagaagcctgcccatctacagccccgagaaggtggaggagtacagaaacagaaacttctacgagctgagcccccacatcttcgccctgagcgacgaggcctacagaagcctgagagaccaggacaaggaccagtgcatcctgatcaccggcgagagcggcgccggcaagaccgaggccagcaagctggtgatgagctacgtggccgccgtgtgcggcaagggcgccgaggtgaaccaggtgaaggagcagctgctgcagagcaaccccgtgctggaggccttcggcaacgccaagaccgtgagaaacgacaacagcagcagattcggcaagtacatggacatcgagttcgacttcaagggcgaccccctgggcggcgtgatcagcaactacctgctggagaagagcagagtggtgaagcagcccagaggcgagagaaacttccacgtgttctaccagctgctgagcggcgccagcgaggagctgctgaacaagctgaagctggagagagacttcagcagatacaactacctgagcctggacagcgccaaggtgaacggcgtggacgacgccgccaacttcagaaccgtgagaaacgccatgcagatcgtgggcttcatggaccacgaggccgagagcgtgctggccgtggtggccgccgtgctgaagctgggcaacatcgagttcaagcccgagagcagagtgaacggcctggacgagagcaagatcaaggacaagaacgagctgaaggagatctgcgagctgaccggcatcgaccagagcgtgctggagagagccttcagcttcagaaccgtggaggccaagcaggagaaggtgagcaccaccctgaacgtggcccaggcctactacgccagagacgccctggccaagaacctgtacagcagactgttcagctggctggtgaacagaatcaacgagagcatcaaggcccagaccaaggtgagaaagaaggtgatgggcgtgctggacatctacggcttcgagatcttcgaggacaacagcttcgagcagttcatcatcaactactgcaacgagaagctgcagcagatcttcatcgagctgaccctgaaggaggagcaggaggagtacatcagagaggacatcgagtggacccacatcgactacttcaacaacgccatcatctgcgacctgatcgagaacaacaccaacggcatcctggccatgctggacgaggagtgcctgagacccggcaccgtgaccgacgagaccttcctggagaagctgaaccaggtgtgcgccacccaccagcacttcgagagcagaatgagcaagtgcagcagattcctgaacgacaccagcctgccccacagctgcttcagaatccagcactacgccggcaaggtgctgtaccaggtggagggcttcgtggacaagaacaacgacctgctgtacagagacctgagccaggccatgtggaaggccagccacgccctgatcaagagcctgttccccgagggcaaccccgccaagatcaacctgaagagaccccccaccgccggcagccagttcaaggccagcgtggccaccctgatgaagaacctgcagaccaagaaccccaactacatcagatgcatcaagcccaacgacaagaaggccgcccacatcttcaacgaggccctggtgtgccaccagatcagatacctgggcctgctggagaacgtgagagtgagaagagccggctacgccttcagacaggcctacgagccctgcctggagagatacaagatgctgtgcaagcagacctggccccactggaagggccccgccagaagcggcgtggaggtgctgttcaacgagctggagatccccgtggaggagtacagcttcggcagaagcaagatcttcatcagaaaccccagaaccctgttcaagctggaggacctgagaaagcagagactggaggacctggccaccctgatccagaagatctacagaggctggaagtgcagaacccacttcctgctgatgaagaagagccagatcgtgatcgccgcctggtacagaagatacgcccagcagaagagataccagcagaccaagagcagcgccctggtgatccagagctacatcagaggctggaaggccagaaagatcctgagagagctgaagcaccagaagagatgcaaggaggccgtgaccaccatcgccgcctactggcacggcacccaggccagaagagagctgagaagactgaaggaggaggccagaaacaagcacgccatcgccgtgatctgggcctactggctgggcagcaaggccagaagagagctgaagagactgaaggaggaggccagaagaaagcacgccgtggccgtgatctgggcctactggctgggcctgaaggtgagaagagagtacagaaagttcttcagagccaacgccggcaagaagatctacgagttcaccctgcagagaatcgtgcagaagtacttcctggagatgaagaacaagatgcccagcctgagccccatcgacaagaactggcccagcagaccctacctgttcctggacagcacccacaaggagctgaagagaatcttccacctgtggagatgcaagaagtacagagaccagttcaccgaccagcagaagctgatctacgaggagaagctggaggccagcgagctgttcaaggacaagaaggccctgtaccccagcagcgtgggccagcccttccagggcgcctacctggagatcaacaagaaccccaagtacaagaagctgaaggacgccatcgaggagaagatcatcatcgccgaggtggtgaacaagatcaacagagccaacggcaagagcaccagcagaatcttcctgctgaccaacaacaacctgctgctggccgaccagaagagcggccagatcaagagcgaggtgcccctggtggacgtgaccaaggtgagcatgagcagccagaacgacggcttcttcgccgtgcacctgaaggagggcagcgaggccgccagcaagggcgacttcctgttcagcagcgaccacctgatcgagatggccaccaagctgtacagaaccaccctgagccagaccaagcagaagctgaacatcgagatcagcgacgagttcctggtgcagttcagacaggacaaggtgtgcgtgaagttcatccagggcaaccagaagaacggcagcgtgcccacctgcaagagaaagaacaacagactgctggaggtggccgtgccctag

SEQ ID NO: 300104 - DNA, 252 bp, Artificial Sequence
  derived and/or modified sequence
atggccaagatggaggtgaagaccagcctgctggacaacatgatcggcgtgggcgacatggtgctgctggagcccctgaacgaggagaccttcatcaacaacctgaagaagagattcgaccacagcgagatctacacctacatcggcagcgtggtgatcagcgtgaacccctacagaagcctgcccatctacagccccgagaaggtggaggagtacagaaacagaaacttctacgagctgagcccccactag

SEQ ID NO: 300105 - protein, 1107 aa, Artificial Sequence
  derived and/or modified sequence
MAKMEVKTSLLDNMIGVGDMVLLEPLNEETFINNLKKRFDHSEIYTYIGSVVISVNPYRSLPIYSPEKVEEYRNRNFYELSPHIFALSDEAYRSLRDQDKDQCILITGESGAGKTEASKLVMSYVAAVCGKGAEVNQVKEQLLQSNPVLEAFGNAKTVRNDNSSRFGKYMDIEFDFKGDPLGGVISNYLLEKSRVVKQPRGERNFHVFYQLLSGASEELLNKLKLERDFSRYNYLSLDSAKVNGVDDAANFRTVRNAMQIVGFMDHEAESVLAVVAAVLKLGNIEFKPESRVNGLDESKIKDKNELKEICELTGIDQSVLERAFSFRTVEAKQEKVSTTLNVAQAYYARDALAKNLYSRLFSWLVNRINESIKAQTKVRKKVMGVLDIYGFEIFEDNSFEQFIINYCNEKLQQIFIELTLKEEQEEYIREDIEWTHIDYFNNAIICDLIENNTNGILAMLDEECLRPGTVTDETFLEKLNQVCATHQHFESRMSKCSRFLNDTSLPHSCFRIQHYAGKVLYQVEGFVDKNNDLLYRDLSQAMWKASHALIKSLFPEGNPAKINLKRPPTAGSQFKASVATLMKNLQTKNPNYIRCIKPNDKKAAHIFNEALVCHQIRYLGLLENVRVRRAGYAFRQAYEPCLERYKMLCKQTWPHWKGPARSGVEVLFNELEIPVEEYSFGRSKIFIRNPRTLFKLEDLRKQRLEDLATLIQKIYRGWKCRTHFLLMKKSQIVIAAWYRRYAQQKRYQQTKSSALVIQSYIRGWKARKILRELKHQKRCKEAVTTIAAYWHGTQARRELKRLKEEARRKHAVAVIWAYWLGLKVRREYRKFFRANAGKKIYEFTLQRIVQKYFLEMKNKMPSLSPIDKNWPSRPYLFLDSTHKELKRIFHLWRCKKYRDQFTDQQKLIYEEKLEASELFKDKKALYPSSVGQPFQGAYLEINKNPKYKKLKDAIEEKIIIAEVVNKINRANGKSTSRIFLLTNNNLLLADQKSGQIKSEVPLVDVTKVSMSSQNDGFFAVHLKEGSEAASKGDFLFSSDHLIEMATKLYRTTLSQTKQKLNIEISDEFLVQFRQDKVCVKFIQGNQKNGSVPTCKRKNNRLLEVAVP

SEQ ID NO: 300106 - protein, 381 aa, Artificial Sequence
  derived and/or modified sequence
MKKSQIVIAAWYRRYAQQKRYQQTKSSALVIQSYIRGWKARKILRELKHQKRCKEAVTTIAAYWHGTQARRELKRLKEEARRKHAVAVIWAYWLGLKVRREYRKFFRANAGKKIYEFTLQRIVQKYFLEMKNKMPSLSPIDKNWPSRPYLFLDSTHKELKRIFHLWRCKKYRDQFTDQQKLIYEEKLEASELFKDKKALYPSSVGQPFQGAYLEINKNPKYKKLKDAIEEKIIIAEVVNKINRANGKSTSRIFLLTNNNLLLADQKSGQIKSEVPLVDVTKVSMSSQNDGFFAVHLKEGSEAASKGDFLFSSDHLIEMATKLYRTTLSQTKQKLNIEISDEFLVQFRQDKVCVKFIQGNQKNGSVPTCKRKNNRLLEVAVP

SEQ ID NO: 300107 - DNA, 3324 bp, Artificial Sequence
  derived and/or modified sequence
atggctaagatggaagtgaagacgagcctgctggataacatgataggggtcggagacatggttctcctggaaccactgaatgaggaaacattcatcaacaacctcaaaaaaaggtttgatcatagcgagatttatacctacataggcagcgttgttatctcagtgaatccataccggtccctccccatctatagcccagaaaaggtcgaggaatatcgaaaccgcaacttttatgagctgtccccccatatctttgcactgtctgacgaagcatacagaagcctcagggatcaagataaggatcagtgtatcctcataacaggggagtccggggcgggcaaaactgaggctagtaagttggtcatgagttatgtcgccgccgtgtgtggcaaaggtgccgaagttaatcaagtcaaagagcaacttctgcagtcaaatccagttctggaggccttcgggaatgccaagaccgtgcgcaacgataatagttcccgatttggcaagtacatggatatcgagttcgacttcaaaggtgaccccctcgggggcgtaatcagtaattatctcctggagaaatcccgggtagtaaagcagccacgtggcgagcggaatttccatgtcttttaccagctgctgagtggggcctccgaggagttattgaataagttaaagctcgaaagggattttagcagatacaactacttaagtctagacagcgctaaggtgaatggtgtagatgacgctgccaactttcggaccgtcagaaacgctatgcagattgtggggttcatggaccatgaggcagaaagcgtactagccgtggttgcggctgtgctgaagttggggaatattgagttcaagcccgagagtcgcgtaaacggtttagacgaatccaagattaaggacaagaacgagcttaaggaaatctgcgaactcactgggatcgaccagagcgtcctcgagcgcgctttttctttccgcactgtggaggcgaagcaggaaaaggtgagtaccaccctcaatgtcgctcaggcttactacgctcgggacgcactcgcaaaaaatttgtactccaggctgttcagttggttggttaatcgcatcaatgaatccataaaggcccagactaaggtacgcaaaaaggtgatgggtgtgctggatatctacggattcgaaattttcgaggataactcattcgagcaatttattattaattactgtaacgaaaaactgcagcagattttcattgaactgactcttaaagaagaacaggaagagtacattcgagaggatatcgaatggacacacattgattattttaacaatgcaatcatttgtgacttgatcgaaaacaataccaatggcatcctcgcaatgcttgacgaagaatgcttgcgaccaggcactgtgactgacgagacatttctggaaaagctgaatcaggtgtgcgcaactcaccagcatttcgaatcaaggatgtccaagtgcagtaggttcctcaatgacacttccctgccacacagctgctttaggattcagcactatgcagggaaggtgctgtaccaagttgaaggattcgtagataagaataacgatctgctctaccgagatctgagccaggccatgtggaaagcaagtcatgcacttattaagtccctgtttcctgagggcaatcccgccaagattaatctgaagaggcctcccacggctgggtcccagtttaaggcctccgtggcgaccctgatgaaaaacctgcagaccaaaaaccctaactacatcagatgcatcaaaccaaatgacaaaaaagccgctcacatttttaatgaggctcttgtgtgccaccaaattaggtacctcgggcttctcgagaacgtacgggtcagacgggccggatacgcgttccgacaagcatacgagccatgccttgaacgatataaaatgctctgtaagcagacatggccacactggaaaggtccagcaaggtcaggagtagaggtgctgttcaacgagctggaaattcccgtggaggaatatagcttcggacggagtaagattttcattaggaatccaaggaccctgttcaagctggaagacctacgaaagcagcggctagaagacctagcaaccttgatacagaagatctacaggggatggaagtgtcgcacccatttcttgctcatgaaaaaatcccagattgtgattgctgcctggtaccggcgatacgcacagcaaaaaaggtaccaacagaccaagtccagcgccctcgttatccagtcttatatcaggggctggaaagcccgcaagatattaagggaacttaagcatcaaaaacgctgtaaggaagccgtcacaaccatagcagcgtactggcacgggacccaggctcgacgggagcttaagaggctgaaggaggaggctcgtcgtaagcacgccgttgctgtgatttgggcatactggttgggcctcaaagtgagacgggaatatagaaagtttttccgcgccaacgccggtaaaaagatctacgaatttactttgcagcggatcgtccagaagtactttttggagatgaagaacaagatgccgtctctgagcccaatcgataagaattggccgtctcgtccatatctttttctcgattcaacacataaagaattgaagcgtatcttccacctgtggaggtgcaaaaagtacagagaccagttcactgaccagcaaaagctaatctatgaggagaaacttgaggcttctgaactgtttaaagacaagaaagccctatatccatcaagcgtcggccagccatttcagggggcctatctggaaattaataagaatcccaagtataaaaaactgaaagacgccatcgaagagaagatcatcatcgcagaggtcgtgaacaagataaatcgagccaacggtaagagtactagtaggatatttttactgaccaacaacaacctcctcctcgccgatcaaaagagcgggcagattaagtccgaggtgcctctggttgacgttactaaggtgagcatgagctcgcagaacgatgggttttttgctgtgcacctgaaagaaggttcagaggcggcttccaagggcgacttcctgttttcatcggatcatctgattgagatggcaaccaagctttatcgcactacactgagccagacaaaacaaaaactcaatatcgagatctccgatgagttcctggtgcaatttagacaggataaagtgtgtgtgaagtttatccaaggcaatcaaaaaaacggctccgtgcctacgtgcaaacggaagaacaatcgcctgctagaagtcgccgtaccctag

SEQ ID NO: 300108 - DNA, 1146 bp, Artificial Sequence
  derived and/or modified sequence
atgaaaaagtcccagatcgtcattgccgcctggtatagaaggtacgcccagcagaagcggtaccagcagaccaaaagttctgctctcgtcattcagagctacatcagggggtggaaggcccgtaagatcctgcgcgagttgaagcatcagaagaggtgtaaggaggcggtgacaacaatcgccgcgtactggcacgggacccaagcccgccgtgaactaaaacggttgaaagaagaggccaggagaaagcatgccgtggcagtgatttgggcttattggctgggtctcaaggtgcgaagggaatataggaagttttttcgggcgaatgcggggaaaaaaatatatgagtttacactgcagagaatagtgcaaaagtactttctggaaatgaaaaacaaaatgccttccctctcgccaattgacaagaattggcccagcagaccttaccttttcctcgattctacccataaggagctgaaacgcatttttcatctgtggcggtgcaagaaatatagagatcagtttactgaccagcaaaaactgatttacgaggagaagctggaagcctctgaactgttcaaagataaaaaagccctataccccagcagcgtagggcagccttttcagggtgcgtacctggaaatcaacaagaatcccaaatataagaagcttaaggacgcgatcgaggagaagatcattatagccgaagtcgtgaacaagatcaatcgagccaatggaaagtctaccagcagaattttcctgctgacaaacaacaatctcctgttggccgatcagaagagcgggcagattaaatcagaagtgcctctggttgatgtgactaaggtgtcaatgtccagccaaaatgacggttttttcgccgtccatctgaaggaaggatctgaagcagcttccaagggcgacttcctctttagttccgatcacttaatcgagatggccactaagttgtatagaaccacactgtcacagaccaagcaaaaactcaatattgagatctctgatgagttcctggttcagtttcggcaggataaagtctgcgttaagttcatccagggtaatcagaagaacggatcggtgccgacatgcaagcgcaagaataatcgactgttggaggtggccgtgccttag

SEQ ID NO: 300109 - DNA, 3324 bp, Artificial Sequence
  derived and/or modified sequence
atggccaagatggaggtgaagaccagcctgctggacaacatgattggagtgggggacatggtgctgctggagcccctgaatgaggagaccttcatcaacaacctgaagaagagatttgaccacagcgagatctacacctacatcggctctgtggtgatctctgtgaacccctaccgcagcctgcccatctacagccctgagaaggtggaggagtacagaaacagaaacttctatgagctgagcccccacatctttgccctgagtgatgaggcctaccgcagcctgcgggaccaggacaaggaccagtgcatcctgatcactggagagagcggggccggcaagacagaggccagcaagctggtgatgtcctatgtggccgctgtgtgtgggaaaggagctgaggtgaaccaggtgaaggagcagctgctgcagagcaaccctgtgctggaggcctttggaaatgccaagacagtgagaaatgacaacagcagcagatttgggaagtacatggacatcgagtttgacttcaagggggaccccctgggcggcgtcatcagcaactacctgctggagaagagccgggtggtgaagcagcccagaggagagaggaacttccacgtgttctaccagctgctgagcggggccagcgaggagctgctgaacaagctgaagctggagcgggacttcagccgctacaactacctgagcctggacagcgccaaggtgaatggagtggatgatgctgccaacttcagaacagtgagaaatgccatgcagatcgtgggcttcatggaccacgaggccgagagcgtgctggccgtggtggccgctgtgctgaagctgggcaacatcgagttcaagccagagagccgggtgaatggcctggatgagagcaagatcaaggacaagaatgagctgaaggagatctgtgagctgactggaattgaccagagcgtgctggagcgggccttctccttcagaacagtggaggccaagcaggagaaggtgtccaccaccctgaatgtggcccaggcctactatgccagagatgccctggccaagaacctgtacagccgcctcttctcctggctggtgaaccgcatcaatgaaagcatcaaggcccagaccaaggtgaggaagaaggtgatgggcgtgctggacatctacggctttgagatctttgaggacaacagctttgagcagttcatcatcaactactgcaatgagaagctgcagcagatcttcatcgagctgaccctgaaggaggagcaggaggagtacatccgggaggacatcgagtggacccacatcgactacttcaacaatgccatcatctgtgacctgattgagaacaacaccaacggcatcctggccatgctggatgaagaatgtctgcggcccggcaccgtgacagatgagaccttcctggagaagctgaaccaggtgtgtgccacccaccagcactttgagagcaggatgagcaagtgcagccgcttcctgaatgacaccagcctgccccacagctgcttccgcatccagcactacgccggcaaggtgctgtaccaggtggagggctttgtggacaagaacaatgacctgctgtacagagacctgagccaggccatgtggaaggccagccacgccctgatcaagagcctcttccctgagggcaacccagccaagatcaacctgaagaggcctcccacagctggcagccagttcaaggcctctgtggccaccctgatgaagaacctgcagaccaagaaccccaactacatccgctgcatcaagcccaatgacaagaaggccgcccacatcttcaatgaggccctggtgtgccaccagatccgctacctgggcctgctggagaatgtgcgggtgcggcgggccggctacgccttccggcaggcctatgagccctgcctggagcgctacaagatgctgtgcaagcagacctggccccactggaagggccctgcccggtctggagtggaggtgctcttcaatgagctggagatccctgtggaggagtacagctttggccgcagcaagatcttcatccggaaccccaggaccctcttcaagctggaggacctgaggaagcagaggctggaggacctggccaccctcatccagaagatctaccggggctggaagtgcaggacccacttcctgctgatgaagaagagccagatcgtgattgctgcctggtacagaagatatgcccagcagaagcgctaccagcagaccaagagcagcgccctggtgatccagagctacatccggggctggaaggccaggaagatcctgcgggagctgaagcaccagaagcgctgcaaggaggccgtgaccaccatcgccgcctactggcacggcacccaggcccggcgggagctgaagaggctgaaggaggaggcccggaggaagcatgctgtggccgtcatctgggcctactggctgggcctgaaggtgagaagagagtacaggaagttcttccgggccaatgctgggaagaagatctatgagttcaccctgcagagaattgtgcagaagtacttcctggagatgaagaacaagatgcccagcctgagccccatcgacaagaactggcccagccggccctacctgttcctggacagcacccacaaggagctgaagaggatcttccacctgtggcgctgcaagaagtacagagaccagttcacagaccagcagaagctgatctatgaggagaagctggaggccagcgagctgttcaaggacaagaaggccctgtaccccagctctgtgggccagcccttccagggcgcctacctggagatcaacaagaaccccaagtacaagaagctgaaggatgccatcgaggagaagatcatcatcgccgaggtggtgaacaagatcaacagagccaacgggaagagcaccagccgcatcttcctgctgaccaacaacaacctgctgctggccgaccagaagagcggccagatcaagtctgaggtgcccctggtggatgtgaccaaggtgtccatgagcagccagaatgatggcttctttgctgtgcacctgaaggagggcagcgaggccgccagcaaaggagacttcctgttcagcagtgaccacctgattgagatggccaccaagctgtaccgcaccaccctgagccagaccaagcagaagctgaacatcgagatcagtgatgagttcctggtgcagttccggcaggacaaggtgtgtgtgaagttcatccagggcaaccagaagaatggatctgtgcccacctgcaagaggaagaacaaccggctgctggaggtggccgtgccctag

SEQ ID NO: 300110 - DNA, 1146 bp, Artificial Sequence
  derived and/or modified sequence
atgaagaagagccagatcgtgattgctgcctggtacagaagatatgcccagcagaagcgctaccagcagaccaagagcagcgccctggtgatccagagctacatccggggctggaaggccaggaagatcctgcgggagctgaagcaccagaagcgctgcaaggaggccgtgaccaccatcgccgcctactggcacggcacccaggcccggcgggagctgaagaggctgaaggaggaggcccggaggaagcatgctgtggccgtcatctgggcctactggctgggcctgaaggtgagaagagagtacaggaagttcttccgggccaatgctgggaagaagatctatgagttcaccctgcagagaattgtgcagaagtacttcctggagatgaagaacaagatgcccagcctgagccccatcgacaagaactggcccagccggccctacctgttcctggacagcacccacaaggagctgaagaggatcttccacctgtggcgctgcaagaagtacagagaccagttcacagaccagcagaagctgatctatgaggagaagctggaggccagcgagctgttcaaggacaagaaggccctgtaccccagctctgtgggccagcccttccagggcgcctacctggagatcaacaagaaccccaagtacaagaagctgaaggatgccatcgaggagaagatcatcatcgccgaggtggtgaacaagatcaacagagccaacgggaagagcaccagccgcatcttcctgctgaccaacaacaacctgctgctggccgaccagaagagcggccagatcaagtctgaggtgcccctggtggatgtgaccaaggtgtccatgagcagccagaatgatggcttctttgctgtgcacctgaaggagggcagcgaggccgccagcaaaggagacttcctgttcagcagtgaccacctgattgagatggccaccaagctgtaccgcaccaccctgagccagaccaagcagaagctgaacatcgagatcagtgatgagttcctggtgcagttccggcaggacaaggtgtgtgtgaagttcatccagggcaaccagaagaatggatctgtgcccacctgcaagaggaagaacaaccggctgctggaggtggccgtgccctag

SEQ ID NO: 300111 - DNA, 4764 bp, Artificial Sequence
  derived and/or modified sequence
agctggagaccatggccaaaatggaggtgaaaacctcacttctggacaatatgattggagttggggatatggttcttttagaacctctcaatgaggagaccttcatcaacaacctcaagaagcgctttgaccacagtgaaatatacacatacattggaagtgtggttatatctgttaacccataccggtctttacccatttattcaccagagaaagtggaagaatacaggaacagaaatttttatgaactgagccctcacatctttgccctttcggatgaagcatacagatccctacgagatcaagataaggaccaatgtattctcattactggggaaagtggagcaggaaaaacagaggccagtaagcttgtcatgtcctatgtggcagctgtttgtggaaaaggagcagaagttaatcaagttaaagaacagcttttacagtccaacccggtcctggaagcttttggaaatgccaaaactgtaaggaatgacaactcctctagatttggcaaatatatggatattgaatttgactttaaaggcgatccactaggaggagtaataagtaactatcttttagagaaatctcgggttgttaaacagccaagaggtgaaagaaacttccatgtgttctatcagctgctctctggtgcctctgaagagctcctcaataaacttaagcttgagagggatttcagcaggtataactacctgagtctggattcggccaaagtgaatggagtggatgatgcagcaaattttagaaccgtgcggaatgccatgcagattgtgggctttatggatcatgaagctgagtctgtcttggcggtggtggcagcagtgttgaaactggggaacattgagttcaagcccgaatctcgagtgaatggtctagatgaaagcaaaatcaaagataaaaatgagttaaaagaaatttgtgaattgaccggcattgatcaatcagttctagaacgagcattcagtttccgaacagttgaggccaaacaggagaaagtttcaactacactgaatgtggctcaggcttattatgcccgtgatgctctggctaaaaacctctacagcaggttgttttcatggttggtaaatcgaatcaatgaaagcattaaggcacaaacaaaagtgagaaagaaggtcatgggtgttctggacatttatggctttgagattttcgaggacaacagctttgagcagttcattattaattattgtaacgaaaagctgcaacaaatcttcattgaacttactcttaaagaagagcaggaggagtatatacgggaggatatagaatggactcacattgactacttcaataatgctatcatttgtgacctaatagaaaataacacaaatggaatcctggccatgctggatgaagagtgcctcagacctggcacagtcactgatgagaccttcttagaaaagctgaaccaagtatgtgccacccaccagcattttgagagcaggatgagcaagtgctctcggttcctcaatgacacgtctctgcctcacagctgcttcaggatccagcattatgctggaaaggtgctgtaccaggtggaaggattcgttgacaaaaacaatgaccttctctatcgagacctgtcccaagccatgtggaaggccagccatgccctcatcaagtctttgttccccgaagggaatcccgccaagatcaacctgaaaaggcctcctacagcaggctcacagttcaaggcatccgtggccactctgatgaaaaacctacagaccaagaacccaaactatattaggtgtatcaaaccgaatgataaaaaagcagcacacatcttcaacgaggctctagtgtgtcatcagatcaggtacctggggcttttggagaacgtccgagtgcggagggcaggctacgccttcaggcaggcctatgaaccttgcctagaaagatacaaaatgctttgtaaacaaacatggcctcattggaaaggaccagccaggtctggtgtggaggtcctatttaatgaattagaaattcccgtggaagaatactcctttggtagatcaaagatattcatccgaaacccaagaacattattcaaattagaagacctgaggaagcaacgcctggaggacttggccactctcattcagaagatatatcgggggtggaaatgccgcacacacttcctgctaatgaaaaaaagccaaattgtgattgccgcctggtacaggagatatgcgcaacaaaagaggtaccagcagacaaagagttccgccttagtaattcagtcttatatccggggttggaaggctcgaaaaattctgcgggaactgaagcatcaaaagcgctgtaaggaagcagtcacgaccattgctgcatattggcatgggacccaggctcgaagggaattgaaacgcttgaaggaggaggctaggcgtaagcatgcagttgctgtcatttgggcttactggcttggactgaaggtacgtagagaatacaggaaattcttcagagccaatgctggaaagaaaatctatgagtttacgcttcagagaattgtgcaaaaatacttcttggaaatgaaaaataagatgccttccttatctccaatagacaagaattggccctcaagaccttacttattcttggattctactcacaaggagctaaaaaggattttccacttgtggaggtgtaaaaaatacagggaccaattcacagaccagcagaaacttatttatgaagagaaactagaagccagtgaactcttcaaagacaagaaggctttatacccatctagtgttgggcaaccattccaaggggcttacctggaaatcaacaagaaccccaagtataagaaactcaaagatgccattgaagaaaagatcatcattgctgaagtcgtgaacaaaattaaccgtgctaatgggaagagtacatctcggattttcctcttaacaaacaataatctccttcttgctgaccaaaagtctggacaaatcaagtcagaggttccattggtggatgtgaccaaggtatcaatgagctcacaaaatgatggcttcttcgccgtccacctcaaagagggctcagaagcagctagtaaaggagactttctcttcagcagtgatcacctgattgaaatggccaccaagctctatcgcacaactctcagccaaaccaaacagaagctcaatattgagatttccgatgagttcctggtacagttcagacaggacaaagtatgtgtgaagtttattcagggaaaccagaaaaatgggagtgtcccaacatgtaaacgaaaaaacaaccgtctccttgaagttgctgtcccttaactggcgcctcctctctactttcatggacttgttcctttgtaatagtgcaatttggttttgttttatttggggttcattgtatgtttgggaatcaccaaaggcttttagagttctttggcaaaataaaaatatttgactaatcaatttttattattggaatagttttaacctttcaaatacatgttctgtcctggagcaggattgtagaaactaacagtgtctattttcatgtctgatgtgttcttcctttagtcatcatgttaggtctgtgtaccctaaatcagcatattactcataaatcattaattaatataagcataggaaatggtcttaaaagatactgcattcattcatcagatatttattccatgcctactctatgctaggcactgtgctagatggtatgaaaacttattaggaacctttttgtttttgagaccattgcattctggctggtttgtgctggtttaacgacatctaagaaggtttagaaatggtgagaccaaaacaataactgttaatgatggacagcattattaggaaccctgtagtatgatatttaacaatataggcttcaagaagggctggtcctaagagggggcagaaatgaatgaccaggttaaatccctctacatgtggtttctgtttgaaaaaaagaaaactgacatttgaacaggacttttaatttgtttaaaactctggtaattacttgtaacagtagaaaatagaagtcattcttattttagaaaaagtgacagaagcagtccagtaagattatatgtttctgtttctggtaaataccatatatgatcctcgaaatgataatatctccagaatattgttttcacccaaatttgagtagatattttaaacacctaacaaagtaaagggctaaaagccattcagatagcagtaaaacattctgtatgatgtgcaataaaacatccaagatcttttttgaaagttttatttataatatacatttttgtatgagaaaggtgattggtacagggtgcctattttagtcatggatcaaaatttgtgtaacttgcagggctttctttctttttcttcaaatttacaagggttcattttggaaactacattttaaactttggaatcaaattgtttcttatttgggaggataatgtatatacattggtattatgttaaataataaaattgttctaatttggtgccatttcctgaatcacaactgtatttttgtatctcaagctattttcatatgttgtgtgtcaatgtatcatctctcagaaaggttttacaatccaaacattatatgttctctgtgtaactgaatttcacttatcttttataaaccagaaacattaattgaaaatattttctggggattttctcttgacttgtatttttaaaaattgctcacataaagaagttctcagaagtc

SEQ ID NO: 300112 - DNA, 2672 bp, Artificial Sequence
  derived and/or modified sequence
aattagaaattcccgtggaagaatactcctttggtagatcaaagatattcatccgaaacccaagaacattattcaaattagaagacctgaggaagcaacgcctggaggacttggccactctcattcagaagatatatcgggggtggaaatgccgcacacacttcctgctaatgaaaaaaagccaaattgtgattgccgcctggtacaggagatatgcgcaacaaaagaggtaccagcagacaaagagttccgccttagtaattcagtcttatatccggggttggaaggctcgaaaaattctgcgggaactgaagcatcaaaagcgctgtaaggaagcagtcacgaccattgctgcatattggcatgggacccaggctcgaagggaattgaaacgcttgaaggaggaggctaggcgtaagcatgcagttgctgtcatttgggcttactggcttggactgaaggtacgtagagaatacaggaaattcttcagagccaatgctggaaagaaaatctatgagtttacgcttcagagaattgtgcaaaaatacttcttggaaatgaaaaataagatgccttccttatctccaatagacaagaattggccctcaagaccttacttattcttggattctactcacaaggagctaaaaaggattttccacttgtggaggtgtaaaaaatacagggaccaattcacagaccagcagaaacttatttatgaagagaaactagaagccagtgaactcttcaaagacaagaaggctttatacccatctagtgttgggcaaccattccaaggggcttacctggaaatcaacaagaaccccaagtataagaaactcaaagatgccattgaagaaaagatcatcattgctgaagtcgtgaacaaaattaaccgtgctaatgggaagagtacatctcggattttcctcttaacaaacaataatctccttcttgctgaccaaaagtctggacaaatcaagtcagaggttccattggtggatgtgaccaaggtatcaatgagctcacaaaatgatggcttcttcgccgtccacctcaaagagggctcagaagcagctagtaaaggagactttctcttcagcagtgatcacctgattgaaatggccaccaagctctatcgcacaactctcagccaaaccaaacagaagctcaatattgagatttccgatgagttcctggtacagttcagacaggacaaagtatgtgtgaagtttattcagggaaaccagaaaaatgggagtgtcccaacatgtaaacgaaaaaacaaccgtctccttgaagttgctgtcccttaactggcgcctcctctctactttcatggacttgttcctttgtaatagtgcaatttggttttgttttatttggggttcattgtatgtttgggaatcaccaaaggcttttagagttctttggcaaaataaaaatatttgactaatcaatttttattattggaatagttttaacctttcaaatacatgttctgtcctggagcaggattgtagaaactaacagtgtctattttcatgtctgatgtgttcttcctttagtcatcatgttaggtctgtgtaccctaaatcagcatattactcataaatcattaattaatataagcataggaaatggtcttaaaagatactgcattcattcatcagatatttattccatgcctactctatgctaggcactgtgctagatggtatgaaaacttattaggaacctttttgtttttgagaccattgcattctggctggtttgtgctggtttaacgacatctaagaaggtttagaaatggtgagaccaaaacaataactgttaatgatggacagcattattaggaaccctgtagtatgatatttaacaatataggcttcaagaagggctggtcctaagagggggcagaaatgaatgaccaggttaaatccctctacatgtggtttctgtttgaaaaaaagaaaactgacatttgaacaggacttttaatttgtttaaaactctggtaattacttgtaacagtagaaaatagaagtcattcttattttagaaaaagtgacagaagcagtccagtaagattatatgtttctgtttctggtaaataccatatatgatcctcgaaatgataatatctccagaatattgttttcacccaaatttgagtagatattttaaacacctaacaaagtaaagggctaaaagccattcagatagcagtaaaacattctgtatgatgtgcaataaaacatccaagatcttttttgaaagttttatttataatatacatttttgtatgagaaaggtgattggtacagggtgcctattttagtcatggatcaaaatttgtgtaacttgcagggctttctttctttttcttcaaatttacaagggttcattttggaaactacattttaaactttggaatcaaattgtttcttatttgggaggataatgtatatacattggtattatgttaaataataaaattgttctaatttggtgccatttcctgaatcacaactgtatttttgtatctcaagctattttcatatgttgtgtgtcaatgtatcatctctcagaaaggttttacaatccaaacattatatgttctctgtgtaactgaatttcacttatcttttataaaccagaaacattaattg

SEQ ID NO: 300113 - DNA, 3324 bp, Artificial Sequence
  derived and/or modified sequence
atggccaagatggaggtgaagaccagcctgctggacaacatgatcggcgtcggcgacatggttctccttgagcctctaaacgaagaaactttcattaataatctgaagaaaaggtttgaccattccgagatttatacatatatcggaagcgtggttatctctgtcaacccatatagatccctgccaatctactcccccgagaaggtcgaggaataccgaaacagaaacttctacgagttgagtccacatatatttgcactgtctgacgaagcatacagaagtttgcgcgaccaagacaaggaccagtgtatcctcattactggtgaatctggagccggaaagaccgaagcaagcaagcttgtcatgtcgtacgtcgccgccgtctgtgggaaaggcgcagaggttaaccaggtaaaggaacagttactgcagagcaacccagtccttgaagcctttgggaatgccaaaacggtgagaaatgacaattcttcgcggtttggcaagtacatggacatcgagttcgactttaaaggtgatcctcttgggggggtgattagtaattacctcctcgagaaaagccgcgttgtgaaacaacctcgaggggagcgcaattttcatgttttttaccagctgctgtcaggtgcaagcgaagagctgcttaacaagctcaaactggagcgggacttcagtcgatacaattacctgagtttggatagtgcaaaggtcaacggtgttgacgatgcagctaactttagaactgtgcgcaacgctatgcagatagtgggctttatggatcacgaggcagagtctgtgctggccgtggttgcagcggtgttgaagttaggcaacatagaatttaaaccggagtctcgggtaaatgggctcgacgagtctaaaattaaagataaaaatgagctgaaagagatttgtgaactgacaggcattgaccaatctgtcttggagcgagcatttagtttcagaaccgtagaagccaagcaggagaaggtctccacaaccctgaatgtcgcccaggcttactatgcccgggatgcgctggcaaagaatctctattctagacttttctcatggttagtcaacaggattaatgaatcaataaaggctcagacaaaagttagaaaaaaggtgatgggtgtactcgatatatacggattcgagatcttcgaagacaattctttcgaacagttcattattaattattgcaatgaaaagctgcagcaaatcttcatcgagcttactctgaaagaggagcaagaggagtacattcgcgaagacatcgagtggacacatatcgactacttcaacaatgccattatttgtgacctgattgaaaacaacaccaatggcatcctcgccatgctggatgaagaatgcctgagaccggggaccgttaccgacgagacattcttggaaaaattaaatcaagtgtgtgcaacacatcaacacttcgaatccagaatgagcaaatgtagccggttcctgaatgacactagccttccacactcatgtttcaggatacagcactacgctggaaaggttctgtatcaggtcgaagggttcgtggacaagaataatgacctcctgtatcgagacttgagccaagcgatgtggaaagcgtctcacgccctgatcaagtcgctcttcccagaggggaacccggctaaaattaacctcaagagaccacccacagccggaagccaattcaaagcctcagttgctaccctcatgaaaaatctgcaaacaaaaaaccctaattatattcgctgtattaaaccaaacgacaagaaggcggcacacatcttcaacgaggccctggtgtgccaccaaatacgctacctcgggctgttagagaatgtcagggtgcgaagggcgggctacgcatttcgacaggcgtacgagccctgcctggaacgttacaaaatgttgtgcaaacagacatggccacattggaagggtcctgctcggtcaggggttgaggtgctctttaacgagctggaaattccagtcgaggagtatagcttcggtcgctcaaaaatcttcattcgcaatccccgcactctgttcaagctcgaagacctgcgaaaacagcgtttggaggaccttgccacccttatccagaaaatttacagaggttggaagtgccggactcattttctgctcatgaaaaagtcgcagattgtcatcgctgcttggtatcggcggtatgctcagcagaaaagataccagcagacgaagagttctgccctggtcattcagagctacatacggggctggaaagctcgtaaaattctcagagaactgaagcaccagaaaaggtgtaaagaagcagtgacaactatagccgcctactggcatggtacgcaggctcgccgtgaactgaaacgccttaaggaggaggctcgcaggaagcacgctgtggctgtcatctgggcttactggcttgggttgaaggtacgccgcgagtatcggaagttcttccgcgctaatgccggcaagaagatctatgagtttacccttcaacgcattgtccagaagtatttccttgaaatgaagaacaagatgccttctctgagtcccattgacaaaaactggccgagtaggccgtacctgttcttggactccacgcataaagaattaaagcggatctttcatctgtggagatgtaagaagtatcgggaccagtttacagaccagcagaagctcatctacgaggagaagttggaagcctctgagctgttcaaggataaaaaggcgctgtaccccagctcagtggggcaaccatttcagggggcctatttagaaataaacaagaatcccaagtataaaaagctgaaggatgcgatagaagagaaaatcatcatcgcggaggtcgtgaataagatcaaccgtgcaaatggaaagtctacgtcccggatatttctgctcactaacaataatcttctcctcgccgaccagaagagcggtcagataaagagcgaagtgccacttgtggacgttactaaagttagcatgtccagtcaaaacgatgggtttttcgccgttcatttgaaggagggatcagaggccgcttccaaaggcgactttttgttcagcagcgaccacctgatagagatggcgactaagctctatcggacaacgctgtcccagactaagcagaaactgaacatcgagatatcagacgagttcctggtccagtttagacaagataaggtctgcgtgaagtttatccagggaaaccagaaaaatggcagcgtgcccacatgcaaacgaaaaaataacagattgctagaggtggccgtgccgtag

SEQ ID NO: 300114 - DNA, 1146 bp, Artificial Sequence
  derived and/or modified sequence
atgaagaagagccagatcgtgatcgccgcctggtaccggcggtacgcccagcagaagagataccagcaaacaaaatcgagtgccttggtgattcagtcctatatcaggggctggaaagcaagaaaaattcttagggaactgaagcatcagaaaagatgcaaagaggcagtaacgaccattgctgcttattggcatggaactcaagccaggagggaactgaagagacttaaagaggaagctcgtcgaaagcacgcggtggccgtgatttgggcatattggctcggactgaaggtgagaagggaataccggaaattttttagagcaaatgctggcaagaagatttacgaattcacgctacagcgtatcgtacagaaatacttcctggagatgaaaaacaagatgccatccctaagtcctatcgataaaaattggccatcaagaccttacctgtttctggatagcacgcacaaagaactgaaaaggatcttccatctttggcgctgtaagaagtacagagatcagttcacggaccagcagaaactaatctacgaagaaaaattggaggccagcgagttgttcaaggataaaaaagctctttatcccagctcagtggggcagcccttccagggtgcgtatctcgagatcaataagaatccgaagtataaaaagttgaaggatgcgatagaagaaaaaataattattgcggaagttgtcaataagattaaccgcgcaaacggcaaatccacctccaggatttttctcctgaccaacaacaacctgctgctggccgaccagaaatctggacaaataaaatcagaggttcccctggtggacgtgaccaaggtgtcaatgagctcccagaatgacggcttttttgccgttcatcttaaggagggatctgaggcagcctcaaagggggactttttattctcctcagaccatctcattgagatggcaacaaagctgtataggacaacactgtcccagaccaagcagaagctcaatattgagataagtgatgaattcctcgtgcagtttaggcaggacaaggtatgcgtgaagtttatacaaggaaatcaaaaaaatggttccgttcccacgtgtaagcggaagaataatagactgctggaagtcgcagtgccgtag

SEQ ID NO: 300115 - DNA, 3324 bp, Artificial Sequence
  derived and/or modified sequence
atggctaaaatggaggttaaaacgtcactgctagataatatgattggcgtcggggacatggtgctcctcgagcctctgaatgaagaaacttttatcaataacttgaagaagcgcttcgaccattccgagatctacacatacataggctcagtcgtaatttccgtgaacccttacaggtcattgccgatatatagccccgaaaaggttgaagagtacaggaaccgtaatttctatgaactctcacctcacatcttcgccctctccgacgaggcgtaccgttcactgcgggatcaggataaagaccagtgtatcctgatcacaggggaatctggagcgggaaaaacagaggctagcaaactcgtcatgagctatgttgccgctgtgtgcggcaagggggctgaggttaatcaggtcaaagaacagctgctacagtcaaatcctgtgcttgaggcctttggtaatgcaaagactgttcgtaacgataactctagtagatttggaaaatatatggatatcgaattcgatttcaaaggggaccccctgggcggtgtcataagtaattatctgctcgagaaatcacgagtcgtgaaacagccacggggtgaaagaaatttccatgttttttaccaactgttgtcaggcgcttccgaggaactactaaacaagctgaaattggagcgggacttttcccggtataattacttgtcactggacagcgccaaggtcaatggcgtcgatgatgccgctaactttcgcaccgtcagaaatgccatgcagatcgtaggctttatggatcatgaagcggaaagcgtgctcgctgttgtggctgccgtgctgaagctaggaaacattgagtttaagcccgaatcaagagtgaacggtctggatgagagcaaaatcaaggataagaacgagctgaaagaaatctgcgagctaacaggaatcgaccagtctgtgctagagagggccttctcattccgcacagtggaggccaagcaggaaaaagtgtccacaaccctgaacgttgcccaggcgtactacgcaagagatgccctggcaaagaacctctactcacgcttgttctcatggcttgtcaaccggatcaacgaaagtatcaaggcccagaccaaagtgaggaagaaagtcatgggtgtgctcgacatctatggcttcgagatcttcgaagataatagttttgagcagtttatcatcaattattgtaacgaaaaactgcaacagattttcatagaactaacattgaaagaagaacaggaggagtatatacgcgaggacatcgagtggactcatatagactacttcaataatgctatcatctgtgacttaatcgaaaacaacaccaatggtattctcgccatgttggacgaggagtgtctgcgacctggcacagttaccgacgagacatttcttgagaaactcaaccaggtgtgcgctacccaccagcacttcgagagcaggatgtctaagtgtagtcggtttctgaacgacacgagccttccccacagttgttttcggattcaacattatgcagggaaagtgctgtatcaggtagagggcttcgtggacaaaaacaatgacctgctctaccgcgacctgtctcaagcaatgtggaaggccagccatgctcttattaagagcctcttccctgagggaaaccccgctaagatcaatctcaaaagaccacctaccgccggatcccagttcaaagccagtgtggcgacactgatgaaaaatctgcaaaccaaaaatcccaactacattaggtgtattaaacctaatgacaaaaaggctgcccatatattcaacgaggctctggtttgtcatcagatccgatacctgggcctgctcgagaacgtgcgggtgagacgcgctgggtatgcgttccggcaggcctacgaaccctgcctggagagatacaagatgctgtgtaagcagacctggccccactggaagggcccagcgaggagcggcgttgaagtgttgtttaacgagttagagatccccgtcgaggagtatagtttcggacggtctaaaatctttattcgcaaccccaggacactgtttaagttagaggacctcaggaagcaacgcctagaagatctggctactcttatacaaaaaatctacagaggctggaaatgcagaacccacttcttgctgatgaaaaagagccagatcgtaattgcggcatggtacagaaggtatgcccagcagaagcgatatcagcaaacgaagtcctcagcgctcgtgattcagagctacatccgaggctggaaggcaaggaaaatcctaagggagttgaaacatcagaagaggtgtaaggaggctgtgactactattgccgcttactggcacggcacgcaagcccgtcgtgagctgaaacgactgaaagaagaggcgagacggaagcacgccgttgctgtcatctgggcctattggctgggcttgaaagtgagaagggaataccgcaagttttttagagctaacgccggaaagaagatctatgagttcaccctgcaacggatcgttcagaaatactttttggagatgaagaacaagatgccttcattgagtccaatcgacaaaaactggcccagtcgcccatacctttttttggacagcacccataaagagctgaagcgcatcttccatctgtggcgctgtaagaaatatcgtgaccagttcacagaccagcagaagctgatatacgaagagaagctcgaggcgtctgaattattcaaggataaaaaagcgttgtacccttcctctgtgggccagccattccaaggagcatatcttgagatcaacaagaatcccaaatacaaaaagctgaaagatgctatcgaagaaaagatcataatagccgaagtagtgaacaagatcaatcgcgcaaacggtaaaagcacatctaggattttcctgctgaccaacaataacctgttgctggccgaccagaaatccggccaaatcaaaagtgaggtaccgctcgttgatgttactaaagtgtcaatgtcttcccagaatgatggcttctttgcggtgcacctgaaagaaggttccgaggccgcttctaaaggtgacttcttgttttcatctgaccacctgattgaaatggccaccaaactgtacaggacgaccctgagtcagacaaagcagaagctcaatatcgagatctctgacgaattcctggtgcagttcagacaagataaagtttgcgtgaaatttatccaaggcaatcaaaagaatggcagtgtgcccacgtgtaagcggaaaaataatcgcctgctggaggtggctgtaccgtag

SEQ ID NO: 300116 - DNA, 1146 bp, Artificial Sequence
  derived and/or modified sequence
atgaagaagtcccagatcgtcatcgccgcatggtacagacgttatgcgcaacagaaacgctatcagcagacaaagagcagtgcactggttattcaaagctacatccggggatggaaggccaggaagattctaagagagctgaaacatcaaaaaaggtgcaaggaagcagtgaccactatcgctgcatactggcatggaacgcaggctcgcagggaactgaagagactgaaggaggaggcgagaaggaaacacgccgtcgccgtaatttgggcatactggctggggctgaaagtccggagagaataccgtaaattctttcgcgctaacgccggtaagaaaatctatgagttcaccctgcaacgcattgtacagaagtacttcctagagatgaagaataagatgcctagtctgtcaccaattgataagaactggcccagccggccatatctgttcttagattcaacacataaagaattaaagcgaatcttccacctgtggcgatgtaagaagtatcgcgaccagtttaccgaccaacagaaattaatctacgaggagaagcttgaggcttctgaactgttcaaggacaagaaggcactttatccttcatctgtcgggcagcctttccaaggagcatacctcgaaatcaacaagaacccgaaatataaaaagctcaaagacgccattgaggaaaaaatcattatcgcagaagtggtcaataagataaatcgtgccaacggcaaaagcacgtcccggattttcctgctgaccaataataacttgctactggccgatcagaaaagcggccagatcaaaagcgaggttccattggttgatgttacaaaggtctctatgagcagccagaacgacggctttttcgccgtccacctcaaggagggttccgaagccgctagtaagggggacttcttgttcagctctgaccacctgattgaaatggcaactaagctgtatcgtacaacactgtctcagaccaagcagaagttgaacatagagatttccgacgagtttctagtgcagttcagacaagacaaggtgtgcgttaagtttatccaggggaatcagaagaacgggagcgtgcctacatgtaaacggaagaacaatagactcctggaggtcgccgttccttag

SEQ ID NO: 300117 - DNA, 3324 bp, Artificial Sequence
  derived and/or modified sequence
atggccaagatggaggtgaagaccagcctgctggacaacatgatcggcgtgggcgacatggtgctgctggagcccctgaacgaggagaccttcatcaacaacctgaagaagagattcgaccacagcgagatctacacctacatcggcagcgtggtgatcagcgtgaacccctacagaagcctgcccatctacagccccgagaaggtggaggagtacagaaacagaaacttctacgagctgagcccccacatcttcgccctgagcgacgaggcctacagaagcctgagagaccaggacaaggaccagtgcatcctgatcaccggcgagagcggcgccggcaagaccgaggccagcaagctggtgatgagctacgtggccgccgtgtgcggcaagggcgccgaggtgaaccaggtgaaggagcagctgctgcagagcaaccccgtgctggaggccttcggcaacgccaagaccgtgagaaacgacaacagcagcagattcggcaagtacatggacatcgagttcgacttcaagggcgaccccctgggcggcgtgatcagcaactacctgctggagaagagcagagtggtgaagcagcccagaggcgagagaaacttccacgtgttctaccagctgctgagcggcgccagcgaggagctgctgaacaagctgaagctggagagagacttcagcagatacaactacctgagcctggacagcgccaaggtgaacggcgtggacgacgccgccaacttcagaaccgtgagaaacgccatgcagatcgtgggcttcatggaccacgaggccgagagcgtgctggccgtggtggccgccgtgctgaagctgggcaacatcgagttcaagcccgagagcagagtgaacggcctggacgagagcaagatcaaggacaagaacgagctgaaggagatctgcgagctgaccggcatcgaccagagcgtgctggagagagccttcagcttcagaaccgtggaggccaagcaggagaaggtgagcaccaccctgaacgtggcccaggcctactacgccagagacgccctggccaagaacctgtacagcagactgttcagctggctggtgaacagaatcaacgagagcatcaaggcccagaccaaggtgagaaagaaggtgatgggcgtgctggacatctacggcttcgagatcttcgaggacaacagcttcgagcagttcatcatcaactactgcaacgagaagctgcagcagatcttcatcgagctgaccctgaaggaggagcaggaggagtacatcagagaggacatcgagtggacccacatcgactacttcaacaacgccatcatctgcgacctgatcgagaacaacaccaacggcatcctggccatgctggacgaggagtgcctgagacccggcaccgtgaccgacgagaccttcctggagaagctgaaccaggtgtgcgccacccaccagcacttcgagagcagaatgagcaagtgcagcagattcctgaacgacaccagcctgccccacagctgcttcagaatccagcactacgccggcaaggtgctgtaccaggtggagggcttcgtggacaagaacaacgacctgctgtacagagacctgagccaggccatgtggaaggccagccacgccctgatcaagagcctgttccccgagggcaaccccgccaagatcaacctgaagagaccccccaccgccggcagccagttcaaggccagcgtggccaccctgatgaagaacctgcagaccaagaaccccaactacatcagatgcatcaagcccaacgacaagaaggccgcccacatcttcaacgaggccctggtgtgccaccagatcagatacctgggcctgctggagaacgtgagagtgagaagagccggctacgccttcagacaggcctacgagccctgcctggagagatacaagatgctgtgcaagcagacctggccccactggaagggccccgccagaagcggcgtggaggtgctgttcaacgagctggagatccccgtggaggagtacagcttcggcagaagcaagatcttcatcagaaaccccagaaccctgttcaagctggaggacctgagaaagcagagactggaggacctggccaccctgatccagaagatctacagaggctggaagtgcagaacccacttcctgctgatgaagaagagccagatcgtgatcgccgcctggtacagaagatacgcccagcagaagagataccagcagaccaagagcagcgccctggtgatccagagctacatcagaggctggaaggccagaaagatcctgagagagctgaagcaccagaagagatgcaaggaggccgtgaccaccatcgccgcctactggcacggcacccaggccagaagagagctgaagagactgaaggaggaggccagaagaaagcacgccgtggccgtgatctgggcctactggctgggcctgaaggtgagaagagagtacagaaagttcttcagagccaacgccggcaagaagatctacgagttcaccctgcagagaatcgtgcagaagtacttcctggagatgaagaacaagatgcccagcctgagccccatcgacaagaactggcccagcagaccctacctgttcctggacagcacccacaaggagctgaagagaatcttccacctgtggagatgcaagaagtacagagaccagttcaccgaccagcagaagctgatctacgaggagaagctggaggccagcgagctgttcaaggacaagaaggccctgtaccccagcagcgtgggccagcccttccagggcgcctacctggagatcaacaagaaccccaagtacaagaagctgaaggacgccatcgaggagaagatcatcatcgccgaggtggtgaacaagatcaacagagccaacggcaagagcaccagcagaatcttcctgctgaccaacaacaacctgctgctggccgaccagaagagcggccagatcaagagcgaggtgcccctggtggacgtgaccaaggtgagcatgagcagccagaacgacggcttcttcgccgtgcacctgaaggagggcagcgaggccgccagcaagggcgacttcctgttcagcagcgaccacctgatcgagatggccaccaagctgtacagaaccaccctgagccagaccaagcagaagctgaacatcgagatcagcgacgagttcctggtgcagttcagacaggacaaggtgtgcgtgaagttcatccagggcaaccagaagaacggcagcgtgcccacctgcaagagaaagaacaacagactgctggaggtggccgtgccctag

SEQ ID NO: 300118 - DNA, 1146 bp, Artificial Sequence
  derived and/or modified sequence
atgaagaagagccagatcgtgatcgccgcctggtacagaagatacgcccagcagaagagataccagcagaccaagagcagcgccctggtgatccagagctacatcagaggctggaaggccagaaagatcctgagagagctgaagcaccagaagagatgcaaggaggccgtgaccaccatcgccgcctactggcacggcacccaggccagaagagagctgaagagactgaaggaggaggccagaagaaagcacgccgtggccgtgatctgggcctactggctgggcctgaaggtgagaagagagtacagaaagttcttcagagccaacgccggcaagaagatctacgagttcaccctgcagagaatcgtgcagaagtacttcctggagatgaagaacaagatgcccagcctgagccccatcgacaagaactggcccagcagaccctacctgttcctggacagcacccacaaggagctgaagagaatcttccacctgtggagatgcaagaagtacagagaccagttcaccgaccagcagaagctgatctacgaggagaagctggaggccagcgagctgttcaaggacaagaaggccctgtaccccagcagcgtgggccagcccttccagggcgcctacctggagatcaacaagaaccccaagtacaagaagctgaaggacgccatcgaggagaagatcatcatcgccgaggtggtgaacaagatcaacagagccaacggcaagagcaccagcagaatcttcctgctgaccaacaacaacctgctgctggccgaccagaagagcggccagatcaagagcgaggtgcccctggtggacgtgaccaaggtgagcatgagcagccagaacgacggcttcttcgccgtgcacctgaaggagggcagcgaggccgccagcaagggcgacttcctgttcagcagcgaccacctgatcgagatggccaccaagctgtacagaaccaccctgagccagaccaagcagaagctgaacatcgagatcagcgacgagttcctggtgcagttcagacaggacaaggtgtgcgtgaagttcatccagggcaaccagaagaacggcagcgtgcccacctgcaagagaaagaacaacagactgctggaggtggccgtgccctag

SEQ ID NO: 300119 - protein, 303 aa, Artificial Sequence
  derived and/or modified sequence
MAKMEVKTSLLDNMIGVGDMVLLEPLNEETFINNLKKRFDHSEIYTYIGSVVISVNPYRSLPIYSPEKVEEYRNRNFYELSPHIFALSDEAYRSLRDQDKDQCILITGESGAGKTEASKLVMSYVAAVCGKGAEVNQVKEQLLQSNPVLEAFGNAKTVRNDNSSRFGKYMDIEFDFKGDPLGGVISNYLLEKSRVVKQPRGERNFHVFYQLLSGASEELLNKLKLERDFSRYNYLSLDSAKVNGVDDAANFRTVRNAMQIVGFMDHEAESVLAVVAAVLKLGNIEFKPESRVNGLDESKIKDK

SEQ ID NO: 300120 - protein, 361 aa, Artificial Sequence
  derived and/or modified sequence
MSKQQPTQFINPETPGYVGFANLPNQVHRKSVKKGFEFTLMVVGESGLGKSTLINSLFLTDLYPERVIPGAAEKIERTVQIEASTVEIEERGVKLRLTVVDTPGYGDAINCRDCFKTIISYIDEQFERYLHDESGLNRRHIIDNRVHCCFYFISPFGHGLKPLDVAFMKAIHNKVNIVPVIAKADTLTLKERERLKKRILDEIEEHNIKIYHLPDAESDEDEDFKEQTRLLKASIPFSVVGSNQLIEAKGKKVRGRLYPWGVVEVENPEHNDFLKLRTMLITHMQDLQEVTQDLHYENFRSERLKRGGRKVENEDMNKDQILLEKEAELRRMQEMIARMQAQMQMQMQGGDGDGGALGHHV

SEQ ID NO: 300121 - DNA, 3613 bp, Artificial Sequence
  derived and/or modified sequence
gatcatcgagacggcggcggtggtgggctagacgagtttcgcgcggccgctcgccgtcccccgcccagtcgtactcggcgccccagctcggtgctgccgccatcttcttggaggacaggaggagaggcgaaggctccccctccccgtgatcgctccgcactcccgccaccacctgccctcccgcgaccgcctctctcctcctcagtgggcacttgtctccttctaacaaacggccttccccccactccagttacccaccgcaaggcgaagattctcattacctgttccactcttataagcataagaaaaccgagctcataagcatacagaaactgctgtaaaagaagaagttgtgggtatttttttttttttttttgtctggaggaatggggacaccaaaactcatttggcagcagaggtgagacgaagcttcacaaaagatgtctaagcaacagccaactcagtttataaatccagaaacacctggctatgttggatttgcaaacctccccaatcaagttcaccgaaaatcagtgaaaaaaggttttgagttcacactgatggtggtcggtgaatcaggtctaggaaaatcgactctcataaacagcctattcctaactgatctgtacccagaaagagtcatacctggagcagcagaaaaaattgaaagaactgtccagattgaggcttcaactgttgaaattgaagagcgaggggtcaagctacgcctgacagtggtagatacccctggctatggtgacgctatcaactgcagagattgttttaagacaattatctcctatattgatgagcaatttgagaggtacctgcatgacgagagcggcttgaacaggcggcacatcattgataatagggtgcattgttgcttttactttatttcaccttttggacatggacttaagcccttagatgtggcgtttatgaaggcaatacacaacaaggtgaatattgtgcctgtcattgcaaaagctgacactctcaccctgaaggaacgggagcggctgaagaaaaggattctggatgaaattgaagaacataacatcaaaatctatcacttacctgatgcagaatcagatgaagatgaagattttaaagagcagactagacttctcaaggctagcatcccattctctgtggttggatccaatcagttgattgaagccaaaggaaagaaggtcagaggccgcctctacccctggggtgttgtggaagtggagaacccagagcacaatgactttctgaagctgagaaccatgctcatcacccacatgcaggatctccaggaggtgacccaggaccttcattatgaaaacttccgttctgagagactcaagagaggcggcaggaaagtggagaatgaggacatgaataaagaccagatcttgctggaaaaagaagctgagctccgccgcatgcaagagatgattgcaaggatgcaggcgcagatgcagatgcagatgcagggcggggatggcgatggcggggctctcgggcaccacgtgtaaggtgatgtgcacatatcaagaagtcagagaaaacactttcctggataaaaaagaaaacattccagatgcatgatccagctgtgtgttttcaatccttgggagggtgccatccacattttaacagtacctgtgcctgagaatttaatttttaaaagactttgatgtgtttttgtatgaagtacttttaacgtatgtatttcattgctgtgtcacactctgtgttttgtgaggtgaatgtcttccttttctttctccctaaccactaatgttagaattgatttccaagaatcggcatgtatacttaatactgaatttctttgatttaactgacttaacaactgactaaccattgatgagcactcctgatttttatctagaacattcagatttaccataatgttccttagtggtagaggtgtgtgcctagtgatgtagaaagatacactgacttggtgcaaggccatctgcttaccacatcacaccacttggagatctttgcttccttgcttttatgtttgtacacaacacctaaaaccagttttgctgctataattctatactgttgattcgtctgcgattttatctgttaaccaaataaaacataatagaatttcctaatgagatatatctttatacttaaacagcttttttagaggtgagttttaaagaagtctcttaattctgatgctaggttgtttttaaaaccactatgcaaagaactcaccacaagccaccttttgtagtgttctccactaatactggttatcctgtgctacagagaaaatcaaagcagtcataagctccagttttcgtattgcaaataagactcttacctacaaaatgagattcagtgaactaatttggtttttactcaaccaaattaaaaatttttttaaggaaaattagcagttggtctattcagaatcaaacctttttatattttatactgcactttagtgtattttctgtcactgtaggtatagaagatctgcctcccctgtggaaattggggtctgttggtgggcgtgcccctgaagcctggcttgggttgaaaagtgttcccgccctaaggccttggtgccctgaacctctgatgcctaccgggttctcctgatttgagtttcctttaaatactccctttttgagtaattttctgatgggaggaaagtagcagtcatcatctttttgtgtgcaggctgtctcatttatttttagccattgtcgtttcattcattttgtgtaatataaaccgtgtgtcatgtcaaagtgaaagacatttcaaatctgtagcataggctagtgggcaggtccgcacagtcgaagccacacctggtctgttttctgtgcactgtagccttagtgtcacctttcttcttgtgtctccttatggtacactccagcggttgccttttttatcatttctactgaagttgggaaattcaaccccagaaattgacagatgaaaggagacaatggttgtgtagggagatggagaaaatgcttaatctgaggatgagacagggttttttcatttttgtgggggctagaaaaaacataaaatgaggcagttaaataataatagttaatgaaggtgtgctacagaaaataatctggtgttcttgctaactttgcccttcactgttgcttaattgtgaacagccaaaagctatatgttatggcttattgtgtgaaggtaactaagaagtggtgttccatgacttcagagtacatccatgcggagtccattatttgagtttgacatttaataactttgctggaaaatctgtaaaaaagaaaaacaagtttgctagtgactaagccccgcatatgtgagtgaaagtacttcaggcacgctgcctcctggtaacagctatgcagggagggaggacccacactgctacacttctgatcccctttggttttactacccaaatctaaatagatacttttgataatagataactgctcttttactaagacatagtctctacctatagaaatgtattttgaaaacacttattttacacagcaattttgtatccatttaaactaaccttttatcaataaagcactattgtttagatatt

SEQ ID NO: 300122 - DNA, 3315 bp, Artificial Sequence
  derived and/or modified sequence
gacgcaatccgcctgcgcgctgggcggggcggggcgggctggggcgggctgtgagcggaccgcgagcgctgggcgggtccgcggcgcggtcggtcggcgcctgttctcgggctgtttggcggacgaagcttcacaaaagatgtctaagcaacagccaactcagtttataaatccagaaacacctggctatgttggatttgcaaacctccccaatcaagttcaccgaaaatcagtgaaaaaaggttttgagttcacactgatggtggtcggtgaatcaggtctaggaaaatcgactctcataaacagcctattcctaactgatctgtacccagaaagagtcatacctggagcagcagaaaaaattgaaagaactgtccagattgaggcttcaactgttgaaattgaagagcgaggggtcaagctacgcctgacagtggtagatacccctggctatggtgacgctatcaactgcagagattgttttaagacaattatctcctatattgatgagcaatttgagaggtacctgcatgacgagagcggcttgaacaggcggcacatcattgataatagggtgcattgttgcttttactttatttcaccttttggacatggacttaagcccttagatgtggcgtttatgaaggcaatacacaacaaggtgaatattgtgcctgtcattgcaaaagctgacactctcaccctgaaggaacgggagcggctgaagaaaaggattctggatgaaattgaagaacataacatcaaaatctatcacttacctgatgcagaatcagatgaagatgaagattttaaagagcagactagacttctcaaggctagcatcccattctctgtggttggatccaatcagttgattgaagccaaaggaaagaaggtcagaggccgcctctacccctggggtgttgtggaagtggagaacccagagcacaatgactttctgaagctgagaaccatgctcatcacccacatgcaggatctccaggaggtgacccaggaccttcattatgaaaacttccgttctgagagactcaagagaggcggcaggaaagtggagaatgaggacatgaataaagaccagatcttgctggaaaaagaagctgagctccgccgcatgcaagagatgattgcaaggatgcaggcgcagatgcagatgcagatgcagggcggggatggcgatggcggggctctcgggcaccacgtgtaaggtgatgtgcacatatcaagaagtcagagaaaacactttcctggataaaaaagaaaacattccagatgcatgatccagctgtgtgttttcaatccttgggagggtgccatccacattttaacagtacctgtgcctgagaatttaatttttaaaagactttgatgtgtttttgtatgaagtacttttaacgtatgtatttcattgctgtgtcacactctgtgttttgtgaggtgaatgtcttccttttctttctccctaaccactaatgttagaattgatttccaagaatcggcatgtatacttaatactgaatttctttgatttaactgacttaacaactgactaaccattgatgagcactcctgatttttatctagaacattcagatttaccataatgttccttagtggtagaggtgtgtgcctagtgatgtagaaagatacactgacttggtgcaaggccatctgcttaccacatcacaccacttggagatctttgcttccttgcttttatgtttgtacacaacacctaaaaccagttttgctgctataattctatactgttgattcgtctgcgattttatctgttaaccaaataaaacataatagaatttcctaatgagatatatctttatacttaaacagcttttttagaggtgagttttaaagaagtctcttaattctgatgctaggttgtttttaaaaccactatgcaaagaactcaccacaagccaccttttgtagtgttctccactaatactggttatcctgtgctacagagaaaatcaaagcagtcataagctccagttttcgtattgcaaataagactcttacctacaaaatgagattcagtgaactaatttggtttttactcaaccaaattaaaaatttttttaaggaaaattagcagttggtctattcagaatcaaacctttttatattttatactgcactttagtgtattttctgtcactgtaggtatagaagatctgcctcccctgtggaaattggggtctgttggtgggcgtgcccctgaagcctggcttgggttgaaaagtgttcccgccctaaggccttggtgccctgaacctctgatgcctaccgggttctcctgatttgagtttcctttaaatactccctttttgagtaattttctgatgggaggaaagtagcagtcatcatctttttgtgtgcaggctgtctcatttatttttagccattgtcgtttcattcattttgtgtaatataaaccgtgtgtcatgtcaaagtgaaagacatttcaaatctgtagcataggctagtgggcaggtccgcacagtcgaagccacacctggtctgttttctgtgcactgtagccttagtgtcacctttcttcttgtgtctccttatggtacactccagcggttgccttttttatcatttctactgaagttgggaaattcaaccccagaaattgacagatgaaaggagacaatggttgtgtagggagatggagaaaatgcttaatctgaggatgagacagggttttttcatttttgtgggggctagaaaaaacataaaatgaggcagttaaataataatagttaatgaaggtgtgctacagaaaataatctggtgttcttgctaactttgcccttcactgttgcttaattgtgaacagccaaaagctatatgttatggcttattgtgtgaaggtaactaagaagtggtgttccatgacttcagagtacatccatgcggagtccattatttgagtttgacatttaataactttgctggaaaatctgtaaaaaagaaaaacaagtttgctagtgactaagccccgcatatgtgagtgaaagtacttcaggcacgctgcctcctggtaacagctatgcagggagggaggacccacactgctacacttctgatcccctttggttttactacccaaatctaaatagatacttttgataatagataactgctcttttactaagacatagtctctacctatagaaatgtattttgaaaacacttattttacacagcaattttgtatccatttaaactaaccttttatcaataaagcactattgtttagatattaaa

SEQ ID NO: 300123 - DNA, 3701 bp, Artificial Sequence
  derived and/or modified sequence
acctcgggccccacaccagaaggagaaagctaggggccgcgccagctccgccctcccccgcggggcggcgggccccagcccgggcacaggaaggccacgtccccggggagggacgcccgactcgatggtctgcgcagggcccgtcggccccacgtgacgtgcgcgcagccaatcccagagaggccccccgatcatcgagacggcggcggtggtgggctagacgagtttcgcgcggccgctcgccgtcccccgcccagtcgtactcggcgccccagctcggtgctgccgccatcttcttggaggacaggaggagaggcgaaggctccccctccccgtgatcgctccgcactcccgccaccacctgccctcccgcgaccgcctctctcctcctcagtgggcacttgtctccttctaacaaacggccttccccccactccagttacccaccgcaaggcgaagattctcattacctgttccactcttataagcataagaaaaccgagctcataagacgaagcttcacaaaagatgtctaagcaacagccaactcagtttataaatccagaaacacctggctatgttggatttgcaaacctccccaatcaagttcaccgaaaatcagtgaaaaaaggttttgagttcacactgatggtggtcggtgaatcaggtctaggaaaatcgactctcataaacagcctattcctaactgatctgtacccagaaagagtcatacctggagcagcagaaaaaattgaaagaactgtccagattgaggcttcaactgttgaaattgaagagcgaggggtcaagctacgcctgacagtggtagatacccctggctatggtgacgctatcaactgcagagattgttttaagacaattatctcctatattgatgagcaatttgagaggtacctgcatgacgagagcggcttgaacaggcggcacatcattgataatagggtgcattgttgcttttactttatttcaccttttggacatggacttaagcccttagatgtggcgtttatgaaggcaatacacaacaaggtgaatattgtgcctgtcattgcaaaagctgacactctcaccctgaaggaacgggagcggctgaagaaaaggattctggatgaaattgaagaacataacatcaaaatctatcacttacctgatgcagaatcagatgaagatgaagattttaaagagcagactagacttctcaaggctagcatcccattctctgtggttggatccaatcagttgattgaagccaaaggaaagaaggtcagaggccgcctctacccctggggtgttgtggaagtggagaacccagagcacaatgactttctgaagctgagaaccatgctcatcacccacatgcaggatctccaggaggtgacccaggaccttcattatgaaaacttccgttctgagagactcaagagaggcggcaggaaagtggagaatgaggacatgaataaagaccagatcttgctggaaaaagaagctgagctccgccgcatgcaagagatgattgcaaggatgcaggcgcagatgcagatgcagatgcagggcggggatggcgatggcggggctctcgggcaccacgtgtaaggtgatgtgcacatatcaagaagtcagagaaaacactttcctggataaaaaagaaaacattccagatgcatgatccagctgtgtgttttcaatccttgggagggtgccatccacattttaacagtacctgtgcctgagaatttaatttttaaaagactttgatgtgtttttgtatgaagtacttttaacgtatgtatttcattgctgtgtcacactctgtgttttgtgaggtgaatgtcttccttttctttctccctaaccactaatgttagaattgatttccaagaatcggcatgtatacttaatactgaatttctttgatttaactgacttaacaactgactaaccattgatgagcactcctgatttttatctagaacattcagatttaccataatgttccttagtggtagaggtgtgtgcctagtgatgtagaaagatacactgacttggtgcaaggccatctgcttaccacatcacaccacttggagatctttgcttccttgcttttatgtttgtacacaacacctaaaaccagttttgctgctataattctatactgttgattcgtctgcgattttatctgttaaccaaataaaacataatagaatttcctaatgagatatatctttatacttaaacagcttttttagaggtgagttttaaagaagtctcttaattctgatgctaggttgtttttaaaaccactatgcaaagaactcaccacaagccaccttttgtagtgttctccactaatactggttatcctgtgctacagagaaaatcaaagcagtcataagctccagttttcgtattgcaaataagactcttacctacaaaatgagattcagtgaactaatttggtttttactcaaccaaattaaaaatttttttaaggaaaattagcagttggtctattcagaatcaaacctttttatattttatactgcactttagtgtattttctgtcactgtaggtatagaagatctgcctcccctgtggaaattggggtctgttggtgggcgtgcccctgaagcctggcttgggttgaaaagtgttcccgccctaaggccttggtgccctgaacctctgatgcctaccgggttctcctgatttgagtttcctttaaatactccctttttgagtaattttctgatgggaggaaagtagcagtcatcatctttttgtgtgcaggctgtctcatttatttttagccattgtcgtttcattcattttgtgtaatataaaccgtgtgtcatgtcaaagtgaaagacatttcaaatctgtagcataggctagtgggcaggtccgcacagtcgaagccacacctggtctgttttctgtgcactgtagccttagtgtcacctttcttcttgtgtctccttatggtacactccagcggttgccttttttatcatttctactgaagttgggaaattcaaccccagaaattgacagatgaaaggagacaatggttgtgtagggagatggagaaaatgcttaatctgaggatgagacagggttttttcatttttgtgggggctagaaaaaacataaaatgaggcagttaaataataatagttaatgaaggtgtgctacagaaaataatctggtgttcttgctaactttgcccttcactgttgcttaattgtgaacagccaaaagctatatgttatggcttattgtgtgaaggtaactaagaagtggtgttccatgacttcagagtacatccatgcggagtccattatttgagtttgacatttaataactttgctggaaaatctgtaaaaaagaaaaacaagtttgctagtgactaagccccgcatatgtgagtgaaagtacttcaggcacgctgcctcctggtaacagctatgcagggagggaggacccacactgctacacttctgatcccctttggttttactacccaaatctaaatagatacttttgataatagataactgctcttttactaagacatagtctctacctatagaaatgtattttgaaaacacttattttacacagcaattttgtatccatttaaactaaccttttatcaataaagcactattgtttagatatt

SEQ ID NO: 300124 - DNA, 3333 bp, Artificial Sequence
  derived and/or modified sequence
gctgggcgggtccgcggcgcggtcggtcggcgcctgttctcgggctgtttggcggaggcttggaatagttaaatgactttggtcttgtccaaggttagatggagttcaactctaacgtcaagtcttggtccttttcattgacgaagcttcacaaaagatgtctaagcaacagccaactcagtttataaatccagaaacacctggctatgttggatttgcaaacctccccaatcaagttcaccgaaaatcagtgaaaaaaggttttgagttcacactgatggtggtcggtgaatcaggtctaggaaaatcgactctcataaacagcctattcctaactgatctgtacccagaaagagtcatacctggagcagcagaaaaaattgaaagaactgtccagattgaggcttcaactgttgaaattgaagagcgaggggtcaagctacgcctgacagtggtagatacccctggctatggtgacgctatcaactgcagagattgttttaagacaattatctcctatattgatgagcaatttgagaggtacctgcatgacgagagcggcttgaacaggcggcacatcattgataatagggtgcattgttgcttttactttatttcaccttttggacatggacttaagcccttagatgtggcgtttatgaaggcaatacacaacaaggtgaatattgtgcctgtcattgcaaaagctgacactctcaccctgaaggaacgggagcggctgaagaaaaggattctggatgaaattgaagaacataacatcaaaatctatcacttacctgatgcagaatcagatgaagatgaagattttaaagagcagactagacttctcaaggctagcatcccattctctgtggttggatccaatcagttgattgaagccaaaggaaagaaggtcagaggccgcctctacccctggggtgttgtggaagtggagaacccagagcacaatgactttctgaagctgagaaccatgctcatcacccacatgcaggatctccaggaggtgacccaggaccttcattatgaaaacttccgttctgagagactcaagagaggcggcaggaaagtggagaatgaggacatgaataaagaccagatcttgctggaaaaagaagctgagctccgccgcatgcaagagatgattgcaaggatgcaggcgcagatgcagatgcagatgcagggcggggatggcgatggcggggctctcgggcaccacgtgtaaggtgatgtgcacatatcaagaagtcagagaaaacactttcctggataaaaaagaaaacattccagatgcatgatccagctgtgtgttttcaatccttgggagggtgccatccacattttaacagtacctgtgcctgagaatttaatttttaaaagactttgatgtgtttttgtatgaagtacttttaacgtatgtatttcattgctgtgtcacactctgtgttttgtgaggtgaatgtcttccttttctttctccctaaccactaatgttagaattgatttccaagaatcggcatgtatacttaatactgaatttctttgatttaactgacttaacaactgactaaccattgatgagcactcctgatttttatctagaacattcagatttaccataatgttccttagtggtagaggtgtgtgcctagtgatgtagaaagatacactgacttggtgcaaggccatctgcttaccacatcacaccacttggagatctttgcttccttgcttttatgtttgtacacaacacctaaaaccagttttgctgctataattctatactgttgattcgtctgcgattttatctgttaaccaaataaaacataatagaatttcctaatgagatatatctttatacttaaacagcttttttagaggtgagttttaaagaagtctcttaattctgatgctaggttgtttttaaaaccactatgcaaagaactcaccacaagccaccttttgtagtgttctccactaatactggttatcctgtgctacagagaaaatcaaagcagtcataagctccagttttcgtattgcaaataagactcttacctacaaaatgagattcagtgaactaatttggtttttactcaaccaaattaaaaatttttttaaggaaaattagcagttggtctattcagaatcaaacctttttatattttatactgcactttagtgtattttctgtcactgtaggtatagaagatctgcctcccctgtggaaattggggtctgttggtgggcgtgcccctgaagcctggcttgggttgaaaagtgttcccgccctaaggccttggtgccctgaacctctgatgcctaccgggttctcctgatttgagtttcctttaaatactccctttttgagtaattttctgatgggaggaaagtagcagtcatcatctttttgtgtgcaggctgtctcatttatttttagccattgtcgtttcattcattttgtgtaatataaaccgtgtgtcatgtcaaagtgaaagacatttcaaatctgtagcataggctagtgggcaggtccgcacagtcgaagccacacctggtctgttttctgtgcactgtagccttagtgtcacctttcttcttgtgtctccttatggtacactccagcggttgccttttttatcatttctactgaagttgggaaattcaaccccagaaattgacagatgaaaggagacaatggttgtgtagggagatggagaaaatgcttaatctgaggatgagacagggttttttcatttttgtgggggctagaaaaaacataaaatgaggcagttaaataataatagttaatgaaggtgtgctacagaaaataatctggtgttcttgctaactttgcccttcactgttgcttaattgtgaacagccaaaagctatatgttatggcttattgtgtgaaggtaactaagaagtggtgttccatgacttcagagtacatccatgcggagtccattatttgagtttgacatttaataactttgctggaaaatctgtaaaaaagaaaaacaagtttgctagtgactaagccccgcatatgtgagtgaaagtacttcaggcacgctgcctcctggtaacagctatgcagggagggaggacccacactgctacacttctgatcccctttggttttactacccaaatctaaatagatacttttgataatagataactgctcttttactaagacatagtctctacctatagaaatgtattttgaaaacacttattttacacagcaattttgtatccatttaaactaaccttttatcaataaagcactattgtttagatattaaa

SEQ ID NO: 300125 - DNA, 575 bp, Artificial Sequence
  derived and/or modified sequence
agtcgtactcggcgccccagctcggtgctgccgccatcttcttggaggacaggaggagaggcgaaggctccccctccccgtgatcgctccgcactcccgccaccacctgccctcccgcgaccgcctctctcctcctcagtgggcacttgtctccttctaacaaacggccttccccccactccagttacccaccgcaaggcgaagattctcattacctgttccactcttataagcataagaaaaccgagctcataagaggcttggaatagttaaatgactttggtcttgtccaaggttagatggagttcaactctaacgtcaagtcttggtccttttcattgacgaagcttcacaaaagatgtctaagcaacagccaactcagtttataaatccagaaacacctggctatgttggatttgcaaacctccccaatcaagttcaccgaaaatcagtgaaaaaaggttttgagttcacactgatggtggtcggtgaatcaggtctaggaaaatcgactctcataaacagcctattcctaactgatctgtacccagaaagagtcatacctggagcagcag

SEQ ID NO: 300126 - DNA, 599 bp, Artificial Sequence
  derived and/or modified sequence
tgcgtatacatacatactatgtatgtgcgtttatgtgtgtctgtgtgttttttttttaacagacgaagcttcacaaaagatgtctaagcaacagccaactcagtttataaatccagaaacacctggctatgttggatttgcaaacctccccaatcaagttcaccgaaaatcagtgaaaaaaggttttgagttcacactgatggtggtcggtgaatcaggtctaggaaaatcgactctcataaacagcctattcctaactgatctgtacccagaaagagtcatacctggagcagcagaaaaaattgaaagaactgtccagattgaggcttcaactgttgaaattgaagagcgaggggtcaagctacgcctgacagtggtagatacccctggctatggtgacgctatcaactgcagagattgttttaagacaattatctcctatattgatgagcaatttgagaggtacctgcatgacgagagcggcttgaacaggcggcacatcattgataatagggtgcattgttgcttttactttatttcaccttttggacatggacttaagcccttagatgtggcgtttatgaaggcaatacacaaca

SEQ ID NO: 300127 - DNA, 777 bp, Artificial Sequence
  derived and/or modified sequence
atgccctgcgtgcaggcacaatatggatcctcccctcagggcgcatctcccgcctctcagtcgtattcctaccacagctccggagaatattctagcgactttcttacccccgagttcgtgaagttttccatggacttgaccaatacggaaattactgccaccacaagcctgccatcattcagcacattcatggacaattattcgaccgggtatgatgtgaagccaccgtgcctgtatcagatgcctttgtctggacagcagtcttcaattaaggtagaagacatccaaatgcataactatcaacagcactcgcatttgccgccccagtctgaggaaatgatgccacactccggctctgtgtattacaagccaagctcccctcctactcccaccacgccaggttttcaggtccagcattccccgatgtgggatgatcctggtagcctccacaacttccatcagaattatgtggctactacccacatgatcgaacagaggaaaacccccgtctctcgcctttcgttgttcagctttaaacagagtccccctggcactcctgtaagtagttgccagatgagatttgacgggccgctgcatgtcccgatgaaccctgagcccgctggatcccaccatgtggtggacggccagaccttcgcagtgccgaaccccatccgcaagccagccagcatggggttccccgggcttcaaataggccatgccagtcagctgctcgatacacaggtgccttctcctccctcaagggggtcaccttcttag

SEQ ID NO: 300128 - DNA, 777 bp, Artificial Sequence
  derived and/or modified sequence
atgccctgtgtgcaggcccagtatggcagcagcccccagggcgccagccctgccagccagagctacagctaccacagcagtggagagtacagcagtgacttcctgaccccagagtttgtgaagttctccatggacctgaccaacacagagatcacagccaccaccagcctgcccagcttcagcaccttcatggacaactacagcacaggctatgatgtgaagccaccctgcctgtaccagatgcccctgagcggccagcagagcagcatcaaggtggaggacatccagatgcacaactaccagcagcacagccacctgcccccccagagcgaggagatgatgccccacagcggctctgtgtactacaagcccagcagcccccccacccccaccaccccaggcttccaggtgcagcacagccccatgtgggatgaccccggcagcctgcacaacttccaccagaactacgtggccaccacccacatgattgagcagaggaagacccctgtgtcccggctgagcctcttctccttcaagcagagccccccaggcacccctgtgagcagctgccagatgagatttgatggccccctgcacgtgcccatgaaccctgagcctgctggcagccaccacgtggtggatggccagacctttgctgtgcccaaccccatcaggaagccagcctccatgggcttccctggcctgcagattggacatgccagccagctgctggacacccaggtgcccagcccccccagccggggcagccccagctag

SEQ ID NO: 300129 - DNA, 777 bp, Artificial Sequence
  derived and/or modified sequence
atgccctgcgtgcaggcccagtacggcagcagcccccagggcgccagcccagcaagccagtcttactcttatcacagctccggggagtacagttccgattttctgactcctgagtttgtaaagttttccatggacctgaccaataccgaaatcactgccactacttcactgccttctttttccacgttcatggacaattactctacagggtatgacgttaagcctccgtgtctatatcagatgccattatccggacagcagagcagcatcaaagtcgaggatatccaaatgcataactatcagcagcacagtcacctcccccctcaaagcgaggagatgatgccacacagtggatctgtttattataagccttcgtcgccgccgactccaaccacgcctgggtttcaagtgcaacactctcctatgtgggatgatccgggctctttacataattttcatcagaactatgtggccacgacacatatgatcgaacaaaggaaaactcctgtgtccaggttgagcctcttcagcttcaagcagagcccccctgggacgccagtatcctcctgccaaatgagattcgatggccctctgcatgtcccgatgaacccggaacctgccgggagtcaccacgtagtcgacggccaaactttcgccgtgcccaacccgatccggaagccagccagtatgggtttccctggcttgcaaatcggtcacgcatcgcaacttctggatacgcaagttccatcccctcctagtaggggcagccctagctag

SEQ ID NO: 300130 - DNA, 2265 bp, Artificial Sequence
  derived and/or modified sequence
ggagattggacaggctggactccccattgcttttctaaaaatcttggaaactttgtccttcattgaattacgacactgtccacctttaatttcctcgaaaacgcctgtaactcggctgaagcttcagtacctttatggacaactacagcacaggctacgacgtcaagccaccttgcttgtaccaaatgcccctgtccggacagcagtcctccattaaggtagaagacattcagatgcacaactaccagcaacacagccacctgcccccccagtctgaggagatgatgccgcactccgggtcggtttactacaagccctcctcgcccccgacgcccaccaccccgggcttccaggtgcagcacagccccatgtgggacgacccgggatctctccacaacttccaccagaactacgtggccactacgcacatgatcgagcagaggaaaacgccagtctcccgcctctccctcttctcctttaagcaatcgccccctggcaccccggtgtctagttgccagatgcgcttcgacgggcccctgcacgtccccatgaacccggagcccgccggcagccaccacgtggtggacgggcagaccttcgctgtgcccaaccccattcgcaagcccgcgtccatgggcttcccgggcctgcagatcggccacgcgtctcagctgctcgacacgcaggtgccctcaccgccgtcgcggggctccccctccaacgaggggctgtgcgctgtgtgtggggacaacgcggcctgccaacactacggcgtgcgcacctgtgagggctgcaaaggcttctttaagcgcacagtgcaaaaaaatgcaaaatacgtgtgtttagcaaataaaaactgcccagtggacaagcgtcgccggaatcgctgtcagtactgccgatttcagaagtgcctggctgttgggatggtcaaagaagtggttcgcacagacagtttaaaaggccggagaggtcgtttgccctcgaaaccgaagagcccacaggagccctctcccccttcgcccccggtgagtctgatcagtgccctcgtcagggcccatgtcgactccaacccggctatgaccagcctggactattccaggttccaggcgaaccctgactatcaaatgagtggagatgacacccagcatatccagcaattctatgatctcctgactggctccatggagatcatccggggctgggcagagaagatccctggcttcgcagacctgcccaaagccgaccaagacctgctttttgaatcagctttcttagaactgtttgtccttcgattagcatacagaatatgaacatcgacatttctgccttctcctgcattgctgccctggctatggtcacagagagacacgggctcaaggaacccaagagagtggaagaactgcaaaacaagattgtaaattgtctcaaagaccacgtgactttcaacaatggggggttgaaccgccccaattatttgtccaaactgttggggaagctcccagaacttcgtaccctttgcacacaggggctacagcgcattttctacctgaaattggaagacttggtgccaccgccagcaataattgacaaacttttcctggacactttacctttctaagacctcctcccaagcacttcaaaggaactggaatgataatggaaactgtcaagagggggcaagtcacatgggcagagatagccgtgtgagcagtctcagctcaagctgccccccatttctgtaaccctcctagcccccttgatccctaaagaaaacaaacaaacaaacaaaaactgttgctatttcctaacctgcaggcagaacctgaaagggcattttggctccggggcatcctggatttagaacatggactacacacaatacagtggtataaactttttattctcagtttaaaaatcagtttgttgttcagaagaaagattgctataatgtataatgggaaatgtttggccatgcttggttgttgcagttcagacaaatgtaacacacacacacatacacacacacacacacacacagagacacatcttaaggggacccacaagtattgccctttaacaagacttcaaagttttctgctgtaaagaaagctgtaatatatagtaaaactaaatgttgcgtgggtggcatgagttgaagaaggcaaaggcttgtaaatttacccaatgcagtttggctttttaaattattttgtgcctatttatgaataaatattacaaattctaaaagataagtgtgtttgc

SEQ ID NO: 300131 - DNA, 2450 bp, Artificial Sequence
  derived and/or modified sequence
aagttgcctgaaatttctggttttgacatatgctgtccttgggtttgcgaatgtatcagagcgagaatatgaatatgtaaagagtacagttatgaaactgtggagctaccagggggttaatatccaacacaggaatatctctaagggctgtggggttcgagtctcctttctgctttttctggggaggagattggacaggctggactccccattgcttttctaaaaatcttggaaactttgtccttcattgaattacgacactgtccacctttaatttcctcgaaaacgcctgtaactcggctgaagcttcagtacctttatggacaactacagcacaggctacgacgtcaagccaccttgcttgtaccaaatgcccctgtccggacagcagtcctccattaaggtagaagacattcagatgcacaactaccagcaacacagccacctgcccccccagtctgaggagatgatgccgcactccgggtcggtttactacaagccctcctcgcccccgacgcccaccaccccgggcttccaggtgcagcacagccccatgtgggacgacccgggatctctccacaacttccaccagaactacgtggccactacgcacatgatcgagcagaggaaaacgccagtctcccgcctctccctcttctcctttaagcaatcgccccctggcaccccggtgtctagttgccagatgcgcttcgacgggcccctgcacgtccccatgaacccggagcccgccggcagccaccacgtggtggacgggcagaccttcgctgtgcccaaccccattcgcaagcccgcgtccatgggcttcccgggcctgcagatcggccacgcgtctcagctgctcgacacgcaggtgccctcaccgccgtcgcggggctccccctccaacgaggggctgtgcgctgtgtgtggggacaacgcggcctgccaacactacggcgtgcgcacctgtgagggctgcaaaggcttctttaagcgcacagtgcaaaaaaatgcaaaatacgtgtgtttagcaaataaaaactgcccagtggacaagcgtcgccggaatcgctgtcagtactgccgatttcagaagtgcctggctgttgggatggtcaaagaagtggttcgcacagacagtttaaaaggccggagaggtcgtttgccctcgaaaccgaagagcccacaggagccctctcccccttcgcccccggtgagtctgatcagtgccctcgtcagggcccatgtcgactccaacccggctatgaccagcctggactattccaggttccaggcgaaccctgactatcaaatgagtggagatgacacccagcatatccagcaattctatgatctcctgactggctccatggagatcatccggggctgggcagagaagatccctggcttcgcagacctgcccaaagccgaccaagacctgctttttgaatcagctttcttagaactgtttgtccttcgattagcatacagaatatgaacatcgacatttctgccttctcctgcattgctgccctggctatggtcacagagagacacgggctcaaggaacccaagagagtggaagaactgcaaaacaagattgtaaattgtctcaaagaccacgtgactttcaacaatggggggttgaaccgccccaattatttgtccaaactgttggggaagctcccagaacttcgtaccctttgcacacaggggctacagcgcattttctacctgaaattggaagacttggtgccaccgccagcaataattgacaaacttttcctggacactttacctttctaagacctcctcccaagcacttcaaaggaactggaatgataatggaaactgtcaagagggggcaagtcacatgggcagagatagccgtgtgagcagtctcagctcaagctgccccccatttctgtaaccctcctagcccccttgatccctaaagaaaacaaacaaacaaacaaaaactgttgctatttcctaacctgcaggcagaacctgaaagggcattttggctccggggcatcctggatttagaacatggactacacacaatacagtggtataaactttttattctcagtttaaaaatcagtttgttgttcagaagaaagattgctataatgtataatgggaaatgtttggccatgcttggttgttgcagttcagacaaatgtaacacacacacacatacacacacacacacacacacagagacacatcttaaggggacccacaagtattgccctttaacaagacttcaaagttttctgctgtaaagaaagctgtaatatatagtaaaactaaatgttgcgtgggtggcatgagttgaagaaggcaaaggcttgtaaatttacccaatgcagtttggctttttaaattattttgtgcctatttatgaataaatattacaaattctaaaagataagtgtgtttgc

SEQ ID NO: 300132 - DNA, 1010 bp, Artificial Sequence
  derived and/or modified sequence
taaacaaaggcacattggcggccagggccagtccgcccggcggctcgcgcacggctccgcggtcccttttgcctgtccagccggccgcctgtccctgctccctccctccgtgaggtgtccgggttcccttcgcccagctctcccacccctacccgaccccggcgcccgggctcccagagggaactgcacttcggcagagttgaatgaatgaagacagacgcggagaactcctaaccatgccttgtgttcaggcgcagtatgggtcctcgcctcaaggagccagccccgcttctcagagctacagttaccactcttcgggagaatacagctccgatttcttaactccagagtttgtcaagtttagcatggacctcaccaacactgaaatcactgccaccacttctctccccagcttcagtacctttatggacaactacagcacaggctacgacgtcaagccaccttgcttgtaccaaatgcccctgtccggacagcagtcctccattaaggtagaagacattcagatgcacaactaccagcaacacagccacctgcccccccagtctgaggagatgatgccgcactccgggtcggtttactacaagccctcctcgcccccgacgcccaccaccccgggcttccaggtgcagcacagccccatgtgggacgacccgggatctctccacaacttccaccagaactacgtggccactacgcacatgatcgagcagaggaaaacgccagtctcccgcctctccctcttctcctttaagcaatcgccccctggcaccccggtgtctagttgccagatgcgcttcgacgggcccctgcacgtccccatgaacccggagcccgccggcagccaccacgtggtggacgggcagaccttcgctgtgcccaaccccattcgcaagcccgcgtccatgggcttcccgggcctgcagatcggccacgcgtctcagctgctcgacacgcaggtgccctcaccgccgtcgcggggctccccctcc

SEQ ID NO: 300133 - DNA, 777 bp, Artificial Sequence
  derived and/or modified sequence
atgccttgcgttcaggcccagtacggatccagtcctcagggggcttctcctgcgagtcagtcctacagctatcattcctccggagagtacagttccgactttctaaccccggagttcgtcaagtttagcatggacttaacgaatacagaaataactgccactacttctctcccttcctttagcacctttatggataattattctaccgggtatgacgttaagccaccttgcctgtatcagatgccattgagcggccagcagtccagtattaaggtggaggatatacagatgcacaactaccagcagcatagccacctcccacctcagtcagaggaaatgatgccacattcgggctctgtttactataagccctcaagcccaccgacaccaacaaccccagggttccaggttcagcactctcctatgtgggacgatcctggcagcctccacaatttccaccagaactacgttgccaccacccacatgatagagcagcgaaagactcccgtgagcagactcagcctgtttagctttaagcagagcccccctgggacacctgtatccagctgccagatgagattcgacgggccactgcatgtgcccatgaatcccgagcccgctggatctcatcatgtggtggatggtcagacattcgccgtaccgaatcccatacggaagcctgcgagtatggggttccctgggctccagatcgggcacgcgtctcagttattagatacacaagtaccaagccccccaagtcgtggaagtcccagttag

SEQ ID NO: 300134 - DNA, 777 bp, Artificial Sequence
  derived and/or modified sequence
atgccctgcgtgcaggcccagtacggcagcagcccccagggcgccagccccgccagccagagctacagctaccacagcagcggcgagtacagcagcgacttcctgacccccgagttcgtgaagttcagcatggacctgaccaacaccgagatcaccgccaccaccagcctgcccagcttcagcaccttcatggacaactacagcaccggctacgacgtgaagcccccctgcctgtaccagatgcccctgagcggccagcagagcagcatcaaggtggaggacatccagatgcacaactaccagcagcacagccacctgcccccccagagcgaggagatgatgccccacagcggcagcgtgtactacaagcccagcagcccccccacccccaccacccccggcttccaggtgcagcacagccccatgtgggacgaccccggcagcctgcacaacttccaccagaactacgtggccaccacccacatgatcgagcagagaaagacccccgtgagcagactgagcctgttcagcttcaagcagagcccccccggcacccccgtgagcagctgccagatgagattcgacggccccctgcacgtgcccatgaaccccgagcccgccggcagccaccacgtggtggacggccagaccttcgccgtgcccaaccccatcagaaagcccgccagcatgggcttccccggcctgcagatcggccacgccagccagctgctggacacccaggtgcccagcccccccagcagaggcagccccagctag

SEQ ID NO: 300135 - protein, 72 aa, Artificial Sequence
  derived and/or modified sequence
MSKPELKEDKMLEVHFVGDDDVLNHILDREGGAKLKKERAQLLVNPKKIIKKPEYDLEEDDQEVLKDQNYVE

SEQ ID NO: 300136 - DNA, 328 bp, Artificial Sequence
  derived and/or modified sequence
gcatgtgcatctgggtttcattatcgccttcgagaatgtagtgttcttcttcctgtgccccaacgaccggctcgtgcccgatgtgccagccctggctaccaagataactgcgcgagcgctacctggccaagcaggcggtggcagacaaccgggagacgctgtttcagtcagcaagttacgcatctgggcagtgtcccaaggccggtccgggagttggatgagaggattggagttccctggagacctccagacctgcactgctacccttccgtgttcttgcctcctggcctctgtgcaatgctgacaataaacctgtctctgcgtccca

SEQ ID NO: 300137 - protein, 883 aa, Artificial Sequence
  derived and/or modified sequence
MRMAATAWAGLQGPPLPTLCPAVRTGLYCRDQAHAERWAMTSETSSGSHCARSRMLRRRAQEEDSTVLIDVSPPEAEKRGSYGSTAHASEPGGQQAAACRAGSPAKPRIDFVLVWEEDLKLDRQQDSAARDRTDMHRTWRETFLDNLRAAGLCVDQQDVQDGNTTVHYALLSASWAVLCYYAEDLRLKLPLQELPNQASNWSAGLLAWLGIPNVLLEVVPDVPPEYYSCRFRVNKLPRFLGSDNQDTFFTSTKRHQILFEILAKTPYGHEKKNLLGIHQLLAEGVLSAAFPLHDGPFKTPPEGPQAPRLNQRQVLFQHWARWGKWNKYQPLDHVRRYFGEKVALYFAWLGFYTGWLLPAAVVGTLVFLVGCFLVFSDIPTQELCGSKDSFEMCPLCLDCPFWLLSSACALAQAGRLFDHGGTVFFSLFMALWAVLLLEYWKRKSATLAYRWDCSDYEDTEERPRPQFAASAPMTAPNPITGEDEPYFPERSRARRMLAGSVVIVVMVAVVVMCLVSIILYRAIMAIVVSRSGNTLLAAWASRIASLTGSVVNLVFILILSKIYVSLAHVLTRWEMHRTQTKFEDAFTLKVFIFQFVNFYSSPVYIAFFKGRFVGYPGNYHTLFGVRNEECAAGGCLIELAQELLVIMVGKQVINNMQEVLIPKLKGWWQKFRLRSKKRKAGASAGASQGPWEDDYELVPCEGLFDEYLEMVLQFGFVTIFVAACPLAPLFALLNNWVEIRLDARKFVCEYRRPVAERAQDIGIWFHILAGLTHLAVISNAFLLAFSSDFLPRAYYRWTRAHDLRGFLNFTLARAPSSFAAAHNRTCRYRAFRDDDGHYSQTYWNLLAIRLAFVIVFEVAEAPAGSPIHGMRPRPCALPNSSTW

SEQ ID NO: 300138 - DNA, 2652 bp, Artificial Sequence
  derived and/or modified sequence
atgagaatggccgccaccgcctgggccggcctgcagggcccccccctgcccaccctgtgccccgccgtgagaaccggcctgtactgcagagaccaggcccacgccgagagatgggccatgaccagcgagaccagcagcggcagccactgcgccagaagcagaatgctgagaagaagagcccaggaggaggacagcaccgtgctgatcgacgtgagcccccccgaggccgagaagagaggcagctacggcagcaccgcccacgccagcgagcccggcggccagcaggccgccgcctgcagagccggcagccccgccaagcccagaatcgacttcgtgctggtgtgggaggaggacctgaagctggacagacagcaggacagcgccgccagagacagaaccgacatgcacagaacctggagagagaccttcctggacaacctgagagccgccggcctgtgcgtggaccagcaggacgtgcaggacggcaacaccaccgtgcactacgccctgctgagcgccagctgggccgtgctgtgctactacgccgaggacctgagactgaagctgcccctgcaggagctgcccaaccaggccagcaactggagcgccggcctgctggcctggctgggcatccccaacgtgctgctggaggtggtgcccgacgtgccccccgagtactacagctgcagattcagagtgaacaagctgcccagattcctgggcagcgacaaccaggacaccttcttcaccagcaccaagagacaccagatcctgttcgagatcctggccaagaccccctacggccacgagaagaagaacctgctgggcatccaccagctgctggccgagggcgtgctgagcgccgccttccccctgcacgacggccccttcaagaccccccccgagggcccccaggcccccagactgaaccagagacaggtgctgttccagcactgggccagatggggcaagtggaacaagtaccagcccctggaccacgtgagaagatacttcggcgagaaggtggccctgtacttcgcctggctgggcttctacaccggctggctgctgcccgccgccgtggtgggcaccctggtgttcctggtgggctgcttcctggtgttcagcgacatccccacccaggagctgtgcggcagcaaggacagcttcgagatgtgccccctgtgcctggactgccccttctggctgctgagcagcgcctgcgccctggcccaggccggcagactgttcgaccacggcggcaccgtgttcttcagcctgttcatggccctgtgggccgtgctgctgctggagtactggaagagaaagagcgccaccctggcctacagatgggactgcagcgactacgaggacaccgaggagagacccagaccccagttcgccgccagcgcccccatgaccgcccccaaccccatcaccggcgaggacgagccctacttccccgagagaagcagagccagaagaatgctggccggcagcgtggtgatcgtggtgatggtggccgtggtggtgatgtgcctggtgagcatcatcctgtacagagccatcatggccatcgtggtgagcagaagcggcaacaccctgctggccgcctgggccagcagaatcgccagcctgaccggcagcgtggtgaacctggtgttcatcctgatcctgagcaagatctacgtgagcctggcccacgtgctgaccagatgggagatgcacagaacccagaccaagttcgaggacgccttcaccctgaaggtgttcatcttccagttcgtgaacttctacagcagccccgtgtacatcgccttcttcaagggcagattcgtgggctaccccggcaactaccacaccctgttcggcgtgagaaacgaggagtgcgccgccggcggctgcctgatcgagctggcccaggagctgctggtgatcatggtgggcaagcaggtgatcaacaacatgcaggaggtgctgatccccaagctgaagggctggtggcagaagttcagactgagaagcaagaagagaaaggccggcgccagcgccggcgccagccagggcccctgggaggacgactacgagctggtgccctgcgagggcctgttcgacgagtacctggagatggtgctgcagttcggcttcgtgaccatcttcgtggccgcctgccccctggcccccctgttcgccctgctgaacaactgggtggagatcagactggacgccagaaagttcgtgtgcgagtacagaagacccgtggccgagagagcccaggacatcggcatctggttccacatcctggccggcctgacccacctggccgtgatcagcaacgccttcctgctggccttcagcagcgacttcctgcccagagcctactacagatggaccagagcccacgacctgagaggcttcctgaacttcaccctggccagagcccccagcagcttcgccgccgcccacaacagaacctgcagatacagagccttcagagacgacgacggccactacagccagacctactggaacctgctggccatcagactggccttcgtgatcgtgttcgaggtggccgaggcccccgccggcagccccatccacggcatgagacccagaccctgcgccctgcccaacagcagcacctggtag

SEQ ID NO: 300139 - DNA, 2652 bp, Artificial Sequence
  derived and/or modified sequence
atgcggatggccgctaccgcatgggcaggtctgcaaggtccccctctgcctacattgtgtcctgccgtccggaccggtctgtattgccgcgatcaagcccacgccgaaagatgggcaatgacctccgagacgtcatctgggtcacattgtgcccggtcccgtatgctccgacgccgggcccaggaggaggactccactgtcctcattgacgtctcccctcccgaagccgaaaaacgtggcagttacgggtccaccgcacacgcgtctgagccgggtggccagcaagctgctgcttgcagggcaggatctccggcgaaaccccggatcgattttgtgctggtgtgggaagaagatctcaaactggatagacagcaggatagtgctgcaagagacaggactgacatgcatcgcacttggcgggaaacattcctcgacaatctccgagcggccggactttgtgtggatcagcaagacgtgcaggacggaaacacaactgtccactatgcgttgctctccgcgtcatgggccgtgctgtgctactacgcagaggatctccggttgaagcttcccctgcaggaacttcctaatcaggctagcaattggagcgccggccttctggcatggctgggcattcctaacgtgctcctggaggtcgtgccagatgttccgcccgagtactattcctgcagattcagggttaataaactgcctaggtttctggggagcgataaccaggacaccttctttactagcaccaagcgacaccaaatcctgtttgagattctcgcaaaaactccgtacggacatgagaagaagaacctgctgggaattcatcagctgctggccgagggggttctaagtgcagcttttcccttgcacgacgggcctttcaaaactcccccggagggtccgcaagcaccccgactgaaccagaggcaggtgctgtttcagcactgggccagatggggcaaatggaataagtatcagccacttgaccatgtccgtcggtattttggtgagaaggtggcactgtacttcgcatggcttgggttttacaccggatggctgctgccagccgccgtggtggggacactggtgttcttggttggctgctttctcgtatttagcgatatccccacacaggaactctgcggatctaaagactcgtttgaaatgtgtcctttgtgcttggactgtcccttctggctgctgtcttctgcctgcgctctggctcaggcaggtcggctcttcgatcacggcggaaccgttttcttttccctgttcatggccttgtgggccgtgttactcctggaatactggaaaaggaagtcggctacattggcatacagatgggattgctctgactatgaagatactgaggaaagacccagaccacaatttgctgcgtcggccccaatgaccgctccaaatcccatcacaggagaagacgaaccgtacttccccgaaagaagcagagcccggagaatgctggccggctctgtcgtgatcgtggttatggttgcagttgtcgtgatgtgccttgtctccataatcctgtaccgtgcaatcatggctatcgtagtgtccaggagtgggaatactttactcgccgcttgggcttccagaatcgcgagcctaactgggagcgtagtaaatcttgtcttcatcctgattttaagcaaaatatatgtgagtctggctcatgttttgaccaggtgggaaatgcacaggacccagaccaagttcgaagacgccttcacgctcaaagtttttatcttccaattcgtcaatttctactctagcccagtgtatatcgctttcttcaagggacgattcgtgggttatccagggaattaccacacgctatttggtgtcaggaacgaggaatgcgccgctgggggttgcctcatagaactcgcccaggagctgctcgttattatggtgggcaaacaagtaataaacaacatgcaggaagtcctcatacccaagctgaagggatggtggcagaaattccggctgcgaagcaagaaacggaaggctggtgccagtgccggagcgagccaaggcccctgggaagacgactacgagctggtcccctgtgagggtctctttgacgaatatttagagatggtgttgcagtttggatttgtgacaatcttcgtagcggcttgtcctcttgctcccctgtttgctcttctcaataactgggtcgagattaggttagatgcaaggaagttcgtctgtgaataccgacggccagtggctgagcgggcacaggacattggtatttggttccacatcctggctggtctaacacacctcgccgtcattagcaacgcctttttgctggccttttcctccgatttcttacctcgcgcctactaccgctggacccgcgcacacgaccttaggggtttccttaattttaccctggcacgcgccccatcttcgtttgcggctgctcacaaccggacctgcagataccgagccttcagagacgacgacggtcactactcccagacatactggaacctcttggcaattcgtctcgcttttgtgattgtctttgaggtagccgaagcgcctgcaggctccccgatccacggtatgagaccccggccatgtgcccttcctaactcttccacgtggtag

SEQ ID NO: 300140 - DNA, 2652 bp, Artificial Sequence
  derived and/or modified sequence
atgaggatggccgccacagcctgggccggcctgcagggcccccccctgcccaccctgtgcccagctgtgaggacaggcctgtactgccgggaccaggcccatgctgagcgctgggccatgaccagcgagaccagcagcggcagccactgtgcccggagcaggatgctgcggcggcgggcccaggaggaggacagcacagtgctgattgatgtgtccccacctgaggccgagaagaggggcagctatggcagcacagcccacgccagcgagcccggcggccagcaggccgccgcctgcagagctggcagccctgccaagcccagaattgactttgtgctggtgtgggaggaggacctgaagctggaccggcagcaggacagcgctgcccgggacagaacagacatgcacaggacctggagggagaccttcctggacaacctgcgggccgccggcctgtgtgtggaccagcaggatgtgcaggacggcaacaccaccgtgcactacgccctgctgagcgcctcctgggccgtgctgtgctactatgcagaggacctgcggctgaagctgcccctgcaggagctgcccaaccaggccagcaactggagcgctggcctgctggcctggctgggcatccccaacgtgctgctggaggtggtgcctgatgtgcccccagagtactacagctgccgcttccgggtgaacaagctgccccgcttcctgggcagtgacaaccaggacaccttcttcaccagcaccaagaggcaccagatcctgtttgagatcctggccaagaccccctacggccacgagaagaagaacctgctgggcatccaccagctgctggccgagggcgtgctgtctgctgccttccccctgcatgatggccccttcaagaccccacctgagggcccccaggccccccggctgaaccagaggcaggtgctcttccagcactgggcccgctggggcaagtggaacaagtaccagcccctggaccacgtgcggcgctactttggagagaaggtggccctgtactttgcctggctgggcttctacacaggctggctgctgcctgctgctgtggtgggcaccctggtgttcctggtgggctgcttcctggtgttcagtgacatccccacccaggagctgtgtggcagcaaggacagctttgagatgtgccccctgtgcctggactgccccttctggctgctgagcagcgcctgtgccctggcccaggccggccgcctgtttgaccatggaggcaccgtcttcttcagcctcttcatggccctgtgggccgtgctgctgctggagtactggaagaggaagagcgccaccctggcctaccgctgggactgcagcgactatgaggacacagaggagcggccccggccccagtttgctgccagcgcccccatgacagcccccaaccccatcaccggggaggatgagccctacttccctgagaggagccgggcccggaggatgctggccggctctgtggtgattgtggtgatggtggccgtggtggtgatgtgcctggtgtccatcatcctgtaccgggccatcatggccatcgtggtgagccgcagcggcaacaccctgctggccgcctgggccagcagaattgccagcctgactggatctgtggtgaacctggtgttcatcctgatcctgagcaagatctacgtgtccctggcccacgtgctgacccgctgggagatgcacaggacccagaccaagtttgaagatgccttcaccctgaaggtgttcatcttccagtttgtgaacttctacagcagccctgtgtacatcgccttcttcaagggccgctttgtgggctacccaggcaactaccacaccctgtttggagtgagaaatgaagaatgtgccgccggcggctgcctgattgagctggcccaggagctgctggtgatcatggtgggcaagcaggtgatcaacaacatgcaggaggtgctgatccccaagctgaagggctggtggcagaagttccggctgcggagcaagaagaggaaggccggggccagcgctggggccagccagggcccctgggaggatgattatgagctggtgccctgtgagggcctgtttgatgagtacctggagatggtgctgcagtttggatttgtgaccatctttgtggccgcctgccccctggcccccctgtttgccctgctgaacaactgggtggagatccggctggatgccaggaagtttgtgtgtgagtacagaagacctgtggccgagcgggcccaggacatcggcatctggttccacatcctggccggcctgacccacctggccgtcatcagcaatgccttcctgctggccttcagcagtgacttcctgccccgggcctactaccgctggacccgggcccatgacctgcggggcttcctgaacttcaccctggcccgggcccccagcagctttgctgctgcccacaacagaacctgccgctaccgggccttcagagatgatgatggccactacagccagacctactggaacctgctggccatccggctggccttcgtcatcgtgtttgaggtggccgaggccccagctggcagccccatccacggcatgaggccccggccctgtgccctgcccaacagcagcacctggtag

SEQ ID NO: 300141 - DNA, 2652 bp, Artificial Sequence
  derived and/or modified sequence
atgcggatggccgccaccgcctgggccggcctgcagggcccccccctccccacactatgtccagctgtcaggaccgggctgtactgccgtgatcaggcccacgctgagcgttgggccatgacttccgaaacctcctctggatcccattgcgcacgcagcaggatgctaagacgaagagctcaggaggaagatagcaccgttctaatcgacgtgtctccgcccgaagctgaaaagagagggtcatacggctcgaccgctcacgccagcgagcccggcggccagcaggccgctgcctgccgggctggcagtccagccaagcctcgaattgatttcgtattggtttgggaggaagacctcaaactggacaggcagcaggattctgctgcccgggacagaacagacatgcaccggacctggcgggaaacattcctagataaccttcgtgctgccgggctttgtgtggaccagcaggatgtccaagacggcaataccaccgtgcactatgcactgttatcagcctcctgggctgtcctgtgttattatgcagaagatctgcgcctcaaactgcctctgcaggagctccccaatcaggctagcaattggtccgccgggctgttagcctggctggggatacctaacgtgctgttggaagtagtcccggacgtccctcctgaatattactcctgtcgttttcgcgtcaacaaacttccaagattcctgggatcggataaccaggataccttcttcacatctaccaaaagacaccagattctgtttgagattttggccaagacaccctatggacatgaaaagaagaatctgctcggaatccatcaattactagccgagggtgtactgagcgctgctttcccactgcacgacggaccattcaaaacaccccctgagggaccacaagcgccccgtttaaaccagcgacaagtgctctttcaacactgggctagatggggcaaatggaacaagtaccaacctctggaccatgtgcggaggtatttcggcgaaaaggttgccttgtactttgcgtggctgggtttttacaccgggtggttgctgccagccgctgtagttggaaccctggtgttcttggtcggttgtttcctagtttttagtgacattcccacgcaggaactttgcgggagcaaggattctttcgaaatgtgccccctgtgcctagattgtccattctggttactatctagtgcgtgcgctctggctcaagcaggccggctctttgaccacggggggacggtttttttctcactcttcatggccctgtgggctgtgctgctcctggagtactggaagcgtaagtccgcgaccctggcctacaggtgggattgcagtgattatgaagacacagaggaacgcccgagaccgcagttcgccgcctccgcgccaatgaccgctcccaaccctattacgggggaagacgaaccttactttcccgaaagaagtagagcacgaagaatgttggcagggtccgttgtcatagtcgtcatggtggctgtcgtcgtaatgtgccttgtgagtattatcttgtacagggcaatcatggctatcgtggtctccaggagcggaaacacactgttagcggcctgggcatcaagaatcgcttccttaactggcagcgttgtcaatctcgtcttcatattaatactatcaaagatatatgtgagtttggcacatgtgctgacaagatgggagatgcatcggacccagacaaagttcgaagatgctttcacactgaaggtattcatattccaattcgtaaacttttacagctcccctgtttacatcgccttcttcaaggggagattcgttggttacccaggcaattatcacacactttttggcgtacggaatgaggagtgcgcagcagggggctgcctgatcgagctcgcccaggaactgctcgtgattatggtgggtaagcaggtgattaacaacatgcaggaggtgctgattcccaaactcaaagggtggtggcaaaagtttcgacttcggtctaaaaagcgtaaggcgggagcatcagcaggggcatctcagggaccctgggaagacgattacgagctggtgccatgtgaggggctctttgacgaatacctggaaatggtgctgcaatttggctttgtgactatcttcgttgccgcctgcccactcgcccctttattcgcattgctcaacaactgggttgagattcggttggatgcgaggaagtttgtgtgtgagtatagacgtccagttgccgagagggcacaggatataggcatatggttccacattcttgcagggttgacacacctggcagtgatcagcaatgctttcctcctggccttctccagcgattttctgccgagggcctattaccgctggaccagggctcacgatctgcgagggttcctgaatttcacgctggctagggcaccttcctcctttgctgctgcccataacagaacgtgcagatacagagctttccgagatgatgacggccactacagccagacgtattggaacttgttggcaataagattagcgttcgttattgtctttgaagtggcagaggcaccagccgggagtcccattcatggcatgcgccctcgaccatgcgctcttccaaacagtagcacctggtag

SEQ ID NO: 300142 - DNA, 2652 bp, Artificial Sequence
  derived and/or modified sequence
atgcgaatggctgccactgcctgggcggggctccaagggccacccctccccaccctctgtcccgcagtgaggacgggactctactgccgagaccaggctcacgctgagaggtgggccatgacctccgagacctcttccggaagccactgtgccaggagcaggatgctgcggcgacgggcccaggaagaggacagcaccgtcctgatcgatgtgagcccccctgaggcagagaagaggggctcttacgggagcacagcccacgcctcggagccaggtggacagcaagcggccgcctgcagagctgggagtcctgccaagccccggatcgacttcgtcctcgtttgggaggaggacctgaagctagacaggcagcaggacagtgccgcccgggacagaacagacatgcacaggacctggcgggagacttttctggataatcttcgtgcggctgggctgtgtgtagaccagcaggacgtccaggacgggaacaccacagtgcactacgccctcctcagcgcctcctgggctgtgctctgctactacgccgaagacctgcgcctgaagctgcccttgcaggagttacccaaccaggcctccaactggtcggccggcctgctggcatggctgggcatccccaacgtcctgctggaggttgtgccagacgtaccccccgagtactactcctgccggttcagagtgaacaagctgccacgcttcctcgggagtgacaaccaggacaccttcttcacaagcaccaagaggcaccaaattctgtttgagatcctggccaagaccccgtatggccacgagaagaaaaacctgcttgggatccaccagctgctggcagagggtgtcctcagtgccgccttccccctgcatgacggccccttcaagacgcccccagagggcccgcaggctccacgcctcaaccagcgccaagtccttttccagcactgggcgcgctggggcaagtggaacaagtaccagcccctggaccacgtgcgcaggtacttcggggagaaggtggccctctacttcgcctggctcgggttttacacaggctggctcctgccagcggcagtggtgggcacactggtgttcctggtgggctgcttcctggtgttctcagacatacccacgcaggaactgtgtggcagcaaggacagcttcgagatgtgcccactttgcctcgactgccctttctggctgctctccagcgcctgtgccctggcccaggccggccggctgttcgaccacggcggcaccgtgttcttcagcttgttcatggcactgtgggccgtgctgctgctggagtactggaagcggaagagcgccacgctggcctaccgctgggactgctctgactacgaggacactgaggagaggcctcggccccagtttgccgcctcagcccccatgacagccccgaaccccatcacgggtgaggacgagccctacttccctgagaggagccgcgcgcgccgcatgctggccggctctgtggtgatcgtggtgatggtggccgtggtggtcatgtgcctcgtgtctatcatcctgtaccgtgccatcatggccatcgtggtgtccaggtcgggcaacacccttctcgcagcctgggcctctcgcatcgccagcctcacggggtctgtagtgaacctcgtcttcatcctcatcctctccaagatctatgtatccctggcccacgtcctgacacgatgggaaatgcaccgcacccagaccaagttcgaggacgccttcaccctcaaggtgttcatcttccagttcgtcaacttctactcctcacccgtctacattgccttcttcaagggcaggtttgtgggatacccaggcaactaccacaccttgtttggagtccgcaatgaggagtgcgcggctggaggctgcctgatcgagctggcacaggagctcctggtcatcatggtgggcaagcaggtcatcaacaacatgcaggaggtcctcatcccgaagctaaagggctggtggcagaagttccggcttcgctccaagaagaggaaggcgggagcttctgcaggggctagccaggggccctgggaggacgactatgagcttgtgccctgtgagggtctgtttgacgagtacctggaaatggtgctgcagttcggcttcgtcaccatcttcgtggccgcctgtccgctcgcgccgctcttcgccctgctcaacaactgggtggagatccgcttggacgcgcgcaagttcgtctgcgagtaccggcgcccggtggccgagcgcgcccaggacatcggcatctggttccacatcctggcgggcctcacgcacctggcggtcatcagcaacgccttcctcctggccttctcgtccgacttcctgccgcgcgcctactaccggtggacccgcgcccacgacctgcgcggcttcctcaacttcacgctggcgcgagccccgtcctccttcgccgccgcgcacaaccgcacgtgcaggtatcgggctttccgggatgacgatggacattattcccagacctactggaatcttcttgccatccgcctggccttcgtcattgtgtttgaggtagccgaggcacctgctggttctcccatccatggcatgaggccccgaccctgtgctttgcctaattcgagcacgtggtga

SEQ ID NO: 300143 - DNA, 2652 bp, Artificial Sequence
  derived and/or modified sequence
atgaggatggctgcaacagcctgggccggtctccaggggccaccactgccaaccctgtgtcctgctgttcggaccggcctgtactgccgcgaccaggcacatgccgaacgctgggctatgacatcggagaccagtagcggaagccactgtgcaagatccaggatgctccgcagaagggcccaggaagaggattcgaccgtgttaatcgatgtttcccctcccgaagctgaaaagcgcggatcctatggctcaacggctcatgcaagtgagcctggtggtcagcaggcagcagcctgtagagctgggtcccctgcaaagccccgaattgacttcgtcctcgtgtgggaggaagacctgaagttggatcgccagcaagatagtgccgcacgcgacaggacagatatgcacaggacctggagagagactttcctggataacttgagggctgcaggtctgtgcgtggaccagcaagatgtgcaggacggcaacacaaccgtccactacgccttgctgtccgcaagttgggccgttctgtgttactacgcagaggacctacggctgaagctcccgcttcaggagttgccaaatcaggcctccaactggagtgcaggactcctggcctggctgggaattccaaacgtactcctggaagttgtaccggacgtacccccagaatattacagctgcagattccgcgttaataagctgccaagatttcttggatccgacaaccaggacaccttcttcacatccactaaacggcatcagattttgtttgaaatactggcaaagacaccctatggtcacgagaaaaagaacctgctcggaatccaccaattattagcagaaggcgtgttgagcgcagcatttccactacacgacggcccatttaaaacccctcccgaggggcctcaagccccaaggttaaatcagaggcaggtattattccagcactgggcccgttgggggaagtggaacaagtaccagccactcgaccacgttcggaggtactttggtgagaaagttgctctctattttgcatggctaggattctacacaggatggctgctacccgctgccgtggtcggcaccctggtctttttggtgggctgctttttagtcttctccgatatccctactcaggagttgtgcggctctaaggacagcttcgagatgtgcccactctgcttggattgcccgttctggctactgtcttctgcctgcgctctggcacaggccggaaggctgttcgatcacgggggtaccgtcttctttagcctctttatggccctgtgggcagtcctactgttagagtactggaagaggaagtccgctactctcgcctatagatgggactgtagcgactacgaggatacggaagaaagacctcgcccacaattcgctgcctccgcccctatgacagctcctaaccccatcacaggagaagacgaaccttacttccctgaaaggtccagagctcgaagaatgctggccggttccgtggtcattgtcgtcatggttgctgtggtcgtgatgtgcctcgtaagtattatactctatcgggcaatcatggcaattgttgtaagtaggagcggcaacactcttctggcagcatgggcttctcgtatcgcttccttgaccggttcagttgtgaatctcgtcttcatactgatcctgtcaaaaatctatgtgtctctcgcccacgtactcacccgctgggagatgcatcgcacccagacgaagttcgaggatgcgttcacactgaaagtgttcattttccaatttgtgaacttctactcctcgcccgtctatatcgccttcttcaaaggacgtttcgttggatatcccggaaactatcacactctgttcggtgtcagaaatgaggaatgtgcagccggaggttgccttatcgaactcgcgcaggagctcctggtaataatggttggaaaacaggtgatcaacaatatgcaggaggttttaataccgaagctcaaggggtggtggcaaaagttccgtctgagatcaaaaaagaggaaagcaggggcatcagccggtgcttcacagggcccatgggaggatgattacgagctggttccatgcgaaggactgttcgacgagtacctcgagatggtcttacaatttggtttcgtaactatttttgtcgctgcgtgccccctggcccctttgtttgcattgctaaataattgggtggaaatcaggttggacgctagaaagtttgtgtgtgaatataggcggccagtggccgagcgtgctcaggacataggcatatggtttcatatactcgctgggcttacacacttggcggtgatcagcaacgcgtttctgcttgccttcagttccgattttctgccaagggcctactataggtggacaagagcacatgacttgcggggtttcctcaatttcactttagccagggccccaagctcctttgccgcagcccacaatcgcacctgtcgctatcgcgctttcagggatgatgacggccactattcccaaacctactggaatctgctcgccatcaggctagctttcgttatcgtattcgaggtagccgaggccccagctgggtcgccaatccacggtatgcgccctcgtccctgcgcattgcccaattcaagtacctggtag

SEQ ID NO: 300144 - DNA, 597 bp, Artificial Sequence
  derived and/or modified sequence
atggagagcagcagatgggacaaggacccccccggcgagagaagaccccagcagagccagcactggagaagctgcggcgtgggcggcgccggcgaggccaccagaggcggcctgttccccgtgcccttccccagcggcgacagctggcccgaggtgacccagcactggatgagattccagggccagggcccctggtgccccggcctgtggaccacccccgcccacagccactgcaagccccagaccggcgccgtggacaacgccagccccagacagccccacgcccccgaccagcacgagaagaacgccggcagacagcacctgcacctgtggagcctggcctgccccccctggctgcacagcatcccccacatcaagggcaccatcctgagcgaggccctgagcggcttcctggtgagcgacagaagaaccaagaccgtggccggcctgagatggctgtggctgagaaaggaggccacccccaccgccagcagaaccaccctgagcagcagcctggcccccagaggcagaggcgtgaacaccctgggcagaggcggctgcaccctgatggtgctgagcagcgacctgtgcgactag

SEQ ID NO: 300145 - DNA, 507 bp, Artificial Sequence
  derived and/or modified sequence
atggccggcagcgtggacaacagacagtgcggcagacagggcagacagtgcggccagcagaccgtgagcaccgccggcagcgtggacggcagacaggccgtgtggatggccggcagcgtggacgcctgccacagcggcgccagaggcggcgccggccccgccgcccacgccagcagaagaggcctgagaggcgccagcgaccccgccgccagagccccccccccccccagagccccccccccccccccccccccccccctgccccccgtgctggcccccctgcccagcacccccagaagccagcacaccaccgccagagacctgagagccggcagcagagccgccgccggctgcgtgcccatgggcagccccgcccccaccccccacctgagacagcagaccgccaccgactgcagatgctggcacgacggcggcggcgccccctggaccagaggccagggccccggcgccctgtgcagcagcgccctggacgccacctggagatag

SEQ ID NO: 300146 - DNA, 507 bp, Artificial Sequence
  derived and/or modified sequence
atggccggcagcgtcgataacaggcagtgcggacgccagggcagacagtgcggacaacagacagtaagtactgcagggtccgtggatggcaggcaagccgtgtggatggctgggagtgtggacgcttgccatagcggcgctcgcggcggagcgggtcccgctgcacacgcaagtaggcgaggcttgcgtggcgctagcgacccagccgcgagggcacctccccccccaagagcccctcccccccctcctccaccaccactgcccccagtgcttgcaccattaccaagcaccccgaggtcacagcataccaccgctcgcgacctaagagccggcagccgcgcagctgctggatgcgtgcctatgggctcccctgcaccaactccccatcttaggcaacagacagcaacggattgccgctgctggcatgatggcggaggggcaccgtggaccagaggccaaggccccggggccctctgttctagtgcgctggacgcaacttggaggtag

SEQ ID NO: 300147 - DNA, 507 bp, Artificial Sequence
  derived and/or modified sequence
atggccggctctgtggacaaccggcagtgtggccggcagggccggcagtgtggccagcagacagtgtccacagctggctctgtggatggccggcaggccgtgtggatggccggctctgtggatgcctgccacagcggggcccggggcggggccggccctgctgcccacgccagcagaagaggcctgcggggggccagtgaccctgctgcccgggcccctcctccaccccgggcccctcctcctcctcctcctccacccctgccccctgtgctggcccccctgcccagcacccccaggagccagcacaccacagcccgggacctgcgggccggcagcagagctgctgctggctgtgtgcccatgggcagccctgcccccaccccccacctgcggcagcagacagccacagactgccgctgctggcatgatggcggcggggccccctggacccggggccagggccctggggccctgtgcagcagcgccctggatgccacctggaggtag

SEQ ID NO: 300148 - DNA, 507 bp, Artificial Sequence
  derived and/or modified sequence
atggccggcagcgtggacaaccggcagtgcggccggcagggccggcagtgtggccaacagacagtttcaaccgctggctccgtggacggccgtcaggcagtgtggatggctggctctgttgatgcctgtcatagtggcgctcgcggtggcgccggacctgcagcgcacgcctcacggagagggctgagaggagcttcagacccagctgcccgggctcctcctcccccaagagcccctccccctcctcccccccccccactgcctccggtgctcgccccattgccatccactccccgttcccagcatactaccgccagagatctacgcgccggctctcgcgctgctgccggatgtgtgcccatggggagccccgccccaaccccacaccttcggcagcagactgctacggactgccgatgctggcatgacggagggggggccccctggaccagaggccagggccccggcgccctgtgctcaagtgcacttgatgcaacctggcggtag

SEQ ID NO: 300149 - DNA, 507 bp, Artificial Sequence
  derived and/or modified sequence
atggccggatctgtggacaataggcagtgtggcaggcagggccgtcagtgtgggcagcagaccgtctctacagctgggtctgttgacggaaggcaggccgtctggatggcaggctctgtcgacgcctgccacagcggagcgaggggtggcgctggccctgcggctcacgcgagccgcaggggcctcagaggcgctagcgaccctgctgcccgtgcccctcctccccctagggcgccacctcctcctccgcctccccctctgccgccagttctggctccactccccagcacgcctcgatcacagcataccacggctcgcgacctgcgagccggtagccgggcagccgctggctgtgttccaatgggaagtcctgcccctacaccccacttgaggcagcaaactgcaactgactgtagatgttggcacgatggtggcggagcgccatggacccgagggcaggggcctggagctctgtgctcatctgccctggatgccacctggagatag

SEQ ID NO: 300150 - DNA, 4257 bp, Artificial Sequence
  derived and/or modified sequence
agaaaaaactcagggcaaggttggccttggctcataagaccttttcaaactttattgagtcaatagttctagagaaagagaacacccatgaacgttccccaagttctcccaagggcgagaaggagaagagcaggctgcgccagggttcctggcgggcgtttctgaaaagcaaagatgccggaagccccaaaaagcccaccctagtgagtctgcctctaggacccgaagttctctccccagcagagaccgacagccactgtgaggaacgggcggaggacaaagagggctatgtttttagcgatcactgggcacccccacttgcctccacacctttgtcctccagtttagtttctccagaacacaggaggaaaagtgaaccgaccatcaagtgcacagccacccaggaaggcgacgctaaaccaagatgagcagaaggaagagagcagggaaggaggccagggtccgcgcggcttgggcacagtgccctggctcagggaccttcctgggagtgagaaccacatgccctgggaagaaccagcaggtgagaagcccagttgctctcacagtcagaaggcgttccacatggagcctgcccagaagccctgcttcaccactgacatggtgacatgggccctcctctgcatctctgcagagactgtgcgtggggaggctccttcacagcctaggggcatccctcaccgctcgcccgtcagtgtggatgacctgtggctggagaagacacagagaaagaagttgcagaagcaggcccacgtcgaaaggaggctgcacataggggcagtgcacaaagatggagtcaagtgctggagaaagacgatcattacctctccagagtctttgaatctccctagaagaagccatccactctcccagagtgctccaacgggactgaaccacatgggctggccagagcacacaccaggcactgccatgcctgatggagctctggacacagctgtctgcgctgacgaagtggggagcgaggaggacctgtatgatgacctgcacagctccagccaccactacagccaccctggagggggtggggagcagctggctatcaatgagctcatcagcgatggcagtgtggtctgcgctgaagcactctgggaccatgtcaccatggacgaccaggagctgggcttcaaagctggggacgtcatcgaagtgatggatgccaccaacagagagtggtggtggggccgggtcgccgatggcgagggctggtttccagccagcttcgttcggctgagggtgaatcaggacgagcccgcggatgacgacgcccctctggccgggaacagcggagcggaggacggcggggcggaggcgcagagcagcaaggaccagatgcggaccaacgtcatcaacgagatcctcagcactgagcgggactacatcaagcacctgcgcgacatctgcgagggctacgtccggcagtgccgcaagcgcgcagacatgttcagcgaggagcagctgcgtaccatcttcgggaacatcgaggacatctaccgctgccagaaggccttcgtgaaggccctggagcagaggttcaaccgcgagcgcccacacctgagcgagctgggtgcctgcttcctggagcatcaagccgacttccagatctactcggagtactgcaataaccaccccaacgcctgcgtggagctctcccggctcaccaagctcagcaagtacgtgtacttcttcgaggcctgccggctgctgcagaagatgattgacatctccctggatggcttcctgctgactccggtgcagaagatctgcaagtaccctctgcagctggccgagctgctcaaatacacgcacccccagcacagggacttcaaggatgttgaagccgccttgcatgccatgaagaacgtggcccagctcatcaacgagcggaagcggagacttgagaacatcgacaagattgctcagtggcagagctccatagaggactgggagggagaagatctcttggtcaggagctcagaactcatctactcgggggagctgactcgagttacacagcctcaagccaaaagccagcagcgaatgttctttctctttgaccaccagctcatctactgtaagaaggacctgctccgccgcgacgtgttgtactacaagggccggctggacatggacggcctggaggtggtggacctggaggacgggaaggacagagacctccatgtgagcatcaagaacgccttccggctgcaccgtggcgccacaggggacagccacctgctgtgcaccaggaagcccgagcagaagcagcgctggctcaaggcctttgccagggagagggagcaggtgcagctggaccaggagacaggcttctccatcactgaactgcagaggaagcaggccatgctgaatgccagcaagcagcaggtcacagggaagcccaaaggtaggcggacagcagccccacctcctcggctgcccggtccttaccctgctgacatcattcccttctctgaaccacaaagccaagccagctagccaccaggcctgaggggggcccactgccctttgcagctgtttgttcccaaaggttggtaataaggggccactggggaagcctgggtcagtatatggttgacattcttactctcaacaccttggctcccccagatcagggccattggtgacaatgcttgtttccccagggttccttcctgacaggcatctggggttggtgtagggatggagctgctttccccatttctacagagagccatgcccctgaaacatcacatgcctttgcacaggccacccccctcttcaggctgctgcaggaggccaggcccaggccagagaccccaggcagcctgagctcttggatgtggtcagctctccaggagcaagtcctgtgtggcaaaactgcctcctacggcggctctgaagcagagccctgggacggaccccatgctgtccccaacagctggggtggcactctgccctgggcacccatgaccctctgctgtctctccctgttcagctgttggccggccctgctacctgacgcgccagaagcacccagccctgcccagcaaccggccccagcagcaggtcctggtgctggcggagcccaggcgcaagccatctaccttctggcacagcatcagccggctggcacccttccgcaagtgaactggtccctgcctgacagcacctgctgggccttcctgccagtggcccccagtttttcttccccgaggcccactcggcctggccttcctctgcctgcaagtgagcagggatgggctggggagttgcttgtgccaccaagacgtgccaggtctgtactcctgttgtctttttccctgctcctggtgccctgaagagaccagcaagggggcagaccccgcactcgccacaccgccgctgcagcttgggccccatccgccctctggacctgtgtagggcctcactgctggagcggggaaaccgcagctcagcccaggcccagctggggagaaggcgctacctgcgtgggaccctcttctctggaaacctaatcctcctttcatttcctctgggcaggactctctggccttctgtggcctgcaatgccaggccatgtgcccctctgccctctagttctccaagtccccagcccggccagtggtgccaggcagcttgccacttgggagggcagaagccaggaattccacacccttgtgttgcgcccggagcccgcccttcgcctcccagcccctcaagacaccgctggctgctggacaccctcttcacttgtgtgtgtgtgtgtagcggaaaaggacaagacggtgcagtcggctgcatactcccagtcgggagtgtggtcagtctgcctgctgctgtgcggtagctccagaaccacctcgttcctggttttgtttggattttggcatcttgtttttctaacaacaaacaatggagaaaaagaattgattcttagtgacacagaagattgccttacgctcgtgagcgtgagaagccataagagagagaccgaattctgtggctcagcacacaggactgacccacagcccaggcagcgggtgtgtggagatggcgccctgtcctgccaaggggcgccaggagcagagccagggcctggcgagctggcgtggagcccacaggattcagcagcatggacagtcactcttgcactattccttctccaagccagaaaccacatttaatttcataaataaatttatgaaaagtaacctggctgct

SEQ ID NO: 300151 - DNA, 3800 bp, Artificial Sequence
  derived and/or modified sequence
gggaaggaggccagggtccgcgcggcttgggcacagtgccctggctcagggaccttcctgggagtgagaaccacatgccctgggaagaaccagcaggtgagaagcccagttgctctcacagtcagaaggcgttccacatggagcctgcccagaagccctgcttcaccactgacatggtgacatgggccctcctctgcatctctgcagagactgtgcgtggggaggctccttcacagcctaggggcatccctcaccgctcgcccgtcagtgtggatgacctgtggctggagaagacacagagaaagaagttgcagaagcaggcccacgtcgaaaggaggctgcacataggggcagtgcacaaagatggagtcaagtgctggagaaagacgatcattacctctccagagtctttgaatctccctagaagaagccatccactctcccagagtgctccaacgggactgaaccacatgggctggccagagcacacaccaggcactgccatgcctgatggagctctggacacagctgtctgcgctgacgaagtggggagcgaggaggacctgtatgatgacctgcacagctccagccaccactacagccaccctggagggggtggggagcagctggctatcaatgagctcatcagcgatggcagtgtggtctgcgctgaagcactctgggaccatgtcaccatggacgaccaggagctgggcttcaaagctggggacgtcatcgaagtgatggatgccaccaacagagagtggtggtggggccgggtcgccgatggcgagggctggtttccagccagcttcgttcggctgagggtgaatcaggacgagcccgcggatgacgacgcccctctggccgggaacagcggagcggaggacggcggggcggaggcgcagagcagcaaggaccagatgcggaccaacgtcatcaacgagatcctcagcactgagcgggactacatcaagcacctgcgcgacatctgcgagggctacgtccggcagtgccgcaagcgcgcagacatgttcagcgaggagcagctgcgtaccatcttcgggaacatcgaggacatctaccgctgccagaaggccttcgtgaaggccctggagcagaggttcaaccgcgagcgcccacacctgagcgagctgggtgcctgcttcctggagcatcaagccgacttccagatctactcggagtactgcaataaccaccccaacgcctgcgtggagctctcccggctcaccaagctcagcaagtacgtgtacttcttcgaggcctgccggctgctgcagaagatgattgacatctccctggatggcttcctgctgactccggtgcagaagatctgcaagtaccctctgcagctggccgagctgctcaaatacacgcacccccagcacagggacttcaaggatgttgaagccgccttgcatgccatgaagaacgtggcccagctcatcaacgagcggaagcggagacttgagaacatcgacaagattgctcagtggcagagctccatagaggactgggagggagaagatctcttggtcaggagctcagaactcatctactcgggggagctgactcgagttacacagcctcaagccaaaagccagcagcgaatgttctttctctttgaccaccagctcatctactgtaagaaggacctgctccgccgcgacgtgttgtactacaagggccggctggacatggacggcctggaggtggtggacctggaggacgggaaggacagagacctccatgtgagcatcaagaacgccttccggctgcaccgtggcgccacaggggacagccacctgctgtgcaccaggaagcccgagcagaagcagcgctggctcaaggcctttgccagggagagggagcaggtgcagctggaccaggagacaggcttctccatcactgaactgcagaggaagcaggccatgctgaatgccagcaagcagcaggtcacagggaagcccaaaggtaggcggacagcagccccacctcctcggctgcccggtccttaccctgctgacatcattcccttctctgaaccacaaagccaagccagctagccaccaggcctgaggggggcccactgccctttgcagctgtttgttcccaaaggttggtaataaggggccactggggaagcctgggtcagtatatggttgacattcttactctcaacaccttggctcccccagatcagggccattggtgacaatgcttgtttccccagggttccttcctgacaggcatctggggttggtgtagggatggagctgctttccccatttctacagagagccatgcccctgaaacatcacatgcctttgcacaggccacccccctcttcaggctgctgcaggaggccaggcccaggccagagaccccaggcagcctgagctcttggatgtggtcagctctccaggagcaagtcctgtgtggcaaaactgcctcctacggcggctctgaagcagagccctgggacggaccccatgctgtccccaacagctggggtggcactctgccctgggcacccatgaccctctgctgtctctccctgttcagctgttggccggccctgctacctgacgcgccagaagcacccagccctgcccagcaaccggccccagcagcaggtcctggtgctggcggagcccaggcgcaagccatctaccttctggcacagcatcagccggctggcacccttccgcaagtgaactggtccctgcctgacagcacctgctgggccttcctgccagtggcccccagtttttcttccccgaggcccactcggcctggccttcctctgcctgcaagtgagcagggatgggctggggagttgcttgtgccaccaagacgtgccaggtctgtactcctgttgtctttttccctgctcctggtgccctgaagagaccagcaagggggcagaccccgcactcgccacaccgccgctgcagcttgggccccatccgccctctggacctgtgtagggcctcactgctggagcggggaaaccgcagctcagcccaggcccagctggggagaaggcgctacctgcgtgggaccctcttctctggaaacctaatcctcctttcatttcctctgggcaggactctctggccttctgtggcctgcaatgccaggccatgtgcccctctgccctctagttctccaagtccccagcccggccagtggtgccaggcagcttgccacttgggagggcagaagccaggaattccacacccttgtgttgcgcccggagcccgcccttcgcctcccagcccctcaagacaccgctggctgctggacaccctcttcacttgtgtgtgtgtgtgtagcggaaaaggacaagacggtgcagtcggctgcatactcccagtcgggagtgtggtcagtctgcctgctgctgtgcggtagctccagaaccacctcgttcctggttttgtttggattttggcatcttgtttttctaacaacaaacaatggagaaaaagaattgattcttagtgacacagaagattgccttacgctcgtgagcgtgagaagccataagagagagaccgaattctgtggctcagcacacaggactgacccacagcccaggcagcgggtgtgtggagatggcgccctgtcctgccaaggggcgccaggagcagagccagggcctggcgagctggcgtggagcccacaggattcagcagcatggacagtcactcttgcactattccttctccaagccagaaaccacatttaatttcataaataaatttatgaaaagt

SEQ ID NO: 300152 - DNA, 3656 bp, Artificial Sequence
  derived and/or modified sequence
agaaaaaactcagggcaaggttggccttggctcataagaccttttcaaactttattgagtcaatagttctagagaaagagaacacccatgaacgttccccaagttctcccaagggcgagaaggagaagagcaggctgcgccagggttcctggcgggcgtttctgaaaagcaaagatgccggaagccccaaaaagcccaccctagtgagtctgcctctaggacccgaagttctctccccagcagagaccgacagccactgtgaggaacgggcggaggacaaagagggctatgtttttagcgatcactgggcacccccacttgcctccacacctttgtcctccagtttagtttctccagaacacaggaggaaaagtgaaccgaccatcaagtgcacagccacccaggaaggcgacgctaaaccaagatgagcagaaggaagagagcagggaaggaggccagggtccgcgcggcttgggcacagtgccctggctcagggaccttcctgggagtgagaaccacatgccctgggaagaaccagcaggtgagaagcccagttgctctcacagtcagaaggcgttccacatggagcctgcccagaagccctgcttcaccactgacatggtgacatgggccctcctctgcatctctgcagagactgtgcgtggggaggctccttcacagcctaggggcatccctcaccgctcgcccgtcagtgtggatgacctgtggctggagaagacacagagaaagaagttgcagaagcaggcccacgtcgaaaggaggctgcacataggggcagtgcacaaagatggagtcaagtgctggagaaagacgatcattacctctccagagtctttgaatctccctagaagaagccatccactctcccagagtgctccaacgggactgaaccacatgggctggccagagcacacaccaggcactgccatgcctgatggagctctggacacagctgtctgcgctgacgaagtggggagcgaggaggacctgtatgatgacctgcacagctccagccaccactacagccaccctggagggggtggggagcagctggctatcaatgagctcatcagcgatggcagtgtggtctgcgctgaagcactctgggaccatgtcaccatggacgaccaggagctgggcttcaaagctggggacgtcatcgaagtgatggatgccaccaacagagagtggtggtggggccgggtcgccgatggcgagggctggtttccagccagcttcgttcggctgagggtgaatcaggacgagcccgcggatgacgacgcccctctggccgggaacagcggagcggaggacggcggggcggaggcgcagagcagcaaggaccagatgcggaccaacgtcatcaacgagatcctcagcactgagcgggactacatcaagcacctgcgcgacatctgcgagggctacgtccggcagtgccgcaagcgcgcagacatgttcagcgaggagcagctgcgtaccatcttcgggaacatcgaggacatctaccgctgccagaaggccttcgtgaaggccctggagcagaggttcaaccgcgagcgcccacacctgagcgagctgggtgcctgcttcctggagcatcaagccgacttccagatctactcggagtactgcaataaccaccccaacgcctgcgtggagctctcccggctcaccaagctcagcaagtacgtgtacttcttcgaggcctgccggctgctgcagaagatgattgacatctccctggatggcttcctgctgactccggtgcagaagatctgcaagtaccctctgcagctggccgagctgctcaaatacacgcacccccagcacagggacttcaaggatgttgaagccgccttgcatgccatgaagaacgtggcccagctcatcaacgagcggaagcggagacttgagaacatcgacaagattgctcagtggcagagctccatagaggactgggagggagaagatctcttggtcaggagctcagaactcatctactcgggggagctgactcgagttacacagcctcaagccaaaagccagcagcgaatgttctttctctttgaccaccagctcatctactgtaagaaggacctgctccgccgcgacgtgttgtactacaagggccggctggacatggacggcctggaggtggtggacctggaggacgggaaggacagagacctccatgtgagcatcaagaacgccttccggctgcaccgtggcgccacaggggacagccacctgctgtgcaccaggaagcccgagcagaagcagcgctggctcaaggcctttgccagggagagggagcaggtgcagctggaccaggagacaggcttctccatcactgaactgcagaggaagcaggccatgctgaatgccagcaagcagcaggtcacagggaagcccaaagctgttggccggccctgctacctgacgcgccagaagcacccagccctgcccagcaaccggccccagcagcaggtcctggtgctggcggagcccaggcgcaagccatctaccttctggcacagcatcagccggctggcacccttccgcaagtgaactggtccctgcctgacagcacctgctgggccttcctgccagtggcccccagtttttcttccccgaggcccactcggcctggccttcctctgcctgcaagtgagcagggatgggctggggagttgcttgtgccaccaagacgtgccaggtctgtactcctgttgtctttttccctgctcctggtgccctgaagagaccagcaagggggcagaccccgcactcgccacaccgccgctgcagcttgggccccatccgccctctggacctgtgtagggcctcactgctggagcggggaaaccgcagctcagcccaggcccagctggggagaaggcgctacctgcgtgggaccctcttctctggaaacctaatcctcctttcatttcctctgggcaggactctctggccttctgtggcctgcaatgccaggccatgtgcccctctgccctctagttctccaagtccccagcccggccagtggtgccaggcagcttgccacttgggagggcagaagccaggaattccacacccttgtgttgcgcccggagcccgcccttcgcctcccagcccctcaagacaccgctggctgctggacaccctcttcacttgtgtgtgtgtgtgtagcggaaaaggacaagacggtgcagtcggctgcatactcccagtcgggagtgtggtcagtctgcctgctgctgtgcggtagctccagaaccacctcgttcctggttttgtttggattttggcatcttgtttttctaacaacaaacaatggagaaaaagaattgattcttagtgacacagaagattgccttacgctcgtgagcgtgagaagccataagagagagaccgaattctgtggctcagcacacaggactgacccacagcccaggcagcgggtgtgtggagatggcgccctgtcctgccaaggggcgccaggagcagagccagggcctggcgagctggcgtggagcccacaggattcagcagcatggacagtcactcttgcactattccttctccaagccagaaaccacatttaatttcataaataaatttatgaaaagtaa

SEQ ID NO: 300153 - DNA, 1638 bp, Artificial Sequence
  derived and/or modified sequence
ccacttgcctccacacctttgtcctccagtttagtttctccagaacacaggaggaaaagtgaaccgaccatcaagtgcacagccacccaggaaggcggtaggtacctaccttcaggtatctttccggaaaagtcctggctggcgtcccccggcagccctcgggcccagcaggctggaatcgcacacaccctgccttccagctctgcctgctgcctggcatatgaaaaccccgggacgccctgcagacccacgagccccaagcccctgagtcccaggcctagtgctcagcggatgggtctccactaccccgggaggggtagcgccatctccatggtttctcttggaagctacagctacgtggacagcagttcaggggaccctgaaagacccaagattcccaagggccagaccagtttcctgctttctctgcagacgctaaaccaagatgagcagaaggaagagagcagggaaggaggccagggtccgcgcggcttgggcacagtgccctggctcagggaccttcctgggagtgagaaccacatgccctgggaagaaccagcaggtgagaagcccagttgctctcacagtcagaaggcgttccacatggagcctgcccagaagccctgcttcaccactgacatggtgacatgggccctcctctgcatctctgcagagactgtgcgtggggaggctccttcacagcctaggggcatccctcaccgctcgcccgtcagtgtggatgacctgtggctggagaagacacagagaaagaagttgcagaagcaggcccacgtcgaaaggaggctgcacataggggcagtgcacaaagatggagtcaagtgctggagaaagacgatcattacctctccagagtctttgaatctccctagaagaagccatccactctcccagagtgctccaacgggactgaaccacatgggctggccagagcacacaccaggcactgctgttggccggccctgctacctgacgcgccagaagcacccagccctgcccagcaaccggccccagcagcaggtcctggtgctggcggagcccaggcgcaagccatctaccttctggcacagcatcagccggctggcacccttccgcaagtgaactggtccctgcctgacagcacctgctgggccttcctgccagtggcccccagtttttcttccccgaggcccactcggcctggccttcctctgcctgcaagtgagcagggatgggctggggagttgcttgtgccaccaagacgtgccaggtctgtactcctgttgtctttttccctgctcctggtgccctgaagagaccagcaagggggcagaccccgcactcgccacaccgccgctgcagcttgggccccatccgccctctggacctgtgtagggcctcactgctggagcggggaaaccgcagctcagcccaggcccagctggggagaaggcgctacctgcgtgggaccctcttctctggaaacctaatcctcctttcatttcctctgggcaggactctctggccttctgtggcctgcaatgccaggccatgtgcccctctgccctctagttctccaagtccccagcccggccagtggtgccaggcagcttgccacttgggagggcagaagccaggaat

SEQ ID NO: 300154 - protein, 127 aa, Artificial Sequence
  derived and/or modified sequence
MLVSGRRRLLTVLLQAQKWPFQPSRDMRLVQFRAPHLVGPHLGLETGNGGGVINLNAFDPTLPKTMTQFLEQGEATLSVARRALAAQLPVLPRSEVTFLAPVTRPDKVVCVGMNYVDHCKEQNVPVP

SEQ ID NO: 300155 - protein, 81 aa, Artificial Sequence
  derived and/or modified sequence
MLVSGRRRLLTVLLQAQKWPFQPSRDMRLVQFRAPHLVGPHLGLETGNGGGVINLNAFDPTLPKTMTQFLEQGEATLSVAR

SEQ ID NO: 300156 - DNA, 384 bp, Artificial Sequence
  derived and/or modified sequence
atgctggtgagcggcagaagaagactgctgaccgtgctgctgcaggcccagaagtggcccttccagcccagcagagacatgagactggtgcagttcagagccccccacctggtgggcccccacctgggcctggagaccggcaacggcggcggcgtgatcaacctgaacgccttcgaccccaccctgcccaagaccatgacccagttcctggagcagggcgaggccaccctgagcgtggccagaagagccctggccgcccagctgcccgtgctgcccagaagcgaggtgaccttcctggcccccgtgaccagacccgacaaggtggtgtgcgtgggcatgaactacgtggaccactgcaaggagcagaacgtgcccgtgccctag

SEQ ID NO: 300157 - DNA, 246 bp, Artificial Sequence
  derived and/or modified sequence
atgctggtgagcggcagaagaagactgctgaccgtgctgctgcaggcccagaagtggcccttccagcccagcagagacatgagactggtgcagttcagagccccccacctggtgggcccccacctgggcctggagaccggcaacggcggcggcgtgatcaacctgaacgccttcgaccccaccctgcccaagaccatgacccagttcctggagcagggcgaggccaccctgagcgtggccagatag

SEQ ID NO: 300158 - DNA, 384 bp, Artificial Sequence
  derived and/or modified sequence
atgctggtgtccggccgacgcaggttgctgaccgttctcctgcaggcccagaagtggccttttcaaccatcccgagacatgcggctggtgcaattccgggctcctcacctcgtaggcccgcacctggggctcgagactgggaacggaggcggggtgattaacttgaatgcttttgatccaacgctgcccaaaactatgactcagttcctcgagcagggcgaggcaacactctctgtggccagaagagctctggctgcccaactgccagtgctaccccgttcggaggtcactttcttggcccccgtcacacgaccggacaaggtcgtatgcgtgggaatgaactacgtggatcactgtaaagagcagaacgtgcccgtgccatag

SEQ ID NO: 300159 - DNA, 246 bp, Artificial Sequence
  derived and/or modified sequence
atgctggtgagtggtcggaggaggttgcttacagtgctcctacaggctcagaaatggcctttccagccttcaagagacatgaggcttgtgcagtttcgggcaccccacctggttgggccccacctcggcctcgaaacagggaacgggggaggcgtgataaacctcaatgcattcgatcccacactaccaaagacaatgactcagtttcttgagcagggcgaggcgaccctgagcgtggccaggtag

SEQ ID NO: 300160 - DNA, 384 bp, Artificial Sequence
  derived and/or modified sequence
atgctggtgtctggaagaagaaggctgctgactgtgctgctgcaggcccagaagtggcccttccagcccagccgggacatgaggctggtgcagttccgggccccccacctggtgggcccccacctgggcctggagactggaaatggaggaggagtcatcaacctgaatgcctttgaccccaccctgcccaagaccatgacccagttcctggagcagggcgaggccaccctgtctgtggcccggcgggccctggccgcccagctgcctgtgctgcccaggtctgaggtgaccttcctggcccctgtgaccaggccagacaaggtggtgtgtgtgggcatgaactacgtggaccactgcaaggagcagaatgtgcctgtgccctag

SEQ ID NO: 300161 - DNA, 246 bp, Artificial Sequence
  derived and/or modified sequence
atgctggtgtctggaagaagaaggctgctgactgtgctgctgcaggcccagaagtggcccttccagcccagccgggacatgaggctggtgcagttccgggccccccacctggtgggcccccacctgggcctggagactggaaatggaggaggagtcatcaacctgaatgcctttgaccccaccctgcccaagaccatgacccagttcctggagcagggcgaggccaccctgtctgtggccaggtag

SEQ ID NO: 300162 - DNA, 715 bp, Artificial Sequence
  derived and/or modified sequence
gtgctcaggcgcccgccgcccttgaccttcggccccgcgagctctaaccctacagcgcaggaagatcggccgccgcggccaggtaggacgagcctggctgggtctaggccagaagggtgtccgtggcgccggtctcccgcggagcgcagaactagtaccggatccccagccgcttctgaccacacagacggggcggacctgtcagagccaagcacagtgggaactttcagaaagcactggttgaaggaacgctggaatccctgggacttactgcgtagcatgtagtagttgctcctctagaaaagtttcaccttatgaagtatagcaggctctgatgctggtgtctggtagaagaaggttactcacagttctgctgcaggctcagaagtggccctttcaaccctccagagacatgagactagtgcagttccgggcaccccacctggtggggcctcacttgggcctggagacagggaatggtggaggggttatcaacctcaatgcctttgaccccacactcccgaagacgatgacgcagttcctagagcagggagaggccaccctctcagtggcaagaagagccctggctgcccagttgccagtcctaccacggtcggaggtaaccttcctggctccagtcacacgaccagataaggtggtgtgtgtgggcatgaattatgtggaccactgcaaagaacagaacgtgcccgtgccc

SEQ ID NO: 300163 - DNA, 522 bp, Artificial Sequence
  derived and/or modified sequence
gtgatccggccgagtggccctgggttagcagctgctgcatttccccggctggctgcggtcactggtggcagtgctcaggcgcccgccgcccttgaccttcggccccgcgagctctaaccctacagcgcaggaagatcggccgccgcggccaggtaggacgagcctggctgggtctaggccagaagggtgtccgtggcgccggtctcccgcggagcgcagaactagtaccggatccccagccgcttctgaccacacagacggggcggacctgtgctctgatgctggtgtctggtagaagaaggttactcacagttctgctgcaggctcagaagtggccctttcaaccctccagagacatgagactagtgcagttccgggcaccccacctggtggggcctcacttgggcctggagacagggaatggtggaggggttatcaacctcaatgcctttgaccccacactcccgaagacgatgacgcagttcctagagcagggagaggccaccctctcagtggcaagaa

SEQ ID NO: 300164 - DNA, 384 bp, Artificial Sequence
  derived and/or modified sequence
atgctggtgagcggccggcggcggctgctgaccgtgctgctgcaggcccagaagtggccttttcagccaagtagggacatgcggctagtgcaattccgcgcgccgcatcttgtggggcctcacttaggccttgagaccggcaacggaggaggagtcattaatttgaatgctttcgaccctacactgcctaagaccatgactcagtttcttgagcagggcgaagcaactttatctgttgccagacgcgcgctggcggcacaactgccagtgctccccagaagtgaggtgacatttctggcacctgtcacgcggccggataaggtggtatgtgtcggaatgaactatgtcgaccattgcaaggaacaaaatgtaccagtcccttag

SEQ ID NO: 300165 - DNA, 246 bp, Artificial Sequence
  derived and/or modified sequence
atgctggtgagcggccggcggcggctgctgaccgtgctgctgcaggcgcagaagtggccatttcagccgtctcgggatatgcgcctcgtgcagttcagagctcctcatttagtggggccgcaccttgggctggagacaggaaatggcgggggggtaattaatcttaatgcatttgacccgacattgcctaagactatgacccaatttcttgagcaaggagaggccacgttaagcgtggcccgatag

SEQ ID NO: 300166 - DNA, 384 bp, Artificial Sequence
  derived and/or modified sequence
atgttggtttcgggccgtcgcagactgttgactgtcctgctgcaggctcaaaagtggccctttcaacctagccgggacatgagactggtgcagttcagggcacctcacttggtgggaccccatctcgggttggaaaccggaaatggcggaggcgtgataaatttgaatgcatttgatccgacactgcctaagacaatgacgcagtttcttgagcagggggaagccacactttcagtggcacgacgcgcactggcagcccaactgccagtgctcccacgtagcgaagtgacttttttagcccctgtgactaggccagataaggtggtctgcgtggggatgaactacgtggaccactgcaaagagcaaaatgtgcccgtgccttag

SEQ ID NO: 300167 - DNA, 246 bp, Artificial Sequence
  derived and/or modified sequence
atgcttgtgtccggcagacgtaggctgctgacagtgttactccaggcgcagaagtggccgttccagcctagtcgagacatgagacttgtgcagttcagagctcctcacctggttggaccccacctgggtctcgagaccggcaacgggggaggggtcattaatttgaacgcattcgaccccacccttcccaagacgatgacccaattcttggagcagggagaggctacccttagcgttgccagatag

SEQ ID NO: 300168 - protein, 225 aa, Artificial Sequence
  derived and/or modified sequence
MAEGETESPGPKKCGPYISSVTSQSVNLMIRGVVLFFIGVFLALVLNLLQIQRNVTLFPPDVIASIFSSAWWVPPCCGTASAVIGLLYPCIDRHLGEPHKFKREWSSVMRCVAVFVGINHASAKVDFDNNIQLSLTLAALSIGLWWTFDRSRSGFGLGVGIAFLATVVTQLLVYNGVYQYTSPDFLYVRSWLPCIFFAGGITMGNIGRQLAMYECKVIAEKSHQE

SEQ ID NO: 300169 - DNA, 678 bp, Artificial Sequence
  derived and/or modified sequence
atggcggaaggtgagaccgagtcccccggcccaaagaagtgtgggccctatataagcagtgtcaccagccagagcgttaacttgatgattagaggtgttgtccttttttttataggagtattcttggccctggtgcttaatctactgcaaattcaaaggaatgtgacccttttcccacctgatgttattgcctcaatattttcgtcagcatggtgggttcccccttgttgcggcactgcgtccgccgtgattgggctgctttacccttgtattgatcgtcacctgggggaaccccacaaatttaagcgggagtggagtagtgtgatgcggtgcgtcgcagtattcgttggcattaaccatgctagcgcaaaagtggacttcgataacaacatacagctgtcgctgactttagctgctcttagcattggcctctggtggactttcgatcggtcaagatccgggtttggcctgggagtgggtattgctttcttggctaccgtggtaacacaactcctcgtgtacaacggggtgtatcagtatacatcacctgattttttgtacgtgcgttcatggctcccttgtatatttttcgcaggtgggatcactatgggtaacatcggccggcaacttgccatgtatgagtgtaaagtaatcgcagaaaagagtcaccaagagtag

SEQ ID NO: 300170 - DNA, 2590 bp, Artificial Sequence
  derived and/or modified sequence
gtgggagtggaggaggaagaggcggtagggggtacgggggctggtcccagaagatggcggaggcgggggatttctggtaggtcctactttaggacaagatgtggtaccgttgaagcgtcagtctttgattcacagacagttgagcttttcagctgggaagcctttccatttttttttttttaacggctttctgaacctatgaaaccatggcagaaggagagacagagtcacctgggcccaaaaagtgtggcccatatatttcatctgtcactagccagagtgtgaacttgatgattcgaggagtagtgctattttttattggagtatttcttgcattagtgttaaatttacttcagattcagagaaatgtgacgctctttccacctgatgtgattgcaagcatcttttcttctgcatggtgggtacccccatgctgtggcacggcttcagctgtgattgggttattatacccctgcattgacagacatctaggagaaccacataaatttaaaagagagtggtccagtgtaatgcggtgtgtagcagtctttgttggtataaatcatgccagtgctaaagtggatttcgataacaacatacagttgtctctcacactggctgcactatccattggactgtggtggacttttgatagatctagaagtggttttggccttggagtaggaattgccttcttggcaactgtggtcactcaactgctagtatataatggtgtttaccaatatacatctccagatttcctctatgttcgttcttggttaccatgtatattttttgctggaggcataacaatgggaaacattggtcgacaactggcaatgtacgaatgtaaagttatcgcagaaaaatctcatcaggaatgaagaaggcaaaaaatatcttttgtacagaaaagcaagatgaaaaggatgtgaaatggtagatataccaacaaaacttcagactgtaaaattgccaggatgcagttttccccttgattggcgtgtgtgtatatatggataaatatatatatacacacacacatattactgcaatctgtgattgcttcatctgtaaatcagttgtaaacctttacatatttgacttaaataactgtaagatatatatgtactacattaaaaagtgttgattaatagatgaaatttttaaattaattttttaaaacatgccatacattgtatcacaatgttaatgtgccaagatattgttcctgtcatgcagagtataagaatgctttgaacaatttgtagacttagtgaaataaaataagaggaaagccaaaaacaaacaaacaaaaagcatatggggagctggtattttctctttagcttactgttgtgcctttttatttttctaatcacagcagtatgagttatgagtgccctaatttgtggttagtttctaatttaatgttgtttcatagagtttggagtgttttgatacagggtgaaaatgaacttctggtttcaaacctgcgttactggagacagcccaaagagtaattttctgttttgacaggttttactggaagtatatgtgatgagcagaagaggttatcagcattaaattgttttggttctaaatttggaacagtatatataattaaaagtaaggaacattagaggatttaattagaataaatacatgttttggaaatacagtgacctcttgcagtgtcacaaaagtgcaaagtgatattagctgtcatctgcaatacagaatctcattgcttttgcacatggagcatataggaaactccaaacagatcacaatgaggtttctaaatctgttgggttctgtcttctattgggttctgtgaagcaaaccactgtagctttagctgggttcagtcatatgactcgttggtggaatgcctaggtttttcatcttacatgcagtcttgggggtggatgaatacataatttctcatgtattcgtgtatccattagtgaatagttcaagtctgtttaagagtgtattgagatggcattctctgcatgttaaagatcttaatggcaaccagcacctcttaagtatggtttaaacatattcttagctaattttttccattagtttttgaaattggtggcagttgtctgatccacaagggcaagatcttctgagtactctggggtgtgagtatgtgtgcacacgtgtgtgttggagtgagtgagagaatgtgtctgtgcatgtggccatgctttcctagaatgtcaagtagatatttttacactttgagttttaaagcaattactatcagactgagatcttgtatgccaaactttaatctgcttttatgttttcaggctgaaggtgtgaaaatcctaagaggatttcatattgaatatgtgtacacaatcttaactatcgtggtggaaaacatactactataatttattattatatcttccagataatgttattcatttagaacaaataaggtatattttttagaatcaactttgtaagcactataaaatctttaataagttataaggtctatgatgtgtttactttaaaaattgctgttaaaagcaacacgtattaaatatgtaattatcatctgggt

SEQ ID NO: 300171 - DNA, 678 bp, Artificial Sequence
  derived and/or modified sequence
atggccgagggggagacagagagccctggccccaagaagtgtggcccctacatcagctctgtgaccagccagagcgtgaacctgatgatccggggcgtggtgctcttcttcatcggggtcttcctggccctggtgctgaacctgctgcagatccagagaaatgtgaccctcttccccccagatgtgattgccagcatcttcagcagcgcctggtgggtgcccccctgctgcggcacagccagcgctgtgattggcctgctgtacccctgcatcgacagacacctgggggagccccacaagttcaagcgggagtggagctctgtgatgagatgtgtggccgtgtttgtgggcatcaaccacgccagcgccaaggtggactttgacaacaacatccagctgagcctgaccctggccgccctgagcatcggcctgtggtggacctttgacaggagccgcagcggcttcggcctgggcgtgggcatcgccttcctggccaccgtggtgacccagctgctggtgtacaatggagtgtaccagtacaccagcccagacttcctgtatgtgcgctcctggctgccctgcatcttctttgctgggggcatcaccatgggcaacatcggccggcagctggccatgtatgagtgcaaggtgattgctgagaagagccaccaggagtag

SEQ ID NO: 300172 - DNA, 678 bp, Artificial Sequence
  derived and/or modified sequence
atggccgagggcgagaccgagagccccggccccaagaagtgcggcccctatatctcctccgtcacttcccagagcgtgaatctcatgatccggggagtagttctgttcttcataggggtgtttctcgccctcgtgctgaatcttttgcagattcagcgaaacgtgactctgttccctccagacgtgatagcctcaattttctcttccgcttggtgggtgccaccatgctgcggtaccgcgtcagccgtcatcggactgctgtacccatgcattgaccgacatcttggcgaacctcacaagtttaaacgagaatggtcctctgtgatgagatgcgttgcggtgttcgtcgggatcaaccatgcctctgcaaaggtggatttcgataacaatattcagctctcactgacattggcggccctgtctatcggactttggtggactttcgatcggtcccgcagcggtttcggtctgggagtgggtatagcattccttgccacggtggttacccagcttctcgtgtacaatggtgtttaccagtatacgtcccctgacttcctctatgtgcgaagttggctgccctgtattttttttgcggggggtatcaccatgggtaatatcggacgccagctggcaatgtatgaatgcaaagttatcgccgagaagagtcatcaagaatag

SEQ ID NO: 300173 - DNA, 678 bp, Artificial Sequence
  derived and/or modified sequence
atggctgagggagaaactgagagtccaggacccaagaaatgtggcccatacatcagcagtgtgacaagccagtctgtgaacttgatgattcgcggagtagtcctcttcttcataggggtcttcttggcactcgtacttaacttgttgcaaattcaacgcaatgtgactctcttccccccagacgtgattgccagtatcttttcctctgcatggtgggtgcctccttgttgcgggacagctagcgccgtgattggtctactttatccatgtatagaccgtcacttgggcgagccccataaattcaagagggagtggagctcagtcatgaggtgtgttgctgtgtttgtgggcataaaccacgccagcgccaaagtggactttgacaataacattcagctgtccctgacactggccgcactgagcatcggtttgtggtggacctttgatagatcgcggagcggctttggcttgggcgtcggtattgcttttctggctacggtggtgacccagttgctggtatataatggggtatatcagtatacatctccagattttttgtatgtgcggagttggctgccatgcatttttttcgcgggaggaattacgatgggcaacataggacgccagctggctatgtatgagtgcaaagtaattgctgaaaagtctcatcaggagtag

SEQ ID NO: 300174 - DNA, 678 bp, Artificial Sequence
  derived and/or modified sequence
atggccgagggcgagaccgagagccccggccccaagaagtgcggcccctacatcagcagcgtgaccagccagagcgtgaacctgatgatcagaggcgtggtgctgttcttcatcggcgtgttcctggccctggtgctgaacctgctgcagatccagagaaacgtgaccctgttcccccccgacgtgatcgccagcatcttcagcagcgcctggtgggtgcccccctgctgcggcaccgccagcgccgtgatcggcctgctgtacccctgcatcgacagacacctgggcgagccccacaagttcaagagagagtggagcagcgtgatgagatgcgtggccgtgttcgtgggcatcaaccacgccagcgccaaggtggacttcgacaacaacatccagctgagcctgaccctggccgccctgagcatcggcctgtggtggaccttcgacagaagcagaagcggcttcggcctgggcgtgggcatcgccttcctggccaccgtggtgacccagctgctggtgtacaacggcgtgtaccagtacaccagccccgacttcctgtacgtgagaagctggctgccctgcatcttcttcgccggcggcatcaccatgggcaacatcggcagacagctggccatgtacgagtgcaaggtgatcgccgagaagagccaccaggagtag

SEQ ID NO: 300175 - protein, 647 aa, Artificial Sequence
  derived and/or modified sequence
MAGPQETVLALPLREGVQAAATVPILLYNLEDGLSDHPLDQGPRCPARRPCSPASAPAPTSPKKPKIQAPGETFPTDWSPPPVEFLNPRVLQASREAPAQRWVGVVGPQGLRRLAGELPEELEQEHLDLDPKRGLALPEKLFWNTSGLSQQAAAPEFSWGGSGSYFNNLDYLLQEKREQALEQERERLLLQECLNLNSLDLDEEEVPLTPEHRMLVEKYSVSLQTIPPVHPGETVFLPRCHPLPCILDSSLLKPRSHLEGLFLSSPPAQQLSFLRSGLLNILYLHMPDCPVSLLQWLFQLLTWPPETSLGAFGLLWDLIVDGIFLQPDEDKHLWCPSLQEVREAFHSLGAHSPALYPLGPFWHGGRVLPGEAGLNENEEQDAPQEIALDISLGHIYKFLALCAQAQPGAYTDENLMGLIELLCRTSLDVGLRLLPKVDLQQLLLLLLENIREWPGKLQELCCTLSWVSDHHHNLLALVQFFPDMTSRSRRLRSQLSLVVIARMLGQQEMLPLWQEKTQLSSLSRLLGLMRPSSLRQYLDSVPLPPCQEQQPKASAELDHKACYLCHSLLMLAGVVVSCQDITPDQWGELQLLCMQLDRHISTQIRESPQAMHRTMLKDLATQTYIRWQELLTHCQPQAQYFSPWKDI

SEQ ID NO: 300176 - protein, 119 aa, Artificial Sequence
  derived and/or modified sequence
MRPSSLRQYLDSVPLPPCQEQQPKASAELDHKACYLCHSLLMLAGVVVSCQDITPDQWGELQLLCMQLDRHISTQIRESPQAMHRTMLKDLATQTYIRWQELLTHCQPQAQYFSPWKDI

SEQ ID NO: 300177 - protein, 941 aa, Artificial Sequence
  derived and/or modified sequence
MYQGEFGLNMKLGYGKFSWPTGESYHGQFYRDHCHGLGTYMWPDGSSFTGTFYLSHREGYGTMYMKTRLFQGLYKADQRFGPGVETYPDGSQDVGLWFREQLIKLCTQIPSGFSLLRYPEFSSFITHSPARISLSEEEKTEWGLQEGQDPFFYDYKRFLLNDNLTLPPEMYVYSTNSDHLPMTSSFRKELDARIFLNEIPPFVEDGEPWFIINETPLLVKIQKQTYKFRNKPAHTSWNMGAILEGKRSGFAPCGPKEQLSMEMILKAEEGNHEWICRILKDNFASADVADAKGYTVLAAAATHCHNDIVNLLLDCGADVNKCSDEGLTALSMCFLLHYPAQSFKPNVAERTIPEPQEPPKFPVVPILSSSFMDTNLESLYYEVNVPSQGSYELRPPPAPLLLPRVSGSHEGGHFQDTGQCGGSIDHRSSSLKGDSPLVKGSLGHVESGLEDVLGNTDRGSLCSAETKFESNVCVCDFSIELSQAMLERSAQSHSLLKMASPSPCTSSFDKGTMRRMALSMIERRKRWRTIKLLLRRGADPNLCCVPMQVLFLAVKAGDVDGVRLLLEHGARTDICFPPQLSTLTPLHIAAALPGEEGVQIVELLLHAITDVDAKASDEDDTYKPGKLDLLPSSLKLSNEPGPPQAYYSTDTALPEEGGRTALHMACEREDDNKCARDIVRLLLSHGANPNLLWSGHSPLSLSIASGNELVVKELLTQGADPNLPLTKGLGSALCVACDLTYEHQRNMDSKLALIDRLISHGADILKPVMLRQGEKEAVGTAVDYGYFRFFQDRRIARCPFHTLMPAERETFLARKRLLEYMGLQLRQAVFAKESQWDPTWLYLCKRAELIPSHRMKKKGPSLPRGLDVKEQGQIPFFKFCYQCGRSIGVRLLPCPRCYGILTCSKYCKTKAWTEFHKKDCGDLVAIVTQLEQVSRRREEFQ

SEQ ID NO: 300178 - DNA, 3380 bp, Artificial Sequence
  derived and/or modified sequence
gggacgggagcgcgggcgtccgcggtggctgcagtcccgtcggtctccctgctgtccggcgcgagctcttcgagtcttgcttggttggaagaccacagacatggaaggggcccatgcctcccttagcttagaggacgaagtctctggggctggcagccgccaacgcccgctagaggggaagggcggcgagacccctgctgccgaggagccggggtccctgaagaactacgctgtcttcgccacaagggatgtttcagcagcccctgagaaggaagaggaggaagctgagggcccgctgagggcgcaggacctgagggagtcctacatccagctcgtccagggtgtgcaggagtggcaggatggttgcatgtaccagggggagtttgggttgaacatgaagcttggatatggcaaattctcttggcccacaggcgagtcataccatgggcagttttaccgggaccactgccatggcctgggtacctacatgtggccagatggctccagtttcacgggcacattttacctcagccaccgagaaggctacggcaccatgtacatgaagacacggcttttccaggggctatacaaagcggaccagcggtttgggccaggtgtcgagacctaccccgatggcagccaggacgtggggctgtggttccgagagcagctcatcaagctgtgcacccagatccccagtggcttctccctcctcagataccctgagttctccagcttcatcacccacagccctgccaggatcagcctctcagaagaggagaaaacggagtggggactgcaggagggacaggatccctttttctatgactataagcggtttcttctgaatgacaacctaacgctgcctccagaaatgtatgtctactcgaccaacagtgaccacctgcccatgacaagctctttccgcaaagagctggacgcccgcatcttcctcaatgaaattcctccgttcgttgaggatggagaaccatggttcataatcaatgagacccctttgttggtcaaaatccagaagcaaacttacaagttcaggaacaagccagctcacaccagctggaacatgggcgccatcctggaggggaagcgcagtggctttgcaccctgtgggcccaaagagcaactttccatggagatgatcctaaaggctgaggaagggaaccacgaatggatttgtaggatcctgaaggacaactttgctagtgctgacgtggcggacgcaaagggctacactgtgcttgctgcggctgctactcactgccacaacgacattgtcaaccttctcctggactgtggggccgacgtgaacaagtgctcagatgagggtctcacggcactcagcatgtgtttcctcctccactaccccgcccagtccttcaagcccaatgttgctgaacggaccatacctgagccccaggaacctccaaaattcccagttgttccaatcctttcatcatcatttatggacacaaacctggagtctctgtactatgaggtgaacgtgccttcccagggtagctatgagctgaggccaccgccagcaccactgctcctgccacgcgtctcaggcagccacgagggcggccacttccaggacaccgggcagtgtggggggtccatagaccacaggagcagctctctgaagggggactccccgttggtgaagggcagccttggccatgtggaaagcgggcttgaggacgtgttgggaaacacagaccggggcagtctgtgcagtgctgagacgaaatttgagtccaacgtgtgtgtgtgcgacttctccatcgagctctcgcaggccatgctggagagaagcgcccagtcccacagcttgctgaagatggcctcgccctcaccgtgcaccagcagcttcgacaaagggaccatgcggaggatggcgctgtccatgatcgagcggaggaagcgctggcggaccatcaagctgctgctgcgccggggcgcggaccccaacctgtgctgcgtgcccatgcaggtcctgttccttgctgtgaaggccggggacgtggatggggtgaggctgctgctggagcacggggcgaggaccgacatctgctttccgccgcagctgagcaccctgacaccactccacatcgctgccgcccttcctggggaggagggggtacagattgtggagctgctgttgcatgccatcaccgatgtggacgccaaggcatccgacgaggacgacacttacaagcccggcaagctggacctgctgccctcaagtctgaagctcagcaatgagccaggccctccccaagcctactacagcacggacacagccctcccggaggaggggggcaggacggctctgcacatggcctgcgagcgggaggatgacaacaagtgtgccagggacatagtccggctccttctatcccacggagcaaatcctaacctgctgtggagtggccactccccgctctccctgtccattgccagtgggaatgagctggttgtgaaggagctcctgacccagggagctgaccccaacctgcccctgaccaaaggcttgggcagtgccctgtgtgttgcctgtgacctgacctacgagcaccagaggaacatggacagcaagctggccctgattgaccgactcatcagtcacggggccgacatcctgaagcctgtaatgctcaggcagggagaaaaggaggcagtgggcacagccgtggactatggctacttcagattcttccaggaccggaggattgcccgctgccccttccacacgctgatgccagcagagcgcgagacgttcctggcgcggaagcggctcctggagtacatgggcttgcagctacggcaggctgtctttgccaaggagagccagtgggaccccacgtggctgtacctgtgcaagagagcggagctgatccccagccacaggatgaagaagaagggccccagcctgcccaggggcctggatgtgaaggagcaggggcaaattcccttcttcaagttctgctaccagtgtggccgctccatcggggtccgcctcttgccctgccctcgctgctacgggatcctgacctgcagcaagtactgcaagaccaaggcctggaccgagttccacaagaaggactgcggggacctggtggccatcgtgacacaactggagcaagtttccaggaggagagaagaattccagtgaagcagcagctgcacgtccgaggcttggggaggacccaggactgtgtgggtttcttacctgcctgagccacctcagggaatcttccagcctaatgcaggcatttctgcacctttggggtcatgctttgtagcagtgtctcccttgcgacctcgcaataaattggccccacggggtgattttgacagtc

SEQ ID NO: 300179 - protein, 227 aa, Artificial Sequence
  derived and/or modified sequence
MYQGEFGLNMKLGYGKFSWPTGESYHGQFYRDHCHGLGTYMWPDGSSFTGTFYLSHREGYGTMYMKTRLFQGLYKADQRFGPGVETYPDGSQDVGLWFREQLIKLCTQIPSGFSLLRYPEFSSFITHSPARISLSEEEKTEWGLQEGQDPFFYDYKRFLLNDNLTLPPEMYVYSTNSDHLPMTSSFRKELDARIFLNEIPPFVEDGEPWFIINETPLLVKIQKQTYK

SEQ ID NO: 300180 - protein, 246 aa, Artificial Sequence
  derived and/or modified sequence
MYQGEFGLNMKLGYGKFSWPTGESYHGQFYRDHCHGLGTYMWPDGSSFTGTFYLSHREGYGTMYMKTRLFQGLYKADQRFGPGVETYPDGSQDVGLWFREQLIKLCTQIPSGFSLLRYPEFSSFITHSPARISLSEEEKTEWGLQEGQDPFFYDYKRFLLNDNLTLPPEMYVYSTNSDHLPMTSSFRKELDARIFLNEIPPFVEDGEPWFIINETPLLVKIQKQTYKFRLTATTTLSTFSWTVGPT

SEQ ID NO: 300181 - protein, 717 aa, Artificial Sequence
  derived and/or modified sequence
MEGAHASLSLEDEVSGAGSRQRPLEGKGGETPAAEEPGSLKNYAVFATRDVSAAPEKEEEEAEGPLRAQDLRESYIQLVQGVQEWQDGCMYQGEFGLNMKLGYGKFSWPTGESYHGQFYRDHCHGLGTYMWPDGSSFTGTFYLSHREGYGTMYMKTRLFQTHCHNDIVNLLLDCGADVNKCSDEGLTALSMCFLLHYPAQSFKPNVAERTIPEPQEPPKFPVVPILSSSFMDTNLESLYYEVNVPSQGSYELRPPPAPLLLPRVSGSHEGGHFQDTGQCGGSIDHRSSSLKGDSPLVKGSLGHVESGLEDVLGNTDRGSLCSAETKFESNVCVCDFSIELSQAMLERSAQSHSLLKMASPSPCTSSFDKGTMRRMALSMIERRKRWRTIKLLLRRGADPNLCCVPMQVLFLAVKAGDVDGVRLLLEHGARTDICFPPQLSTLTPLHIAAALPGEEGVQIVELLLHAITDVDAKASDEDDTYKPGKVVKELLTQGADPNLPLTKGLGSALCVACDLTYEHQRNMDSKLALIDRLISHGADILKPVMLRQGEKEAVGTAVDYGYFRFFQDRRIARCPFHTLMPAERETFLARKRLLEYMGLQLRQAVFAKESQWDPTWLYLCKRAELIPSHRMKKKGPSLPRGLDVKEQGQIPFFKFCYQCGRSIGVRLLPCPRCYGILTCSKYCKTKAWTEFHKKDCGDLVAIVTQLEQVSRRREEFQ

SEQ ID NO: 300182 - DNA, 2499 bp, Artificial Sequence
  derived and/or modified sequence
cggggctgtctccagggaaacgcgacgctctccgtaggcgcagggctggcaagcagtcgggacgggagcgcgggcgtccgcggtggctgcagtcccgtcggtctccctgctgtccggcgcgagctcttcgagtcttgcttggttggaagaccacagacatggaaggggcccatgcctcccttagcttagaggacgaagtctctggggctggcagccgccaacgcccgctagaggggaagggcggcgagacccctgctgccgaggagccggggtccctgaagaactacgctgtcttcgccacaagggatgtttcagcagcccctgagaaggaagaggaggaagctgagggcccgctgagggcgcaggacctgagggagtcctacatccagctcgtccagggtgtgcaggagtggcaggatggttgcatgtaccagggggagtttgggttgaacatgaagcttggatatggcaaattctcttggcccacaggcgagtcataccatgggcagttttaccgggaccactgccatggcctgggtacctacatgtggccagatggctccagtttcacgggcacattttacctcagccaccgagaaggctacggcaccatgtacatgaagacacggcttttccagactcactgccacaacgacattgtcaaccttctcctggactgtggggccgacgtgaacaagtgctcagatgagggtctcacggcactcagcatgtgtttcctcctccactaccccgcccagtccttcaagcccaatgttgctgaacggaccatacctgagccccaggaacctccaaaattcccagttgttccaatcctttcatcatcatttatggacacaaacctggagtctctgtactatgaggtgaacgtgccttcccagggtagctatgagctgaggccaccgccagcaccactgctcctgccacgcgtctcaggcagccacgagggcggccacttccaggacaccgggcagtgtggggggtccatagaccacaggagcagctctctgaagggggactccccgttggtgaagggcagccttggccatgtggaaagcgggcttgaggacgtgttgggaaacacagaccggggcagtctgtgcagtgctgagacgaaatttgagtccaacgtgtgtgtgtgcgacttctccatcgagctctcgcaggccatgctggagagaagcgcccagtcccacagcttgctgaagatggcctcgccctcaccgtgcaccagcagcttcgacaaagggaccatgcggaggatggcgctgtccatgatcgagcggaggaagcgctggcggaccatcaagctgctgctgcgccggggcgcggaccccaacctgtgctgcgtgcccatgcaggtcctgttccttgctgtgaaggccggggacgtggatggggtgaggctgctgctggagcacggggcgaggaccgacatctgctttccgccgcagctgagcaccctgacaccactccacatcgctgccgcccttcctggggaggagggggtacagattgtggagctgctgttgcatgccatcaccgatgtggacgccaaggcatccgacgaggacgacacttacaagcccggcaaggttgtgaaggagctcctgacccagggagctgaccccaacctgcccctgaccaaaggcttgggcagtgccctgtgtgttgcctgtgacctgacctacgagcaccagaggaacatggacagcaagctggccctgattgaccgactcatcagtcacggggccgacatcctgaagcctgtaatgctcaggcagggagaaaaggaggcagtgggcacagccgtggactatggctacttcagattcttccaggaccggaggattgcccgctgccccttccacacgctgatgccagcagagcgcgagacgttcctggcgcggaagcggctcctggagtacatgggcttgcagctacggcaggctgtctttgccaaggagagccagtgggaccccacgtggctgtacctgtgcaagagagcggagctgatccccagccacaggatgaagaagaagggccccagcctgcccaggggcctggatgtgaaggagcaggggcaaattcccttcttcaagttctgctaccagtgtggccgctccatcggggtccgcctcttgccctgccctcgctgctacgggatcctgacctgcagcaagtactgcaagaccaaggcctggaccgagttccacaagaaggactgcggggacctggtggccatcgtgacacaactggagcaagtttccaggaggagagaagaattccagtgaagcagcagctgcacgtccgaggcttggggaggacccaggactgtgtgggtttcttacctgcctgagccacctcagggaatcttccagcctaatgcaggcatttctgcacctttggggtcatgctttgtagcagtgtctcccttgcgacctcgcaataaattggccccacggggtgattttgacagtc

SEQ ID NO: 300183 - DNA, 1827 bp, Artificial Sequence
  derived and/or modified sequence
cggggctgtctccagggaaacgcgacgctctccgtaggcgcagggctggcaagcagtcgggacgggagcgcgggcgtccgcggtggctgcagtcccgtcggtctccctgctgtccggcgcgagctcttcgagtcttgcttggttggaagaccacagacatggaaggggcccatgcctcccttagcttagaggacgaagtctctggggctggcagccgccaacgcccgctagaggggaagggcggcgagacccctgctgccgaggagccggggtccctgaagaactacgctgtcttcgccacaagggatgtttcagcagcccctgagaaggaagaggaggaagctgagggcccgctgagggcgcaggacctgagggagtcctacatccagctcgtccagggtgtgcaggagtggcaggatggttgcatgtaccagggggagtttgggttgaacatgaagcttggatatggcaaattctcttggcccacaggcgagtcataccatgggcagttttaccgggaccactgccatggcctgggtacctacatgtggccagatggctccagtttcacgggcacattttacctcagccaccgagaaggctacggcaccatgtacatgaagacacggcttttccagactcactgccacaacgacattgtcaaccttctcctggactgtggggccgacgtgaacaagtgctcagatgagggtctcacggcactcagcatgtgtttcctcctccactaccccgcccagtccttcaagcccaatgttgctgaacggaccatacctgagccccaggaacctccaaaattcccagttgttccaatcctttcatcatcatttatggacacaaacctggagtctctgtactatgaggtgaacgtgccttcccagggtagctatgagctgaggccaccgccagcaccactgctcctgccacgcgtctcaggcagccacgagggcggccacttccaggacaccgggcagtgtggggggtccatagaccacaggagcagctctctgaagggggactccccgttggtgaagggcagccttggccatgtggaaagcgggcttgaggacgtgttgggaaacacagaccggggcagtctgtgcagtgctgagacgaaatttgagtccaacgtgtgtgtgtgcgacttctccatcgagctctcgcaggccatgctggagagaagcgcccagtcccacagcttgctgaagatggcctcgccctcaccgtgcaccagcagcttcgacaaagggaccatgcggaggatggcgctgtccatgatcgagcggaggaagcgctggcggaccatcaagctgctgctgcgccggggcgcggaccccaacctgtgctgcgtgcccatgcaggtcctgttccttgctgtgaaggccggggacgtggatggggtgaggctgctgctggagcacggggcgaggaccgacatctgctttccgccgcagtgttgaagcaaactaaggggaagcgcatcctgaaggccccttggaaaggggagacttatattcaggaggaggcgggcctcctttcaacccacgctcagcatcacaaggacgcaggcaggagaggcaaagggttttggtgctgaggttttatctttagctcaacagatccagccgcaaaatatttagctgagaaaaaatcttcgaaggggaatctgattttatattttttttcttaagaagtgcctttcccagcggacggcttcttccctctctgaggccacacccacccgtgagcaagcggcttcacagggcattttgctctggaataaattagcctgctagttcttcgaagaaa

SEQ ID NO: 300184 - DNA, 684 bp, Artificial Sequence
  derived and/or modified sequence
atgtaccagggcgagttcggcctgaacatgaagctgggctacggcaagttcagctggcccaccggcgagagctaccacggccagttctacagagaccactgccacggcctgggcacctacatgtggcccgacggcagcagcttcaccggcaccttctacctgagccacagagagggctacggcaccatgtacatgaagaccagactgttccagggcctgtacaaggccgaccagagattcggccccggcgtggagacctaccccgacggcagccaggacgtgggcctgtggttcagagagcagctgatcaagctgtgcacccagatccccagcggcttcagcctgctgagataccccgagttcagcagcttcatcacccacagccccgccagaatcagcctgagcgaggaggagaagaccgagtggggcctgcaggagggccaggaccccttcttctacgactacaagagattcctgctgaacgacaacctgaccctgccccccgagatgtacgtgtacagcaccaacagcgaccacctgcccatgaccagcagcttcagaaaggagctggacgccagaatcttcctgaacgagatcccccccttcgtggaggacggcgagccctggttcatcatcaacgagacccccctgctggtgaagatccagaagcagacctacaagtag

SEQ ID NO: 300185 - DNA, 741 bp, Artificial Sequence
  derived and/or modified sequence
atgtaccagggcgagttcggcctgaacatgaagctgggctacggcaagttcagctggcccaccggcgagagctaccacggccagttctacagagaccactgccacggcctgggcacctacatgtggcccgacggcagcagcttcaccggcaccttctacctgagccacagagagggctacggcaccatgtacatgaagaccagactgttccagggcctgtacaaggccgaccagagattcggccccggcgtggagacctaccccgacggcagccaggacgtgggcctgtggttcagagagcagctgatcaagctgtgcacccagatccccagcggcttcagcctgctgagataccccgagttcagcagcttcatcacccacagccccgccagaatcagcctgagcgaggaggagaagaccgagtggggcctgcaggagggccaggaccccttcttctacgactacaagagattcctgctgaacgacaacctgaccctgccccccgagatgtacgtgtacagcaccaacagcgaccacctgcccatgaccagcagcttcagaaaggagctggacgccagaatcttcctgaacgagatcccccccttcgtggaggacggcgagccctggttcatcatcaacgagacccccctgctggtgaagatccagaagcagacctacaagttcagactgaccgccaccaccaccctgagcaccttcagctggaccgtgggccccacctag

SEQ ID NO: 300186 - DNA, 684 bp, Artificial Sequence
  derived and/or modified sequence
atgtaccagggcgaattcgggctcaacatgaagctgggttatggcaagttcagttggcccacaggcgagtcctatcatggccagttctacagggaccactgtcatggcctcggaacttacatgtggcccgacggatcctcctttacaggaacgttctatctctcacatcgggaggggtacgggacgatgtatatgaagaccagactgtttcagggtctctacaaagcagatcagaggtttggacccggggtggaaacttaccctgacggttcccaggacgtgggattatggtttagggagcagcttataaagttatgcacgcagattccgagcggatttagcttattgagataccctgaattttctagcttcattacgcattcacccgctcgcatttctctgtctgaggaagagaagactgagtggggcctgcaagaaggccaggatccctttttttacgattacaagagatttctgctcaatgacaacctcacacttccccccgagatgtacgtgtattcgactaactctgaccacttgccgatgacctcaagcttccggaaggagctcgacgcaaggatctttctcaacgagatacctcccttcgtggaagacggggagccgtggtttataattaacgagactccgctgcttgttaagatccaaaaacagacatacaagtag

SEQ ID NO: 300187 - DNA, 741 bp, Artificial Sequence
  derived and/or modified sequence
atgtatcagggtgagtttgggctgaacatgaagctggggtacggaaagtttagttggcctactggagagtcatatcacggtcaattctatagggatcattgtcacggccttggaacttacatgtggcccgacgggtcttcctttaccgggaccttctacttgagccatagggagggatacggtaccatgtacatgaagactaggctgttccaaggcctgtacaaggctgatcagcgattcggtcctggcgtggaaacgtaccccgatgggtctcaagacgtggggctatggttccgggagcaactgatcaagctgtgcactcagattccatcagggttttctctgctcagatatcctgagtttagctccttcataactcactcccccgcgcggatatcgctttccgaagaagagaagactgaatggggccttcaggaggggcaagatcccttcttctatgactacaaaaggttccttcttaatgacaatttgaccctcccaccggaaatgtatgtgtatagtacaaactcggatcacctccccatgacctccagcttccgcaaagagcttgacgcacgcattttcctgaacgagatccctcctttcgttgaggacggcgaaccatggtttattattaacgaaacaccactcctggtgaagatccagaaacagacctacaagtttagattgacagccacaacgactctctctactttctcgtggactgtcggtcccacgtag

SEQ ID NO: 300188 - DNA, 652 bp, Artificial Sequence
  derived and/or modified sequence
acagcgtgactcccgcgcgcgccagctgctcctccgcgcccgcggctcgcgcgctcccgaggaagagtgagggcgcgacgcgcaccaacggtggaggaaggcccagctgtttcccaccatggtgcctctgtacatcccagtccagttcctgaaatgcgctctgtagcctggagagctcctgcgcatcctgtgaagccccatcaagaatccgctctcctgcagtccttccccgaggccctcggagggtccaagacagccaatccctcttctctgcggtgactcttgcggcctccctcatctcgttccctccgcaggcctcgagttacccttgcgccttccacatttactgaatgaacaaaggccggggctggaatcaggcagggcttgagcaagtcgtggctccacgtgctaggttggaagaccacagacatggaaggggcccatgcctcccttagcttagaggacgaagtctctggggctggcagccgccaacgcccgctagaggggaagggcggcgagacccctgctgccgaggagccggggtccctgaagaactacgctgtcttcgccacaagggatgtttcagcagcccctgagaaggaagaggaggaagctgagggcccgctgagggcgcaggacctgagggagtcct

SEQ ID NO: 300189 - DNA, 945 bp, Artificial Sequence
  derived and/or modified sequence
cgagaggccgctagcagcgccctgcggaccggcccgcagccccggcgcccgccccggactcacggcgggggcgtcggtcgaggtgtaccgcaggatgacctggaagggctggtgcgcctgcagctcgggcggcagcgtgacgggatgtttcagcagcccctgagaaggaagaggaggaagctgagggcccgctgagggcgcaggacctgagggagtcctacatccagctcgtccagggtgtgcaggagtggcaggatggttgcatgtaccagggggagtttgggttgaacatgaagcttggatatggcaaattctcttggcccacaggcgagtcataccatgggcagttttaccgggaccactgccatggcctgggtacctacatgtggccagatggctccagtttcacgggcacattttacctcagccaccgagaaggctacggcaccatgtacatgaagacacggcttttccaggggctatacaaagcggaccagcggtttgggccaggtgtcgagacctaccccgatggcagccaggacgtggggctgtggttccgagagcagctcatcaagctgtgcacccagatccccagtggcttctccctcctcagataccctgagttctccagcttcatcacccacagccctgccaggatcagcctctcagaagaggagaaaacggagtggggactgcaggagggacaggatccctttttctatgactataagcggtttcttctgaatgacaacctaacgctgcctccagaaatgtatgtctactcgaccaacagtgaccacctgcccatgacaagctctttccgcaaagagctggacgcccgcatcttcctcaatgaaattcctccgttcgttgaggatggagaaccatggttcataatcaatgagacccctttgttggtcaaaatccagaagcaaacttacaagt

SEQ ID NO: 300190 - DNA, 1822 bp, Artificial Sequence
  derived and/or modified sequence
gaggaagagtgagggcgcgacgcgcaccaacggtggagggatgtttcagcagcccctgagaaggaagaggaggaagctgagggcccgctgagggcgcaggacctgagggagtcctacatccagctcgtccagggtgtgcaggagtggcaggatggttgcatgtaccagggggagtttgggttgaacatgaagcttggatatggcaaattctcttggcccacaggcgagtcataccatgggcagttttaccgggaccactgccatggcctgggtacctacatgtggccagatggctccagtttcacgggcacattttacctcagccaccgagaaggctacggcaccatgtacatgaagacacggcttttccaggggctatacaaagcggaccagcggtttgggccaggtgtcgagacctaccccgatggcagccaggacgtggggctgtggttccgagagcagctcatcaagctgtgcacccagatccccagtggcttctccctcctcagataccctgagttctccagcttcatcacccacagccctgccaggatcagcctctcagaagaggagaaaacggagtggggactgcaggagggacaggatccctttttctatgactataagcggtttcttctgaatgacaacctaacgctgcctccagaaatgtatgtctactcgaccaacagtgaccacctgcccatgacaagctctttccgcaaagagctggacgcccgcatcttcctcaatgaaattcctccgttcgttgaggatggagaaccatggttcataatcaatgagacccctttgttggtcaaaatccagaagcaaacttacaagttcagactcactgccacaacgacattgtcaaccttctcctggactgtggggccgacgtgaacaagtgctcagatgagggtctcacggcactcagcatgtgtttcctcctccactaccccgcccagtccttcaagcccaatgttgctgaacggaccatacctgagccccaggaacctccaaaattcccagttgttccaatcctttcatcatcatttatggacacaaacctggagtctctgtactatgaggtgaacgtgccttcccagggtagctatgagctgaggccaccgccagcaccactgctcctgccacgcgtctcaggcagccacgagggcggccacttccaggacaccgggcagtgtggggggtccatagaccacaggagcagctctctgaagggggactccccgttggtgaagggcagccttggccatgtggaaagcgggcttgaggacgtgttgggaaacacagaccggggcagtctgtgcagtgctgagacgaaatttgagtccaacgtgtgtgtgtgcgacttctccatcgagctctcgcaggccatgctggagagaagcgcccagtcccacagcttgctgaagatggcctcgccctcaccgtgcaccagcagcttcgacaaagggaccatgcggaggatggcgctgtccatgatcgagtaggtcctggcaccagctggtgggggtggagggccaccatcagggctgaatcctatgctcagtgtctagctaaaggattgtaaatgcaccaatcagcactctgtaaaattgaccaatcagcgttctgtaaaatggaccaatcagtggtctgtaaaatggaccagtcagcaggatgtgggcggggccaaaaaagggaataaaagctggccaccgccaggctccccaccagcctgcagcgacaacctgcttagtttcctttctgtgctgtggaagctttgttctttcagtcttcacaataaatcttgctgctgctc

SEQ ID NO: 300191 - DNA, 684 bp, Artificial Sequence
  derived and/or modified sequence
atgtaccagggcgagtttggcctgaacatgaagctgggctacggcaagttctcctggcccactggagagagctaccacggccagttctacagagaccactgccacggcctgggcacctacatgtggccagatggcagcagcttcaccggcaccttctacctgagccaccgggagggctacggcaccatgtacatgaagaccaggctcttccagggcctgtacaaggctgaccagcgcttcggccctggggtggagacctacccagatggcagccaggatgtgggcctgtggttccgggagcagctgatcaagctgtgcacccagatccccagcggcttcagcctgctgcgctacccagagttcagcagcttcatcacccacagccctgcccgcatcagcctgtctgaggaggagaagacagagtggggcctgcaggagggccaggaccccttcttctatgactacaagcgcttcctgctgaatgacaacctgaccctgcccccagagatgtatgtgtacagcaccaacagcgaccacctgcccatgaccagcagcttcaggaaggagctggatgcccgcatcttcctgaatgagatccccccatttgtggaggatggagagccctggttcatcatcaatgagacccccctgctggtgaagatccagaagcagacctacaagtag

SEQ ID NO: 300192 - DNA, 741 bp, Artificial Sequence
  derived and/or modified sequence
atgtaccagggcgagtttggcctgaacatgaagctgggctacggcaagttctcctggcccactggagagagctaccacggccagttctacagagaccactgccacggcctgggcacctacatgtggccagatggcagcagcttcaccggcaccttctacctgagccaccgggagggctacggcaccatgtacatgaagaccaggctcttccagggcctgtacaaggctgaccagcgcttcggccctggggtggagacctacccagatggcagccaggatgtgggcctgtggttccgggagcagctgatcaagctgtgcacccagatccccagcggcttcagcctgctgcgctacccagagttcagcagcttcatcacccacagccctgcccgcatcagcctgtctgaggaggagaagacagagtggggcctgcaggagggccaggaccccttcttctatgactacaagcgcttcctgctgaatgacaacctgaccctgcccccagagatgtatgtgtacagcaccaacagcgaccacctgcccatgaccagcagcttcaggaaggagctggatgcccgcatcttcctgaatgagatccccccatttgtggaggatggagagccctggttcatcatcaatgagacccccctgctggtgaagatccagaagcagacctacaagttccggctgacagccaccaccaccctgagcaccttctcctggacagtgggccccacctag

SEQ ID NO: 300193 - DNA, 684 bp, Artificial Sequence
  derived and/or modified sequence
atgtaccagggcgagttcggcctgaacatgaagctgggctacggcaagtttagctggccaaccggcgaaagttatcacgggcagttttatagggatcactgccacgggttaggaacttatatgtggcctgacgggagcagttttacgggcactttctatctaagccaccgagaggggtatgggactatgtatatgaagaccaggctattccagggcctgtacaaagccgatcagaggtttggcccaggtgttgagacttaccctgacggctcccaagacgttggcctctggttcagagaacagttgatcaagttatgtacacagatacccagtggcttcagcttactacgttacccggagttcagcagctttatcactcatagccccgccaggatcagtctgtccgaggaagaaaagaccgaatggggactgcaggaaggacaggatccgttcttctacgactacaaacggttcttactgaacgacaacttaaccctgcctcccgaaatgtatgtgtatagtaccaattcggaccatctgccaatgacaagctccttcaggaaggagctcgacgcccgtatctttctcaatgaaataccaccttttgtggaagatggcgaaccgtggttcataattaacgagacacctctgctcgtcaagatccagaagcaaacctataagtag

SEQ ID NO: 300194 - DNA, 741 bp, Artificial Sequence
  derived and/or modified sequence
atgtaccagggcgagttcggcctgaacatgaagctgggctacggcaaattttcttggccgacgggtgagtcctaccatggccagttctacagagatcactgccacggtctggggacctatatgtggccagacgggagtagtttcaccggcacgttttacctgagtcatagagaagggtacggcacaatgtatatgaagacaaggctgttccaaggattgtacaaggccgatcagcgtttcggcccaggtgtggaaacataccctgacggcagtcaagacgtggggctgtggtttcgcgagcagctaattaagctgtgtactcaaatcccgtccgggttcagcttgctgcgctatcccgagttctcttccttcatcacgcattctcccgccagaattagtctgtcagaggaagaaaagactgaatggggtctccaggaggggcaggacccattcttttatgactataaacggttcctgttaaatgacaacctaaccctgcctcccgagatgtatgtctattccaccaactccgatcacttgcctatgaccagttcttttaggaaggagctggacgccagaatctttttgaatgagattcccccttttgtcgaagacggcgaaccttggtttatcatcaacgagaccccactgctggtaaagatacagaagcagacttacaaattccgcttaactgcaacaaccaccctgagcactttcagctggacagtgggacccacatag

SEQ ID NO: 300195 - DNA, 684 bp, Artificial Sequence
  derived and/or modified sequence
atgtatcagggagaattcggcttgaatatgaaattgggctatggaaaattctcttggcctaccggtgagtcgtatcatggccagttttatagagaccactgtcatggcctgggaacctacatgtggccagatgggtcttctttcacaggcactttttatctgtctcatcgggaaggatatggtacgatgtatatgaagaccagactgtttcaggggctgtataaggctgaccaaagatttggcccaggagtcgaaacttatcctgacggctctcaggatgtgggcctatggtttcgcgagcagctcattaaactgtgtacgcaaattccgagcggtttcagtctcttgaggtatcctgaatttagtagttttatcactcatagccctgctcgcatatccctaagcgaggaagagaaaactgagtggggtctccaggaaggccaagatccattcttttacgattacaagagatttcttttgaacgataatctcacattgccccctgaaatgtatgtctacagcaccaactcagaccatttgcccatgacatcttcatttcgcaaagagctggacgctcggattttcctgaatgagattcctcctttcgtggaggatggcgaaccatggttcatcatcaacgaaacacctctactggtgaagatccagaagcaaacgtataaatag

SEQ ID NO: 300196 - DNA, 741 bp, Artificial Sequence
  derived and/or modified sequence
atgtaccagggcgagttcggcctgaacatgaaacttggatacggcaagttctcatggcccactggagagagctatcatggacagttctatcgggaccattgccatggcctaggcacatatatgtggccggacggatcctctttcaccggcactttttacctgagccacagagaggggtatggtactatgtacatgaaaacacgactgtttcagggcctgtataaggctgatcagagatttggccctggggtggagacgtatcctgatggcagtcaggatgtcggtctttggtttagagagcagctgattaaactttgcactcagattcctagtggcttcagcttgcttaggtaccccgaattttctagctttatcacccacagccccgctagaatcagcctttccgaggaggagaagaccgaatggggtctacaggaaggacaggaccctttcttttatgactataagcgctttctacttaacgataatctgaccctgccgcctgagatgtacgtgtacagcactaattctgatcatctccctatgacttcctccttcagaaaagagttagacgccaggattttcctaaacgagatccctcccttcgtggaggatggggagccttggttcataatcaacgaaacgcctctgctagtcaaaattcaaaaacagacatacaagttccgactaacggcaacgaccaccctgagcacgttctcttggacggtcggccctacctag

SEQ ID NO: 300197 - protein, 711 aa, Artificial Sequence
  derived and/or modified sequence
MYQGEFGLNMKLGYGKFSWPTGESYHGQFYRDHCHGLGTYMWPDGSSFTGTFYLSHREGYGTMYMKTRLFQTHCHNDIVNLLLDCGADVNKCSDEGLTALSMCFLLHYPAQSFKPNVAERTIPEPQEPPKFPVVPILSSSFMDTNLESLYYEVNVPSQGSYELRPPPAPLLLPRVSGSHEGGHFQDTGQCGGSIDHRSSSLKGDSPLVKGSLGHVESGLEDVLGNTDRGSLCSAETKFESNVCVCDFSIELSQAMLERSAQSHSLLKMASPSPCTSSFDKGTMRRMALSMIERRKRWRTIKLLLRRGADPNLCCVPMQVLFLAVKAGDVDGVRLLLEHGARTDICFPPQLSTLTPLHIAAALPGEEGVQIVELLLHAITDVDAKASDEDDTYKPGKLDLLPSSLKLSNEPGPPQAYYSTDTALPEEGGRTALHMACEREDDNKCARDIVRLLLSHGANPNLLWSGHSPLSLSIASGNELVVKELLTQGADPNLPLTKGLGSALCVACDLTYEHQRNMDSKLALIDRLISHGADILKPVMLRQGEKEAVGTAVDYGYFRFFQDRRIARCPFHTLMPAERETFLARKRLLEYMGLQLRQAVFAKESQWDPTWLYLCKRAELIPSHRMKKKGPSLPRGLDVKEQGQIPFFKFCYQCGRSIGVRLLPCPRCYGILTCSKYCKTKAWTEFHKKDCGDLVAIVTQLEQVSRRREEFQ

SEQ ID NO: 300198 - protein, 439 aa, Artificial Sequence
  derived and/or modified sequence
MEGAHASLSLEDEVSGAGSRQRPLEGKGGETPAAEEPGSLKNYAVFATRDVSAAPEKEEEEAEGPLRAQDLRESYIQLVQGVQEWQDGCMYQGEFGLNMKLGYGKFSWPTGESYHGQFYRDHCHGLGTYMWPDGSSFTGTFYLSHREGYGTMYMKTRLFQTHCHNDIVNLLLDCGADVNKCSDEGLTALSMCFLLHYPAQSFKPNVAERTIPEPQEPPKFPVVPILSSSFMDTNLESLYYEVNVPSQGSYELRPPPAPLLLPRVSGSHEGGHFQDTGQCGGSIDHRSSSLKGDSPLVKGSLGHVESGLEDVLGNTDRGSLCSAETKFESNVCVCDFSIELSQAMLERSAQSHSLLKMASPSPCTSSFDKGTMRRMALSMIERRKRWRTIKLLLRRGADPNLCCVPMQVLFLAVKAGDVDGVRLLLEHGARTDICFPPQC

SEQ ID NO: 300199 - DNA, 2136 bp, Artificial Sequence
  derived and/or modified sequence
atgtaccagggcgagttcggcctgaacatgaagctgggctacggcaagttcagctggcccaccggcgagagctaccacggccagttctacagagaccactgccacggcctgggcacctacatgtggcccgacggcagcagcttcaccggcaccttctacctgagccacagagagggctacggcaccatgtacatgaagaccagactgttccagacccactgccacaacgacatcgtgaacctgctgctggactgcggcgccgacgtgaacaagtgcagcgacgagggcctgaccgccctgagcatgtgcttcctgctgcactaccccgcccagagcttcaagcccaacgtggccgagagaaccatccccgagccccaggagccccccaagttccccgtggtgcccatcctgagcagcagcttcatggacaccaacctggagagcctgtactacgaggtgaacgtgcccagccagggcagctacgagctgagacccccccccgcccccctgctgctgcccagagtgagcggcagccacgagggcggccacttccaggacaccggccagtgcggcggcagcatcgaccacagaagcagcagcctgaagggcgacagccccctggtgaagggcagcctgggccacgtggagagcggcctggaggacgtgctgggcaacaccgacagaggcagcctgtgcagcgccgagaccaagttcgagagcaacgtgtgcgtgtgcgacttcagcatcgagctgagccaggccatgctggagagaagcgcccagagccacagcctgctgaagatggccagccccagcccctgcaccagcagcttcgacaagggcaccatgagaagaatggccctgagcatgatcgagagaagaaagagatggagaaccatcaagctgctgctgagaagaggcgccgaccccaacctgtgctgcgtgcccatgcaggtgctgttcctggccgtgaaggccggcgacgtggacggcgtgagactgctgctggagcacggcgccagaaccgacatctgcttccccccccagctgagcaccctgacccccctgcacatcgccgccgccctgcccggcgaggagggcgtgcagatcgtggagctgctgctgcacgccatcaccgacgtggacgccaaggccagcgacgaggacgacacctacaagcccggcaagctggacctgctgcccagcagcctgaagctgagcaacgagcccggccccccccaggcctactacagcaccgacaccgccctgcccgaggagggcggcagaaccgccctgcacatggcctgcgagagagaggacgacaacaagtgcgccagagacatcgtgagactgctgctgagccacggcgccaaccccaacctgctgtggagcggccacagccccctgagcctgagcatcgccagcggcaacgagctggtggtgaaggagctgctgacccagggcgccgaccccaacctgcccctgaccaagggcctgggcagcgccctgtgcgtggcctgcgacctgacctacgagcaccagagaaacatggacagcaagctggccctgatcgacagactgatcagccacggcgccgacatcctgaagcccgtgatgctgagacagggcgagaaggaggccgtgggcaccgccgtggactacggctacttcagattcttccaggacagaagaatcgccagatgccccttccacaccctgatgcccgccgagagagagaccttcctggccagaaagagactgctggagtacatgggcctgcagctgagacaggccgtgttcgccaaggagagccagtgggaccccacctggctgtacctgtgcaagagagccgagctgatccccagccacagaatgaagaagaagggccccagcctgcccagaggcctggacgtgaaggagcagggccagatccccttcttcaagttctgctaccagtgcggcagaagcatcggcgtgagactgctgccctgccccagatgctacggcatcctgacctgcagcaagtactgcaagaccaaggcctggaccgagttccacaagaaggactgcggcgacctggtggccatcgtgacccagctggagcaggtgagcagaagaagagaggagttccagtag

SEQ ID NO: 300200 - DNA, 2136 bp, Artificial Sequence
  derived and/or modified sequence
atgtatcaaggcgagttcggattaaatatgaagctgggatacggaaagttctcttggcccactggagagtcgtaccacggtcagttttacagggatcattgccacgggttgggcacctacatgtggcccgatgggagctctttcaccgggacattttacttgtcacatagggaaggctatggaactatgtacatgaagacgcgtctgttccagacccattgccacaacgacattgtcaatctacttctggattgcggggcagacgtgaataaatgtagcgacgagggccttactgcactgagtatgtgttttttgctgcattatccagctcagtcctttaaacccaatgtcgccgagcggactatcccagaaccccaggagccgccgaagttccccgtagttcccatccttagtagtagtttcatggacactaatctggagtcactttactatgaggttaacgttcctagtcaggggtcatatgagctccgtccgccaccagcccccttactcctccctagggtgtccgggagccacgagggcggacactttcaggatacaggacagtgcggcggtagtatcgatcaccggtcatcatcactcaaaggggacagtcccctcgtcaaaggaagcctggggcacgtcgaatccggccttgaggacgtgctgggaaacacagataggggaagcctctgctcggccgaaaccaagttcgagagtaacgtctgtgtatgtgacttttcaatcgaactcagtcaagctatgctcgaaaggagcgctcaaagccacagtctcttgaagatggcaagtccttccccgtgtacatcaagctttgacaaggggacaatgcgccgaatggcgttgtctatgatcgagcgccgcaaacgatggcggaccattaaactgttgctgcggaggggagccgatcccaacctgtgttgcgttccgatgcaagtgctgttcctcgcagttaaggctggggatgtagacggcgtgcggcttttgttagagcacggtgcccggaccgacatctgtttccctcctcagctgagcactctgacacctcttcatatcgcagcggcgctgcctggggaggaaggcgtccaaattgtggagctgctactgcacgctattacagacgtggacgcgaaagcgagtgacgaagacgacacttacaaaccgggaaagcttgatttactgccttcctctttaaaactctctaatgaacctggccctcctcaggcctattactcaacagataccgctctgccagaggaaggcgggcggactgctctgcacatggcctgtgaaagggaagacgacaacaaatgtgcacgcgatatcgtgcgtctactgttgtcccatggcgctaatcctaatttgttgtggtccggccatagcccgctgagcctttctattgctagcgggaatgagttggttgttaaagaactcctgacgcagggcgcagaccccaatctgccgctgacgaagggcctggggagcgcactctgcgtggcctgtgatctcacatatgagcaccagcgaaatatggatagtaaactggcgctcattgacaggctgatctcacatggtgccgacatcttaaaaccagttatgctaaggcaaggggagaaggaagccgtgggtactgcggtagactacggttacttccgcttttttcaagacagaagaatcgcgcggtgccctttccatacactgatgccggccgagcgagagacgttccttgcaagaaagcgcctcctcgagtatatggggcttcagttgcggcaggccgtttttgccaaagaatcacaatgggatccaacctggctttacttatgtaagagagcagaactgatcccgtcacatagaatgaaaaagaaaggcccatctctcccacggggccttgatgtgaaggagcagggccagatccctttctttaagttctgctatcagtgtggaagatctataggcgtccggctgttgccttgtcccaggtgctacggaatcttgacctgttctaagtactgcaagaccaaggcctggacggaattccataagaaagactgcggggacctagtggctattgtgacccaactggagcaagtctcccgacggagggaggaattccagtag

SEQ ID NO: 300201 - DNA, 2690 bp, Artificial Sequence
  derived and/or modified sequence
gggacgggagcgcgggcgtccgcggtggctgcagtcccgtcggtctccctgctgtccggcgcgagctcttcgagtcttgcttggttggaagaccacagacatggaaggggcccatgcctcccttagcttagaggacgaagtctctggggctggcagccgccaacgcccgctagaggggaagggcggcgagacccctgctgccgaggagccggggtccctgaagaactacgctgtcttcgccacaagggatgtttcagcagcccctgagaaggaagaggaggaagctgagggcccgctgagggcgcaggacctgagggagtcctacatccagctcgtccagggtgtgcaggagtggcaggatggttgcatgtaccagggggagtttgggttgaacatgaagcttggatatggcaaattctcttggcccacaggcgagtcataccatgggcagttttaccgggaccactgccatggcctgggtacctacatgtggccagatggctccagtttcacgggcacattttacctcagccaccgagaaggctacggcaccatgtacatgaagacacggcttttccagactcactgccacaacgacattgtcaaccttctcctggactgtggggccgacgtgaacaagtgctcagatgagggtctcacggcactcagcatgtgtttcctcctccactaccccgcccagtccttcaagcccaatgttgctgaacggaccatacctgagccccaggaacctccaaaattcccagttgttccaatcctttcatcatcatttatggacacaaacctggagtctctgtactatgaggtgaacgtgccttcccagggtagctatgagctgaggccaccgccagcaccactgctcctgccacgcgtctcaggcagccacgagggcggccacttccaggacaccgggcagtgtggggggtccatagaccacaggagcagctctctgaagggggactccccgttggtgaagggcagccttggccatgtggaaagcgggcttgaggacgtgttgggaaacacagaccggggcagtctgtgcagtgctgagacgaaatttgagtccaacgtgtgtgtgtgcgacttctccatcgagctctcgcaggccatgctggagagaagcgcccagtcccacagcttgctgaagatggcctcgccctcaccgtgcaccagcagcttcgacaaagggaccatgcggaggatggcgctgtccatgatcgagcggaggaagcgctggcggaccatcaagctgctgctgcgccggggcgcggaccccaacctgtgctgcgtgcccatgcaggtcctgttccttgctgtgaaggccggggacgtggatggggtgaggctgctgctggagcacggggcgaggaccgacatctgctttccgccgcagctgagcaccctgacaccactccacatcgctgccgcccttcctggggaggagggggtacagattgtggagctgctgttgcatgccatcaccgatgtggacgccaaggcatccgacgaggacgacacttacaagcccggcaagctggacctgctgccctcaagtctgaagctcagcaatgagccaggccctccccaagcctactacagcacggacacagccctcccggaggaggggggcaggacggctctgcacatggcctgcgagcgggaggatgacaacaagtgtgccagggacatagtccggctccttctatcccacggagcaaatcctaacctgctgtggagtggccactccccgctctccctgtccattgccagtgggaatgagctggttgtgaaggagctcctgacccagggagctgaccccaacctgcccctgaccaaaggcttgggcagtgccctgtgtgttgcctgtgacctgacctacgagcaccagaggaacatggacagcaagctggccctgattgaccgactcatcagtcacggggccgacatcctgaagcctgtaatgctcaggcagggagaaaaggaggcagtgggcacagccgtggactatggctacttcagattcttccaggaccggaggattgcccgctgccccttccacacgctgatgccagcagagcgcgagacgttcctggcgcggaagcggctcctggagtacatgggcttgcagctacggcaggctgtctttgccaaggagagccagtgggaccccacgtggctgtacctgtgcaagagagcggagctgatccccagccacaggatgaagaagaagggccccagcctgcccaggggcctggatgtgaaggagcaggggcaaattcccttcttcaagttctgctaccagtgtggccgctccatcggggtccgcctcttgccctgccctcgctgctacgggatcctgacctgcagcaagtactgcaagaccaaggcctggaccgagttccacaagaaggactgcggggacctggtggccatcgtgacacaactggagcaagtttccaggaggagagaagaattccagtgaagcagcagctgcacgtccgaggcttggggaggacccaggactgtgtgggtttcttacctgcctgagccacctcagggaatcttccagcctaatgcaggcatttctgcacctttggggtcatgctttgtagcagtgtctcccttgcgacctcgcaataaattggccccacggggtgattttgacagtc

SEQ ID NO: 300202 - DNA, 2136 bp, Artificial Sequence
  derived and/or modified sequence
atgtaccagggcgagtttggcctgaacatgaagctgggctacggcaagttctcctggcccactggagagagctaccacggccagttctacagagaccactgccacggcctgggcacctacatgtggccagatggcagcagcttcaccggcaccttctacctgagccaccgggagggctacggcaccatgtacatgaagaccaggctcttccagacccactgccacaatgacatcgtgaacctgctgctggactgtggggctgatgtgaacaagtgcagtgatgagggcctgacagccctgtccatgtgcttcctgctgcactacccagcccagagcttcaagcccaacgtggccgagaggaccatccctgagccccaggagccccccaagtttcctgtggtgcccatcctgagcagcagcttcatggacaccaacctggagagcctgtactatgaggtgaatgtgcccagccagggcagctatgagctgcggcccccaccagcccccctgctgctgccccgggtgtctggcagccatgaaggaggccacttccaggacaccggccagtgtggcggcagcattgaccacaggagcagcagcctgaagggggacagccccctggtgaagggcagcctgggccacgtggagagcggcctggaggatgtgctgggcaacacagaccggggcagcctgtgcagcgctgagaccaagtttgagagcaatgtgtgtgtgtgtgacttcagcattgagctgagccaggccatgctggagaggtctgcccagagccacagcctgctgaagatggccagccccagcccctgcaccagcagctttgacaagggcaccatgaggaggatggccctgtccatgattgaaagaaggaagcgctggaggaccatcaagctgctgctgcggagaggagctgaccccaacctgtgctgcgtgcccatgcaggtgctcttcctggccgtgaaggctggagatgtggatggagtgcggctgctgctggagcacggggccaggacagacatctgcttccccccccagctgagcaccctgacccccctgcacatcgccgccgccctgcctggagaggagggcgtgcagatcgtggagctgctgctgcacgccatcacagatgtggatgccaaggccagtgatgaagatgacacctacaagccaggcaagctggacctgctgcccagcagcctgaagctgagcaatgagcccggccccccccaggcctactacagcacagacacagccctgcctgaggagggcggccgcacagccctgcacatggcctgtgaaagagaagatgacaacaagtgtgcccgggacatcgtgcggctgctgctgagccatggagccaaccccaacctgctgtggagcggccacagccccctgagcctgagcatcgccagcggaaatgagctggtggtgaaggagctgctgacccagggcgctgaccccaacctgcccctgaccaagggcctgggcagcgccctgtgtgtggcctgtgacctgacctatgagcaccagaggaacatggacagcaagctggccctgattgacaggctcatcagccacggggctgacatcctgaagcctgtgatgctgcggcagggcgagaaggaggccgtgggcacagctgtggactatggctacttccgcttcttccaggacagaagaattgcccgctgccccttccacaccctgatgcctgctgagcgggagaccttcctggccaggaagaggctgctggagtacatgggcctgcagctgcggcaggccgtgtttgccaaggagagccagtgggaccccacctggctgtacctgtgcaagagagctgagctgatccccagccacaggatgaagaagaagggccccagcctgccccggggcctggatgtgaaggagcagggccagatccccttcttcaagttctgctaccagtgtggccgcagcattggagtgcggctgctgccctgcccccgctgctacggcatcctgacctgcagcaagtactgcaagaccaaggcctggacagagttccacaagaaggactgtggggacctggtggccatcgtgacccagctggagcaggtgtccagaagaagagaggagttccagtag

SEQ ID NO: 300203 - DNA, 2136 bp, Artificial Sequence
  derived and/or modified sequence
atgtaccagggcgagttcggcctgaacatgaagctgggctacggcaaattctcctggccaacaggtgaaagctaccatggccagttctatcgcgaccactgtcatgggctcggcacttacatgtggcccgacggctcctcctttacagggaccttttatctgagccaccgggagggatatggcaccatgtacatgaagacacgactgtttcagacccactgccacaacgatatcgtgaacttactgctcgactgcggagccgatgtgaataagtgttcagatgagggccttaccgcactttccatgtgtttcttgcttcactaccctgcccagtcttttaaacccaacgtggcagaacggacaatacccgagcctcaggaacctcctaaattccctgtggtcccgattcttagctcctcctttatggacacgaatttggagtcactgtactacgaggtgaacgtgcccagccaagggtcctacgagttgagacccccgcctgccccgctcttgctaccacgggtgagcggatcccacgagggcggacacttccaggacactggccaatgtggcgggagtattgatcacagaagttccagtctaaagggcgattcacctctggttaaaggttccctaggtcacgtcgagagcgggttagaagatgtattgggaaacacagatcggggatccctttgtagcgccgagacgaaatttgaaagcaacgtgtgtgtatgtgactttagtatagaattgtctcaagccatgctcgaaaggtcagcccagagtcactcacttttgaagatggctagccccagcccctgcactagctcgttcgacaagggtactatgagacgcatggcactttctatgattgaaaggcgtaagcgctggcggaccataaagctccttttgaggcggggcgcagaccctaacttatgctgtgttcctatgcaggtactgtttcttgctgtgaaggcgggagatgtcgacggcgttcgtttactgctggagcatggagcgcgtaccgacatttgttttcccccccagcttagcactcttacaccgttgcatattgcagctgccctcccaggggaagaaggggttcagattgtggaacttcttctacacgcaatcaccgacgtggatgccaaggcatccgatgaggatgacacttataaaccgggtaaactggacctgcttccatcctctctcaagctgagcaatgaacctggtcctcctcaagcctactatagcacggatacagccttacctgaggaaggcggacgcacagctctccatatggcttgcgaacgggaggacgataataaatgcgccagagacattgtgcgcctactgttgagccacggggcgaacccaaacctattgtggagtggccatagccccctctcactgagtatcgcctccgggaacgagctggtggttaaggaattgctcactcagggggcggaccccaacctgcctcttactaagggactagggagtgctttatgtgttgcatgtgacctgacttatgagcaccaacggaacatggacagtaagttggccctgatagacaggttgatctcacatggcgccgatattctcaaacccgtgatgctgaggcagggtgaaaaggaagcagtgggcacagccgttgactacggatactttagatttttccaggatcggaggatcgcccgttgtccctttcacaccttaatgcccgccgaacgagaaacttttctggcacggaagcggctgcttgagtacatggggcttcagctccgacaggccgttttcgccaaggaatctcaatgggatccaacttggctgtacttatgcaagcgagccgaactgatcccatctcaccgaatgaaaaaaaagggcccatcattgccacgcggtctcgatgtgaaggagcagggtcagattccgtttttcaaattttgctaccagtgcggacggtccattggagtaagactgctaccttgccctcgctgctatgggattctgacctgtagcaaatactgtaagaccaaagcatggaccgagtttcacaagaaggattgtggcgatctcgtggcaattgtgactcaattggagcaggttagtagacgcagggaggaattccaatag

SEQ ID NO: 300204 - DNA, 2136 bp, Artificial Sequence
  derived and/or modified sequence
atgtatcagggggagttcggcctcaatatgaagctgggttacgggaaattttcctggcccaccggcgagagttatcacggccagttttatcgggatcattgccacggcctcggaacgtatatgtggcccgacggatcatcttttactggcaccttctacctctcgcatcgagagggatatgggacaatgtacatgaagactaggctgtttcagacccattgtcacaacgacatagtgaatttgctgctggactgcggtgcagatgtgaacaagtgtagtgatgaggggttgaccgctctgtcaatgtgttttcttctgcattatcctgctcagagcttcaagccaaacgtggcagagcggactattccagagcctcaagaaccccctaaatttccagttgtgcctatcctttcctcgtcgttcatggacactaacctcgagtctttgtactacgaggttaacgtccctagccaggggtcctacgaattgcgccctcctccagcgcctttgcttttgcctcgcgtttccggctcccatgagggaggccacttccaggacacaggacagtgtgggggaagcatcgaccaccggtcaagtagtctgaagggagacagcccccttgtgaaaggcagcctcggccatgttgaatcaggcctggaggatgttctgggcaatacggatagaggaagtctctgcagcgctgagacgaaatttgagagcaatgtctgtgtgtgtgactttagcatcgagttatctcaggccatgctggaaagatccgctcagagccactctctactgaaaatggcctccccctctccctgtacttcctctttcgacaagggcacaatgagaaggatggcactcagcatgatcgaacggagaaagcgatggcgcaccatcaagctcctgctcaggcgcggagccgacccaaacctttgctgtgtgccaatgcaggtcctcttcctggccgttaaggcgggagacgtcgacggcgttcgcttgctgctggagcacggagcaagaaccgatatatgcttccctccccagcttagcactctgaccccgctgcacatagccgcagcactgcctggcgaggagggggtccagatcgtggagctgcttctgcacgcaatcaccgacgtggacgcgaaagcaagtgacgaggatgacacctacaaacctggaaaattagacctgctcccctcaagcttgaagttgagcaatgaacctgggcctccacaagcctattacagcacagatactgctctgcccgaagagggcggtagaacagcactgcatatggcatgcgagcgggaagacgacaacaagtgtgctcgtgacatcgtgaggcttttactaagccacggcgctaatcccaaccttctgtggagcggccattccccattgagccttagcatcgcatccggtaacgaactcgtggtcaaggaacttcttacgcaaggcgcagacccaaacctgcccctcacaaaaggcctggggtcagctttgtgtgtcgcatgcgacctgacctatgaacaccagcgtaatatggattcgaagctggcactgatagataggttgatttcacatggagcagacattttaaaacccgtgatgctgaggcagggcgaaaaagaggcagtagggactgccgttgattacgggtactttcgttttttccaggatagaaggattgctagatgcccctttcacaccctgatgcccgcagaacgggagacatttcttgcccgaaagaggctcttggaatatatgggactgcagttacgccaagcagtctttgcaaaggaatctcagtgggatcccacctggttgtacctgtgtaagagggccgagctgattcctagccacaggatgaagaagaaaggaccttccctgccacgtgggttagacgtgaaggagcaggggcagatcccattttttaagttttgttatcagtgcgggagatctatcggtgtgaggctcctcccatgccctcgttgctacggaatactcacctgttccaagtattgcaagaccaaagcatggaccgaattccacaaaaaggattgcggggatttggttgcaatcgttactcaactcgaacaggttagtcgaaggagagaagaatttcagtag

SEQ ID NO: 300205 - DNA, 1536 bp, Artificial Sequence
  derived and/or modified sequence
atgggcaagaagattaacaaactcttctgttttaactttctcgtgcagtgtttcagaggaaaatccaagcctagcaaatgtcaaattcggaagaaggtcaagaatcatattgagaggttgctcgataccgaggacgaattgagcgacattcagacagactccgtgcccagcgaagtaagggactggttagcgagcacatttactcgaaagatggggatgaccaagaagaagccagaggagaagcccaagtttaggtctatcgttcacgctgtccaagccgggattttcgtagaacgcatgtatagaaaaacttaccacatggtcgggctggcatatccagctgctgtaatagtcaccttgaaggacgtagataagtggtcttttgacgttttcgccctgaacgaggcctccggcgagcattccctgaagtttatgatctacgagctgtttactcgctacgacttgatcaataggttcaagatcccagtctcgtgtctcattacattcgccgaggcgctggaggttgggtactccaagtataagaacccataccacaacctcattcatgctgcagatgtgacacaaacggtccattacattatgttacatacaggtatcatgcattggttaacggagcttgagattctggctatggtcttcgcggctgcaattcacgattacgagcatactgggaccaccaacaactttcacatccagacgcgttctgatgtggccatcctatataatgatagaagcgtattggaaaatcaccacgtctcggcagcctatcgactcatgcaagaggaggaaatgaacatcttgataaacttgagtaaagatgactggagagacctgaggaatcttgtaatcgaaatggttctgagcacggacatgagcggacacttccagcaaatcaaaaatattcgtaactcactgcagcagcccgaaggcattgatcgagctaaaaccatgagcctgatcctgcatgccgccgatattagccaccccgccaaaagctggaaactacactatagatggacgatggctcttatggaggagttctttctgcaaggggacaaggaagctgagctggggcttcctttctcaccactatgtgaccgaaagagcactatggtggcccagagtcagattgggttcatcgacttcatagtggaaccaacattctccctacttactgatagtactgagaaaatcgtgatcccgttaatcgaggaagcttccaaagctgagactagtagctatgtggctagttcatcaaccaccattgtcggcctgcatattgccgatgcgctcaggcggtcaaacactaaaggctcgatgtcagatggatcctattccccagactacagcctcgctgcagtggatttgaagtcttttaaaaataacttggtggatataatccagcagaacaaagagcggtggaaagaactggccgcacagggggagtccgacctccacaaaaacagcgaggacttggtgaacgctgaagagaagcacgacgaaactcacagctag

SEQ ID NO: 300206 - DNA, 1536 bp, Artificial Sequence
  derived and/or modified sequence
atgggcaagaagatcaacaagctgttctgcttcaacttcctggtgcagtgcttccggggcaagagcaagcccagcaagtgccagatcaggaagaaggtgaagaaccacatcgagcggctgctggacacagaagatgagctgagtgacatccagacagacagcgtgcccagcgaggtgcgggactggctggccagcaccttcaccaggaagatgggcatgaccaagaagaagccagaggagaagcccaagttccgcagcatcgtgcatgctgtgcaggccggcatctttgtggagaggatgtacaggaagacctaccacatggtgggcctggcctacccagctgctgtgattgtgaccctgaaggatgtggacaagtggagctttgatgtgtttgccctgaatgaggccagcggggagcacagcctgaagttcatgatctatgagctgttcaccaggtatgacctgatcaaccgcttcaagatccctgtgtcctgcctgatcacctttgctgaggccctggaggtgggctacagcaagtacaagaacccctaccacaacctgattcatgctgctgatgtgacccagacagtgcactacatcatgctgcacacaggcatcatgcactggctgacagagctggagatcctggccatggtgtttgctgctgccatccatgactatgagcacacaggcaccaccaacaacttccacatccagaccaggagtgatgtggccatcctgtacaatgacagatctgtgctggagaaccaccacgtgtctgctgcctaccgcctgatgcaggaggaggagatgaacatcctgatcaacctgagcaaggatgactggagggacctgaggaacctggtgattgagatggtgctgagcacagacatgagcggccacttccagcagatcaagaacatccggaacagcctgcagcagcctgagggcatcgaccgggccaagaccatgagcctcatcctgcacgccgctgacatcagccacccagccaagtcctggaagctgcactaccgctggaccatggccctgatggaggagttcttcctgcagggcgacaaggaggccgagctgggcctgcccttcagccccctgtgtgacaggaagagcaccatggtggcccagagccagatcggcttcatcgacttcatcgtggagcccaccttcagcctgctgacagacagcacagagaagatcgtcatccccctcatcgaggaggccagcaaggccgagaccagcagctatgtggccagcagcagcaccaccatcgtgggcctgcacatcgcagatgccctgcggcgcagcaacaccaagggctccatgtctgatggcagctacagcccagactacagcctggccgctgtggacctgaagagcttcaagaacaacctggtggacatcatccagcagaacaaggagcgctggaaggagctggccgcccagggcgagagtgacctgcacaagaacagcgaggacctggtgaatgctgaggagaagcatgatgagacccacagctag

SEQ ID NO: 300207 - DNA, 1536 bp, Artificial Sequence
  derived and/or modified sequence
atgggcaagaagatcaacaagctgttctgcttcaacttcctggtgcaatgttttaggggaaagagcaagcctagcaaatgtcagattagaaaaaaagtgaaaaaccatatcgaaagacttctcgacacagaagacgaactgagcgacatccagacagatagtgtgccgtcagaggttagggattggctggctagcacctttaccagaaagatggggatgaccaagaagaagcctgaagaaaagcccaagttcaggagcatcgtgcacgcagtccaggcaggtatctttgtggagcggatgtatcgcaaaacataccacatggtgggattggcctaccccgccgccgttattgtgactctgaaagacgtagacaagtggtctttcgatgtctttgccctcaatgaagcctcaggagaacattctctgaagttcatgatctatgaactgttcacaagatacgatttaataaaccgttttaagattcctgtgtcttgtttgatcacatttgcagaggccctggaggtgggatactccaagtacaagaacccttaccataacctaatccatgctgccgacgtgacacaaacagtgcattacattatgctgcatactggaattatgcactggctgacagaactcgagatactggccatggtttttgcagccgctattcatgactatgagcatacaggcactaccaataacttccacatccagacccggtcggatgtggcaatcctgtataacgacaggagcgttctcgagaaccaccatgtgtccgcagcctacaggttgatgcaggaggaggagatgaatattctcattaacctgagtaaggatgattggcgcgacctgcggaatcttgtgattgagatggtgctgtctaccgatatgagtgggcactttcagcaaatcaaaaacattcgcaacagtctccagcagccagaaggcatagatcgagctaaaacaatgagtcttattctgcatgcggctgacatttcccaccctgctaagtcctggaagctgcactatcgctggacgatggccctgatggaggagttttttctccagggagacaaggaagcagaactgggactgccattcagtcccctttgtgacaggaagtccactatggtggcgcaatctcagattggttttatagattttatcgtagagcctacattcagcctgttaacggactcaaccgaaaaaatcgttatcccgcttatcgaagaggcgtcgaaagctgagacttccagttacgtggcctcaagcagcactaccatcgtcggcctacacatcgccgacgcactccggagaagcaacaccaaaggttctatgtctgacggaagttacagccccgattactctttggctgccgttgacctcaagagctttaaaaataacctcgtagacattattcagcagaataaggagaggtggaaggagctggccgcgcagggagagtccgatctacacaagaatagcgaggacttggtaaatgcagaagaaaaacatgatgaaacacatagttag

SEQ ID NO: 300208 - DNA, 1991 bp, Artificial Sequence
  derived and/or modified sequence
atgggcaaaaagataaacaaactattttgctttaattttctagttcagtgttttaggggtaaatcaaaaccatccaaatgtcagatcagaaagaaagttaaaaatcatatagaaagacttctggatactgaagatgagctcagtgacattcagactgactcagtcccatctgaagtccgggactggttggcttctacctttacacggaaaatggggatgacaaaaaagaaacctgaggaaaaaccaaaatttcggagcattgtgcatgctgttcaagctggaatttttgtggaaagaatgtaccgaaaaacatatcatatggttggtttggcatatccagcagctgtcatcgtaacattaaaggatgttgataaatggtctttcgatgtatttgccctaaatgaagcaagtggagagcatagtctgaagtttatgatttatgaactgtttaccagatatgatcttatcaaccgtttcaagattcctgtttcttgcctaatcacctttgcagaagctttagaagttggttacagcaagtacaaaaatccatatcacaatttgattcatgcagctgatgtcactcaaactgtgcattacataatgcttcatacaggtatcatgcactggctcactgaactggaaattttagcaatggtctttgctgctgccattcatgattatgagcatacagggacaacaaacaactttcacattcagacaaggtcagatgttgccattttgtataatgatcgctctgtccttgagaatcaccacgtgagtgcagcttatcgacttatgcaagaagaagaaatgaatatcttgataaatttatccaaagatgactggagggatcttcggaacctagtgattgaaatggttttatctacagacatgtcaggtcacttccagcaaattaaaaatataagaaacagtttgcagcagcctgaagggattgacagagccaaaaccatgtccctgattctccacgcagcagacatcagccacccagccaaatcctggaagctgcattatcggtggaccatggccctaatggaggagtttttcctgcagggagataaagaagctgaattagggcttccattttccccactttgtgatcggaagtcaaccatggtggcccagtcacaaataggtttcatcgatttcatagtagagccaacattttctcttctgacagactcaacagagaaaattgttattcctcttatagaggaagcctcaaaagccgaaacttcttcctatgtggcaagcagctcaaccaccattgtggggttacacattgctgatgcactaagacgatcaaatacaaaaggctccatgagtgatgggtcctattccccagactactcccttgcagcagtggacctgaagagtttcaagaacaacctggtggacatcattcagcagaacaaagagaggtggaaagagttagctgcacaaggtgaatctgatcttcataagaactcagaagacttagtaaatgctgaagaaaaacatgatgagacacattcataggcccgaaacaccttaaagacttctgtcattttaaacatgagaggacaatgaaatcagcatgaaaacatcctaaattctcaactttccacaaagctatggctcttctttcaacatagaattggattgggccattttaattgactcctatacaaggaattaagaagaacataaattttgagctagtaactctggccaaataaatacactcaagtttttatcagagtttttggccagtgcttctgccatttttttccctccacaatttggccttcttcaatcaagccagataaatttttgagacaaaagtcagacagtttttaatttttcttgctttgaaccctgtcataatgactgtgcaatacatgtgcagaagatgaggtattttaaaatttacttccttgcactgtcttacacagagtgctataactataaatttttcaaggtcttaaataaaa

SEQ ID NO: 300209 - DNA, 1536 bp, Artificial Sequence
  derived and/or modified sequence
atgggcaaaaaaatcaataaactgttctgcttcaatttcctagtgcagtgctttagaggcaagagtaaaccttctaaatgccaaatccggaaaaaggtcaaaaaccacatcgaaagattgcttgacaccgaggatgaactaagcgacatacagacagattctgttccaagcgaagtcagggactggctcgcttctacattcacaaggaagatgggaatgacaaagaagaaacccgaggagaagccaaagtttagaagtatcgtgcacgctgtccaggctggaatcttcgtggaacggatgtatcgaaagacttatcacatggtgggtttagcttaccccgcagccgtgattgtaacgctgaaggacgtggacaagtggagctttgatgtgtttgcgctgaatgaggcctctggggagcactcattgaagtttatgatttatgaactatttaccaggtacgacctgattaaccgcttcaagattcctgtttcctgcctcattactttcgccgaggctctggaagttgggtactctaagtacaaaaacccttatcacaacctaatccacgctgccgatgtaacacaaactgtgcactatattatgctgcacactggcatcatgcattggctcaccgagcttgaaatcctggcaatggttttcgctgccgctatacacgattacgagcacaccggcactaccaacaacttccacattcagacccggtcggacgtagccatcttatataacgaccgcagtgtcctggagaatcaccacgtctccgctgcctaccgcctcatgcaggaggaagagatgaatatcctaataaacctgtccaaagacgattggcgtgacctccggaatctcgtaatagagatggtgctcagcactgacatgtcaggacatttccagcagataaagaacattaggaactctctgcagcagcctgagggcatcgaccgggctaagacgatgagcctgatactccatgcagcggatataagccacccagcaaaatcgtggaagctgcattacaggtggaccatggcccttatggaggagttttttctccagggcgacaaagaagccgagctcggcctgccgttcagcccgctgtgtgacaggaagtcaaccatggtcgcccagagtcagatcggatttatagacttcatcgtcgaacctacattctctctgctgacagattcgacagaaaagatcgtgattccactgattgaagaggcgtcaaaagcggagacatcttcctacgtcgcctctagcagcactacgatcgtgggcctccatattgctgatgctctaagaaggtctaacaccaagggcagtatgtccgacggttcgtattcccccgactatagcctcgctgcggtcgatttgaagagcttcaagaataaccttgtggatatcattcagcagaacaaggagcgctggaaggaactggccgcacagggcgaatcagacttgcataagaacagtgaggacttggtcaatgctgaagagaagcacgatgagactcactcttag

SEQ ID NO: 300210 - DNA, 1536 bp, Artificial Sequence
  derived and/or modified sequence
atgggcaagaagatcaacaagctgttctgcttcaacttcctggtgcagtgcttcagaggcaagagcaagcccagcaagtgccagatcagaaagaaggtgaagaaccacatcgagagactgctggacaccgaggacgagctgagcgacatccagaccgacagcgtgcccagcgaggtgagagactggctggccagcaccttcaccagaaagatgggcatgaccaagaagaagcccgaggagaagcccaagttcagaagcatcgtgcacgccgtgcaggccggcatcttcgtggagagaatgtacagaaagacctaccacatggtgggcctggcctaccccgccgccgtgatcgtgaccctgaaggacgtggacaagtggagcttcgacgtgttcgccctgaacgaggccagcggcgagcacagcctgaagttcatgatctacgagctgttcaccagatacgacctgatcaacagattcaagatccccgtgagctgcctgatcaccttcgccgaggccctggaggtgggctacagcaagtacaagaacccctaccacaacctgatccacgccgccgacgtgacccagaccgtgcactacatcatgctgcacaccggcatcatgcactggctgaccgagctggagatcctggccatggtgttcgccgccgccatccacgactacgagcacaccggcaccaccaacaacttccacatccagaccagaagcgacgtggccatcctgtacaacgacagaagcgtgctggagaaccaccacgtgagcgccgcctacagactgatgcaggaggaggagatgaacatcctgatcaacctgagcaaggacgactggagagacctgagaaacctggtgatcgagatggtgctgagcaccgacatgagcggccacttccagcagatcaagaacatcagaaacagcctgcagcagcccgagggcatcgacagagccaagaccatgagcctgatcctgcacgccgccgacatcagccaccccgccaagagctggaagctgcactacagatggaccatggccctgatggaggagttcttcctgcagggcgacaaggaggccgagctgggcctgcccttcagccccctgtgcgacagaaagagcaccatggtggcccagagccagatcggcttcatcgacttcatcgtggagcccaccttcagcctgctgaccgacagcaccgagaagatcgtgatccccctgatcgaggaggccagcaaggccgagaccagcagctacgtggccagcagcagcaccaccatcgtgggcctgcacatcgccgacgccctgagaagaagcaacaccaagggcagcatgagcgacggcagctacagccccgactacagcctggccgccgtggacctgaagagcttcaagaacaacctggtggacatcatccagcagaacaaggagagatggaaggagctggccgcccagggcgagagcgacctgcacaagaacagcgaggacctggtgaacgccgaggagaagcacgacgagacccacagctag

SEQ ID NO: 300211 - DNA, 207 bp, Artificial Sequence
  derived and/or modified sequence
atgaatagagccttttcccgaaaaaaggacaagacctggatgcacacacccgaagctctgagtaagcatttcatcccctacaatgctaagttcctgggatctacagaagttgagcagcccaaagggacggaggtcgttcgggatgccgtaagaaagcttaaattcgcacgccatataaagaagagcgaggggcagaaaattccctag

SEQ ID NO: 300212 - DNA, 583 bp, Artificial Sequence
  derived and/or modified sequence
gagtccagcgccgtgttggcgtagagaaactttccctctcggcctcggagacggcgccccggccgtgccggagtggagatcgccaggctcggaggaaccggcagctctccacgcccctgcccgaagcctgacccgactgcctctctcagtgaggtacggagatttatctaggctcttccctggctgcgaacccaggctccctccagttatttatgattccatctgatatacataggagagaaactgatagaagaattctgatggcaactgtatgatagaagctatataaagtcaagtgtccattttctttcaactatatttgagcatacccaggatttaagtcgtggaactgaacatttatttggctgatcctcatcatgaaccgtgcttttagcaggaagaaagacaaaacatggatgcatacacctgaagctttatcaaaacatttcattccctataatgcaaagtttcttggcagtacagaagtggaacagccaaaaggaacagaagttgtgagagatgctgtaaggaaactaaagtttgcaagacatatcaagaaatctgaaggccagaaaattcctaa

SEQ ID NO: 300213 - DNA, 207 bp, Artificial Sequence
  derived and/or modified sequence
atgaacagagccttcagcaggaagaaggacaagacctggatgcacaccccagaggccctgagcaagcacttcatcccctacaatgccaagttcctgggcagcacagaggtggagcagcccaagggcacagaggtggtgagagatgctgtgaggaagctgaagtttgcccggcacatcaagaagtctgagggccagaagatcccctag

SEQ ID NO: 300214 - DNA, 207 bp, Artificial Sequence
  derived and/or modified sequence
atgaaccgggccttcagccggaagaaggacaagacctggatgcacactcctgaggccttgtccaagcattttataccctacaacgccaaattcctggggtcaactgaggtcgagcagccaaagggaacagaggtggtgcgcgacgccgtgaggaaactcaagttcgcccgacacatcaagaaatcagagggccagaaaatcccttag

SEQ ID NO: 300215 - DNA, 207 bp, Artificial Sequence
  derived and/or modified sequence
atgaatcgagctttctcacgaaagaaagataaaacgtggatgcacacccccgaggcactgagcaagcacttcatcccctataatgcgaagttcctgggttcaaccgaagtagagcaaccaaaggggaccgaagtggtgagagacgccgtgcgaaagctgaaatttgccaggcacattaagaaatcggaagggcaaaagataccatag

SEQ ID NO: 300216 - DNA, 207 bp, Artificial Sequence
  derived and/or modified sequence
atgaacagagccttcagcagaaagaaggacaagacctggatgcacacccccgaggccctgagcaagcacttcatcccctacaacgccaagttcctgggcagcaccgaggtggagcagcccaagggcaccgaggtggtgagagacgccgtgagaaagctgaagttcgccagacacatcaagaagagcgagggccagaagatcccctag

SEQ ID NO: 300217 - DNA, 1083 bp, Artificial Sequence
  derived and/or modified sequence
atgttcctgagacaggagctgcccgtgagactggccaacatcatgaaggagatcagcctgctgcccgacaacctgctgagaacccccagcgtgcagctggtgcagagctggtacatccagagcctgcaggagctgctggacttcaaggacaagagcgccgaggacgccaaggccatctacgacttcaccgacaccgtgatcagaatcagaaacagacacaacgacgtgatccccaccatggcccagggcgtgatcgagtacaaggagagcttcggcgtggaccccgtgaccagccagaacgtgcagtacttcctggacagattctacatgagcagaatcagcatcagaatgctgctgaaccagcacagcctgctgttcggcggcaagggcaagggcagccccagccacagaaagcacatcggcagcatcaaccccaactgcaacgtgctggaggtgatcaaggacggctacgagaacgccagaagactgtgcgacctgtactacatcaacagccccgagctggagctggaggagctgaacgccaagagccccggccagcccatccaggtggtgtacgtgcccagccacctgtaccacatggtgttcgagctgttcaagaacgccatgagagccaccatggagcaccacgccaacagaggcgtgtacccccccatccaggtgcacgtgaccctgggcaacgaggacctgaccgtgaagatgagcgacagaggcggcggcgtgcccctgagaaagatcgacagactgttcaactacatgtacagcaccgcccccagacccagagtggagaccagcagagccgtgcccctggccggcttcggctacggcctgcccatcagcagactgtacgcccagtacttccagggcgacctgaagctgtacagcctggagggctacggcaccgacgccgtgatctacatcaaggccctgagcaccgacagcatcgagagactgcccgtgtacaacaaggccgcctggaagcactacaacaccaaccacgaggccgacgactggtgcgtgcccagcagagagcccaaggacatgaccaccttcagaagcgcctag

SEQ ID NO: 300218 - DNA, 846 bp, Artificial Sequence
  derived and/or modified sequence
atggcccagggcgtgatcgagtacaaggagagcttcggcgtggaccccgtgaccagccagaacgtgcagtacttcctggacagattctacatgagcagaatcagcatcagaatgctgctgaaccagcacagcctgctgttcggcggcaagggcaagggcagccccagccacagaaagcacatcggcagcatcaaccccaactgcaacgtgctggaggtgatcaaggacggctacgagaacgccagaagactgtgcgacctgtactacatcaacagccccgagctggagctggaggagctgaacgccaagagccccggccagcccatccaggtggtgtacgtgcccagccacctgtaccacatggtgttcgagctgttcaagaacgccatgagagccaccatggagcaccacgccaacagaggcgtgtacccccccatccaggtgcacgtgaccctgggcaacgaggacctgaccgtgaagatgagcgacagaggcggcggcgtgcccctgagaaagatcgacagactgttcaactacatgtacagcaccgcccccagacccagagtggagaccagcagagccgtgcccctggccggcttcggctacggcctgcccatcagcagactgtacgcccagtacttccagggcgacctgaagctgtacagcctggagggctacggcaccgacgccgtgatctacatcaaggccctgagcaccgacagcatcgagagactgcccgtgtacaacaaggccgcctggaagcactacaacaccaaccacgaggccgacgactggtgcgtgcccagcagagagcccaaggacatgaccaccttcagaagcgcctag

SEQ ID NO: 300219 - DNA, 1083 bp, Artificial Sequence
  derived and/or modified sequence
atgttcctcagacaggagctgccagtgcgactggccaacattatgaaggagatctcactgctgcctgacaatttgctgcgcactccgagcgtccagctggtgcagtcctggtacatacagagcctgcaggagctgcttgatttcaaagataagagcgcagaggacgctaaagccatttacgactttaccgatactgtcatccgtatacgaaataggcataatgatgtgattcccactatggctcagggcgtgatcgaatataaggaatcttttggagtggaccccgttacctcacagaacgtacaatacttcttagaccgcttctacatgtccaggatctccatcaggatgcttctcaatcagcattcactcctgttcggtggcaaaggcaaggggtccccaagtcaccgaaagcatatcggatccataaatcccaattgtaatgtgctagaagtcatcaaggacggctatgagaacgctcggaggctctgtgacttatattacatcaatagtcctgaactggagctcgaggaactgaatgccaaaagtccagggcagcccatccaggtggtgtacgttccaagtcatctttaccatatggtgtttgagctgtttaagaacgcgatgcgagctactatggagcatcacgccaatagaggtgtgtatcccccaatccaggtgcacgtgactcttggcaacgaagacctgacagtgaagatgtccgatcgaggtgggggtgtccctctgagaaagatcgacaggctgttcaattacatgtatagcacagctccaaggccgagggtggaaacaagccgagcagtgcccctagctggattcgggtacgggctccccatttcccgcctgtacgcccaatattttcagggcgatctcaaactatactccctggaggggtacggcaccgatgcagtcatctatatcaaggcccttagcaccgactctatcgaacggctccctgtttacaacaaggccgcctggaagcattataacaccaaccacgaagccgacgactggtgcgtcccatctagagagcctaaagatatgactacatttcggtcagcgtag

SEQ ID NO: 300220 - DNA, 846 bp, Artificial Sequence
  derived and/or modified sequence
atggcacagggagtcatcgagtataaggagagctttggcgtcgatcctgtcacttctcagaacgtgcagtacttcctggataggttttatatgagccggatttcaatccggatgctcctcaatcagcatagcttgttgttcggcggaaagggaaagggcagtccctctcaccgaaaacacattggctccatcaaccccaactgtaatgtcctggaagtgatcaaggatgggtatgaaaacgcccgcagactttgtgatctgtattacatcaactcgccagagctggaattagaggagctgaacgctaagagccccggccaaccaatacaagtggtgtacgtgccgagtcatctctaccacatggtctttgaactttttaagaatgccatgcgtgcaactatggaacaccacgcaaatcggggtgtatatccaccgattcaggttcacgtcaccctgggcaacgaggacctgacagtcaaaatgtccgatcgggggggaggagtgcccctccgaaagatcgaccgactgtttaattatatgtactctactgctcctcgcccccgagtggaaactagccgggcagtgcctctggcaggcttcggctacggactccctatttcaaggctgtatgcccagtattttcagggagaccttaaactttacagtttagaggggtacggcactgatgccgtgatttatattaaggccctctctaccgattctatcgagcgactgcctgtctataacaaggccgcttggaaacattataacaccaatcatgaggcagacgattggtgcgtgcctagtcgggaacctaaagacatgacaacttttcgtagcgcatag

SEQ ID NO: 300221 - DNA, 1083 bp, Artificial Sequence
  derived and/or modified sequence
atgttcctgcggcaggagctgcctgtgcggctggccaacatcatgaaggagatcagcctgctgcctgacaacctgctgcggacccccagcgtgcagctggtgcagagctggtacatccagagcctgcaggagctgctggacttcaaggacaagtctgcagaagatgccaaggccatctatgacttcacagacaccgtcatccgcatccggaacagacacaatgatgtgatccccaccatggcccagggcgtgattgagtacaaggagagctttggagtggaccctgtgaccagccagaatgtgcagtacttcctggaccgcttctacatgagccgcatcagcatccgcatgctgctgaaccagcacagcctgctgtttggaggcaagggcaagggcagccccagccacaggaagcacatcggcagcatcaaccccaactgcaatgtgctggaggtgatcaaggatggctatgaaaatgcccggcggctgtgtgacctgtactacatcaacagccctgagctggagctggaggagctgaatgccaagagccctggccagcccatccaggtggtgtatgtgcccagccacctgtaccacatggtgtttgagctgttcaagaatgccatgagggccaccatggagcaccacgccaacagaggagtgtacccacccatccaggtgcacgtgaccctgggcaatgaagacctgactgtgaagatgtctgaccggggcggcggcgtgcccctgaggaagattgacaggctcttcaactacatgtacagcacagccccccggccccgggtggagaccagcagagctgtgcccctggccggcttcggctacggcctgcccatcagccggctgtatgcccagtacttccagggcgacctgaagctgtacagcctggagggctatggaacagatgctgtgatctacatcaaggccctgagcacagacagcattgagcggctgcctgtgtacaacaaggccgcctggaagcactacaacaccaaccatgaagcagatgactggtgtgtgcccagccgggagcccaaggacatgaccaccttccgcagcgcctag

SEQ ID NO: 300222 - DNA, 846 bp, Artificial Sequence
  derived and/or modified sequence
atggcccagggcgtcatcgagtacaaggagagctttggagtggaccctgtgaccagccagaatgtgcagtacttcctggaccgcttctacatgagccgcatcagcatccgcatgctgctgaaccagcacagcctgctgtttggaggcaagggcaagggcagccccagccacaggaagcacatcggcagcatcaaccccaactgcaatgtgctggaggtgatcaaggatggctatgaaaatgcccggcggctgtgtgacctgtactacatcaacagccctgagctggagctggaggagctgaatgccaagagccctggccagcccatccaggtggtgtatgtgcccagccacctgtaccacatggtgtttgagctgttcaagaatgccatgagggccaccatggagcaccacgccaacagaggagtgtacccacccatccaggtgcacgtgaccctgggcaatgaagacctgactgtgaagatgtctgacagaggaggaggagtgcccctgaggaagattgacaggctcttcaactacatgtacagcacagccccccggccccgggtggagaccagcagagctgtgcccctggccggcttcggctacggcctgcccatcagccggctgtatgcccagtacttccagggcgacctgaagctgtacagcctggagggctacggcacagatgctgtgatctacatcaaggccctgagcacagacagcattgaaaggctgcctgtgtacaacaaggccgcctggaagcactacaacaccaaccacgaggctgatgactggtgtgtgcccagccgggagcccaaggacatgaccaccttccgcagcgcctag

SEQ ID NO: 300223 - DNA, 1083 bp, Artificial Sequence
  derived and/or modified sequence
atgttcctgcggcaggagctgcccgtgcggctggccaacatcatgaaagagataagtctgctgcctgataatcttctgcgcacaccctcggttcagctggtccagagttggtacattcagtcactgcaggaactcctggacttcaaagataagtccgcagaagatgctaaagcaatctatgacttcaccgatactgtgattaggatccggaaccgccacaatgacgttattccaacgatggcccagggtgtgatcgagtataaagagagcttcggcgtggatcctgtgaccagccagaatgtgcagtatttcctcgatcggttctacatgtcgagaatatccatccgcatgttgctaaaccaacattctctcctcttcggaggtaaaggcaaaggttcaccctcacatcgcaagcacattggctctattaaccctaattgcaatgttctggaagtgatcaaagatggatacgaaaacgcaaggagactctgtgatttatactatattaatagtcccgagttagaacttgaggaattaaatgcaaagtcccctgggcaaccaattcaagtcgtatacgtcccatctcacttgtaccatatggtgttcgagttgttcaagaatgccatgagagcaacaatggaacatcacgccaatcgcggtgtttaccccccaatccaggttcatgtgactctgggaaacgaggacctcacagtcaaaatgagcgacaggggaggaggggtccctctacgaaaaatagatcggctgtttaattacatgtactctacagctcctagaccaagggtcgagaccagccgggccgtgccgttagctggtttcggatacggcctacccatatcacgtctgtacgcacaatacttccagggcgatctgaagctgtactcactggagggttatggcacagatgcagtcatctatatcaaggctctttctaccgactctatcgaacgccttcccgtttataataaggccgcttggaagcactacaatactaaccacgaggccgatgactggtgtgtcccgagtagggagccaaaggacatgacaacatttcgaagcgcatag

SEQ ID NO: 300224 - DNA, 846 bp, Artificial Sequence
  derived and/or modified sequence
atggcccagggcgtgatcgagtacaaggagagcttcggcgtggaccccgtaacttcccaaaatgtgcagtactttcttgacaggttttatatgtccagaatctctattaggatgcttctcaaccaacacagtttgctttttggaggcaagggcaaagggtccccctcccacaggaagcacattggctcaattaatcccaattgtaacgtattggaggtgatcaaagacggctacgaaaacgcccggcgcctctgtgatctctactatatcaattcaccagaattagagctggaagagttaaatgctaagtccccaggtcagcctatccaggttgtctatgtgccgagtcatctgtaccacatggtcttcgagctgttcaaaaacgccatgcgggccaccatggaacaccacgccaaccggggcgtctatcctccaattcaggtgcacgtcactcttggtaatgaagatctgactgttaagatgtccgataggggaggaggtgtgcccctgaggaaaatcgataggctcttcaattacatgtacagcacggctcccagacctcgggtggagacaagtcgggcagtgccactagctggctttggttatggcttacccataagccgcttgtacgcacaatacttccagggagacctgaagctgtacagcttagaggggtacgggacggacgccgtgatctacatcaaggcgcttagcaccgacagcattgaacgcctgccagtatacaacaaggcagcttggaaacactacaacacgaatcatgaggccgacgattggtgcgtaccgagtcgcgaacccaaagatatgactacattccgctccgcatag

SEQ ID NO: 300225 - DNA, 1083 bp, Artificial Sequence
  derived and/or modified sequence
atgtttctaaggcaggaactgcctgtccgcctggcaaatatcatgaaggaaatttcccttctccccgacaaccttctcagaactccaagtgtccaactcgtgcagtcctggtacatccagagtctgcaagagctgctggacttcaaagataaatctgcagaggatgccaaagcgatctacgattttacagacaccgtgatacgcataagaaaccggcataatgatgtgatcccaactatggcacagggagtgatcgagtacaaggagagttttggagtggatcccgtcacatctcagaacgtgcagtatttcctcgataggttctatatgtccagaatcagtatcagaatgctcttgaatcaacacagcctattattcgggggtaagggtaaaggctcgccctcgcatagaaagcacatcgggtcgattaaccctaactgcaatgttctcgaggttatcaaagatggttatgagaatgcaagacgcttatgcgacctgtactatatcaactcccccgagctggaacttgaagagctcaatgccaagagccccggtcagccaattcaagtggtatacgtgccgtcccatctctatcacatggttttcgagttgttcaagaacgctatgcgcgcaacaatggagcaccacgcaaatcgtggagtatatccgcctatccaagtgcatgtaacgctgggcaacgaagatctgaccgtgaagatgtccgacagaggaggaggtgtccccctgagaaagatcgaccgactgttcaactacatgtattctaccgctccaagacccagagtcgaaacatcacgcgcagtgcctcttgcaggattcggctacggcctccctatcagtagactttatgcccagtattttcagggggatctgaaactgtattctttggagggctacggtactgacgcagtcatctacatcaaggccctgagcaccgactcaatcgaacggctccccgtctataacaaagcggcttggaagcattacaacacaaaccacgaggctgacgattggtgtgtgccttcaagggagccaaaggatatgaccacattcagatccgcctag

SEQ ID NO: 300226 - DNA, 846 bp, Artificial Sequence
  derived and/or modified sequence
atggcccagggagttatcgagtacaaggagtcttttggagttgatccggttactagtcagaatgtgcagtactttctagacagattctatatgtccagaataagtatccgaatgcttctgaaccagcatagtctgctgtttggaggtaaaggcaaaggatccccttctcaccggaagcacattgggtctataaacccaaattgcaatgtgctcgaagtgatcaaagacgggtacgagaatgccagaaggttgtgtgacctctattacatcaattcccctgagctggaactcgaagaactcaatgctaagagccccggacaacccattcaggtggtctacgtccccagccatctttatcacatggtgtttgagctctttaagaacgcaatgcgcgcaaccatggaacaccacgcgaaccggggtgtataccctccgatacaggtccatgtgaccttggggaacgaggatctgaccgtgaaaatgtccgaccggggaggcggagtccctttgcgcaagatcgatcgtctgtttaattatatgtactccacggccccaaggccaagggtggagacatcaagagctgtgccactggccggattcggctatggtctgcctatttcccgactgtatgcacaatactttcagggagatttaaagctctacagccttgagggatacggaaccgacgccgtgatctacattaaggctctcagtacagattctatcgaacggctgcctgtctacaacaaggcggcttggaagcattacaacacaaatcatgaggctgacgactggtgtgttccctccagagaacctaaggacatgaccactttcagatcagcttag

SEQ ID NO: 300227 - DNA, 1338 bp, Artificial Sequence
  derived and/or modified sequence
gcgctcgcagcacgacaccgcggtgtgtgcaagcggaacgccgccctgtccttgagccttttggctgagattgggagggcagaggaagcaggaaggatcagtgaatgcttgtgaaaagacctcatttatgtttctgcggcaagagttgcctgtcagactggcaaatataatgaaagaaataagtctccttccagataatcttctcaggacaccatccgttcaattggtacaaagctggtatatccagagtcttcaggagcttcttgattttaaggacaaaagtgctgaggatgctaaagctatttatgaggaataggtccaaaacaggcaggctttattggctcattcatcttgattccttgcagagcagagcaggtgttctctagagctttacagatactgtgatacggatcagaaaccgacacaatgatgtcattcccacaatggcccagggtgtgattgaatacaaggagagctttggggtggatcctgtcaccagccagaatgttcagtactttttggatcgattctacatgagtcgcatttcaattagaatgttactcaatcagcactctttattgtttggtggaaaaggcaaaggaagtccatctcatcgaaaacacattggaagcataaatccaaactgcaatgtacttgaagttattaaagatggctatgaaaatgctaggcgtctgtgtgatttgtattatattaactctcccgaactagaacttgaagaactaaatgcaaaatcaccaggacagccaatacaagtggtttatgtaccatcccatctctatcacatggtgtttgaacttttcaagaatgcaatgagagccactatggaacaccatgccaacagaggtgtttacccccctattcaagttcatgtcacgctgggtaatgaggatttgactgtgaagatgagtgaccgaggaggtggcgttcctttgaggaaaattgacagacttttcaactacatgtattcaactgcaccaagacctcgtgttgagacctcccgcgcagtgcctctggctggttttggttatggattgcccatatcacgtctttacgcacaatacttccaaggagacctgaagctgtattccctagagggttacgggacagatgcagttatctacattaaggctctgtcaacagactcaatagaaagactcccagtgtataacaaagctgcctggaagcattacaacaccaaccacgaggctgatgactggtgcgtccccagcagagaacccaaagacatgacgacgttccgcagtgcctagacacacttgggacatcggaaaatccaaatgtggcttttgtattaaattt

SEQ ID NO: 300228 - protein, 782 aa, Artificial Sequence [sequence omitted]

SEQ ID NO: 300229 - DNA, 297 bp, Artificial Sequence
  derived and/or modified sequence
atgcaggtgcccctgacccccctgtgggagctgggcctgggccgggtcgtggagaacgcggacgctttggccattgcaattgtgttgaacaaccagtggagccttgtcccaaaccgaggcatcctgtatttcctgcctgtaagtatgaaactgggcggcgatcgggtgagctgtcagtttcttaccgccactagccatcaatggcttcactccgtaagcttaacccaacatatggcacaagaatgtctcccctcagtctctgtgtccaccgccgctatcccccgatgctggtcctag

SEQ ID NO: 300230 - DNA, 297 bp, Artificial Sequence
  derived and/or modified sequence
atgcaagtcccccttacacctctttgggagttggggttggggcgagttgttgaaaatgccgatgcgcttgctatcgctattgtgcttaacaaccagtggtctctcgtgccgaatcggggaatactttacttcctgcccgtatccatgaagctcgggggtgaccgcgtgtcctgtcagttccttaccgccacctcacaccaatggctacattctgtgagcttaacacagcatatggctcaagaatgtctcccctccgtaagcgtcagcactgcagccatacctcgatgctggtcttag

SEQ ID NO: 300231 - protein, 756 aa, Artificial Sequence
  derived and/or modified sequence
MSFGILKPDLRIVFVHNKAVIWQKSRVSDHKMALMSVLGTAVMNNMESFQYHSEESQIYLSGFLPKCDADHSFTSLSTPERSFIFINSRPVHQKDILKLIRHHYNLKCLKESTRLYPVFFLKIDVPTADVDVNLTPDKSQVLLQNKESVLIALENLMTTCYGPLPSTNSYENNKTDVSAADIVLSKTAETDVLFNKVESSGKNYSNVDTSVIPFQNDMHNDESGKNTDDCLNHQISIGDFGYGHCSSEISNIDKNTKNAFQDISMSNVSWENSQTEYSKTCFISSVKHTQSENGNKDHIDESGENEEEAGLENSSEISADEWSRGNILKNSVGENIEPVKILVPEKSLPCKVSNNNYPIPEQMNLNEDSCNKKSNVIDNKSGKVTAYDLLSNRVIKKPMSASALFVQDHRPQFLIENPKTSLEDATLQIEELWKTLSEEEKLKYEEKATKDLERYNSQMKRAIEQESQMSLKDGRKKIKPTSAWNLAQKHKLKTSLSNQPKLDELLQSQIEKRRSQNIKMVQIPFSMKNLKINFKKQNKVDLEEKDEPCLIHNLRFPDAWLMTSKTEVMLLNPYRVEEALLFKRLLENHKLPAEPLEKPIMLTESLFNGSHYLDVLYKMTADDQRYSGSTYLSDPRLTANGFKIKLIPGVSITENYLEIEGMANCLPFYGVADLKEILNAILNRNAKEVYECRPRKVISYLEGEAVRLSRQLPMYLSKEDIQDIIYRMKHQFGNEIKECVHGRPFFHHLTYLPETT

SEQ ID NO: 300232 - DNA, 222 bp, Artificial Sequence
  derived and/or modified sequence
atgaagcagctgcccgccgccaccgtgagactgctgagcagcagccagatcatcaccagcgtggtgagcgtggtgaaggagctgatcgagaacagcctggacgccggcgccaccagcgtggacgtgaagctggagaactacggcttcgacaagatcgaggtgagagacaacggcgagggcatcaaggccgtggacgcccccgtgatggccatgaagtactag

SEQ ID NO: 300233 - DNA, 585 bp, Artificial Sequence
  derived and/or modified sequence
atgaagcagctgcccgccgccaccgtgagactgctgagcagcagccagatcatcaccagcgtggtgagcgtggtgaaggagctgatcgagaacagcctggacgccggcgccaccagcgtggacgtgaagctggagaactacggcttcgacaagatcgaggtgagagacaacggcgagggcatcaaggccgtggacgcccccgtgatggccatgaagtactacaccagcaagatcaacagccacgaggacctggagaacctgaccacctacggcttcagaggcgaggccctgggcagcatctgctgcatcgccgaggtgctgatcaccaccagaaccgccgccgacaacttcagcacccagtacgtgctggacggcagcggccacatcctgagccagaagcccagccacctgggccagggcaccaccgtgaccgccctgagactgttcaagaacctgcccgtgagaaagcagttctacagcaccgccaagaagtgcaaggacgagatcaagaagatccaggacctgctgatgagcttcggcatcctgaagcccgacctgagaatcgtgttcgtgcacaacaagtag

SEQ ID NO: 300234 - DNA, 222 bp, Artificial Sequence
  derived and/or modified sequence
atgaaacagctgcccgctgcaaccgtgaggttattgagctcttcccagatcattacttcagtcgtcagcgttgtgaaggagctgatcgaaaattctctggatgctggagctactagcgtagatgtgaagctggagaattatgggtttgacaaaattgaagtgcgtgataacggagaagggatcaaggctgtagacgcgcctgtgatggctatgaagtattag

SEQ ID NO: 300235 - DNA, 585 bp, Artificial Sequence
  derived and/or modified sequence
atgaagcagcttcctgctgccaccgtccgcttactgtctagctcgcagataattacaagcgtggtgtctgtagtgaaggaactgatcgagaacagcttagatgccggcgcaacctccgtagatgtgaagctggagaactatggctttgataaaattgaagtaagggataatggggaaggtattaaggctgtggacgctccagtcatggccatgaagtattatacctcgaagataaattctcatgaagatctggagaatctgaccacttacggatttcggggtgaggctctgggctccatttgttgcattgcagaggttctgattactacaagaaccgccgctgataacttttcgacacaatatgtccttgacggctctggacacatactgtcacagaaaccctcccacctgggccagggtactacagtgactgcactgcggttattcaagaatctacctgttagaaagcagttttacagcaccgccaaaaagtgtaaggacgaaatcaagaagattcaggacctcctgatgagttttgggattctgaaacccgatctgaggattgtctttgtgcataataagtag

SEQ ID NO: 300236 - DNA, 222 bp, Artificial Sequence
  derived and/or modified sequence
atgaagcagctgcctgctgccaccgtgcggctgctgagcagcagccagatcatcacctctgtggtgtctgtggtgaaggagctgattgagaacagcctggatgctggggccacctctgtggatgtgaagctggagaactacggctttgacaagattgaggtgcgggacaatggagagggcatcaaggctgtggatgcccctgtgatggccatgaagtactag

SEQ ID NO: 300237 - DNA, 585 bp, Artificial Sequence
  derived and/or modified sequence
atgaagcagctgcctgctgccaccgtgcggctgctgagcagcagccagatcatcacctctgtggtgtctgtggtgaaggagctgattgagaacagcctggatgctggggccacctctgtggatgtgaagctggagaactacggctttgacaagattgaggtgcgggacaatggagagggcatcaaggctgtggatgcccctgtgatggccatgaagtactacaccagcaagatcaacagccatgaggacctggagaacctgaccacctacggcttccggggggaggccctgggcagcatctgctgcatcgccgaggtgctgatcaccaccaggacagctgctgacaacttcagcacccagtatgtgctggatggcagcggccacatcctgagccagaagcccagccacctgggccagggcaccaccgtgacagccctgcggctcttcaagaacctgcctgtgaggaagcagttctacagcacagccaagaagtgcaaggatgagatcaagaagatccaggacctgctgatgagctttggcatcctgaagccagacctgcgcatcgtgtttgtgcacaacaagtag

SEQ ID NO: 300238 - DNA, 222 bp, Artificial Sequence
  derived and/or modified sequence
atgaagcagctgcccgccgccaccgtgcggctgctgagcagcagccagattataaccagcgtcgtcagcgtcgtaaaagaactgatagagaatagtctcgacgcaggtgcgaccagtgtagacgtgaagctcgaaaactacggttttgacaaaattgaagtgcgggacaatggagaggggatcaaagctgtggacgcgcccgtgatggcaatgaaatattag

SEQ ID NO: 300239 - DNA, 585 bp, Artificial Sequence
  derived and/or modified sequence
atgaagcagctgcccgccgccaccgtgcggctgctgagcagcagccagataattacttccgttgtgtctgtcgtcaaggagctcattgagaattccctagatgcaggcgcgacatcagttgacgtaaagcttgaaaattacggctttgacaagatcgaagttcgcgacaacggcgaggggatcaaggccgtggacgccccagtgatggctatgaaatactacacctcaaaaatcaattcccacgaggacctggaaaacctcacaacctatggctttcgaggagaggcactgggctcaatttgttgcatcgctgaagtgctgatcactaccagaactgcagccgataatttcagcacacagtacgtactggatggttctgggcacattctgtcccaaaaaccttctcacctaggacagggaacaacagttactgctctccggttatttaaaaatctgcccgtgagaaaacagttttattccacagcaaaaaaatgcaaagatgaaatcaagaagatccaggatctgctgatgagctttgggatcctgaagcctgatctgcgcatcgtgttcgtacataataaatag

SEQ ID NO: 300240 - DNA, 222 bp, Artificial Sequence
  derived and/or modified sequence
atgaaacagctgcccgcagcaaccgtgagactgctttcgagcagccagattataacatccgtggtaagcgtggtgaaggagttgatcgagaacagcctcgacgcaggtgccacaagcgtagatgtgaaacttgagaactacgggttcgacaagatcgaggtgagggacaatggggaaggcatcaaggccgttgacgcccctgtcatggctatgaagtactag

SEQ ID NO: 300241 - DNA, 585 bp, Artificial Sequence
  derived and/or modified sequence
atgaagcagctgcctgcagcaactgtacgcttattaagctctagccaaatcatcaccagcgtggtctctgtcgtcaaggagctgatcgaaaactctcttgacgctggagctaccagtgtggatgtgaagctcgagaattacggtttcgataaaatagaggtgagagataatggtgaagggattaaagctgtggatgcccctgtaatggccatgaagtattatactagcaagatcaacagccacgaggatttagagaatctaacgacgtatggattccggggtgaggctctgggcagcatctgctgtattgccgaagtactgatcaccacaagaactgcagctgacaatttctctacccagtacgtcctagacgggtcaggccacatcctcagccagaaaccttctcacctgggacaggggacgactgtgaccgcactgcggctgtttaaaaacttaccagtccgcaagcagttctattccacagccaaaaagtgtaaggacgaaattaaaaaaatccaagatctgctcatgagcttcggcattctgaaacccgacctgcggattgtgttcgtacacaacaagtag

SEQ ID NO: 300242 - DNA, 331 bp, Artificial Sequence
  derived and/or modified sequence
gatctattttcatctgtcattattattgccatttgtcctgttggtcaggaatgcttaacaattcttacaagttgcatttttatcttctagctgctctgttaaaagcgaaaatgaaacaattgcctgcggcaacagttcgactcctttcaagttctcagatcatcacttcggtggtcagtgttgtaaaagagcttattgaaaactccttggatgctggtgccacaagcgtagatgttaaactggagaactatggatttgataaaattgaggtgcgagataacggggagggtatcaaggctgttgatgcacctgtaatggcaatgaagtacta

SEQ ID NO: 300243 - DNA, 831 bp, Artificial Sequence
  derived and/or modified sequence
ggctgcttgcggctagtggatggtaattgcctgcctcgcgctagcaggaaggtagtgtggtgtgactaacgggtatttattatatcctcgatggctcgagggccccgtcccctctactcgtcctggtccgggcgcgaacgctatagggcagctaagggcgctccccgcggggcgggaagcgaagccgggcttgcgggcgcgcacacgtggaacgcgttttctgagcagctgctctgttaaaagcgaaaatgaaacaattgcctgcggcaacagttcgactcctttcaagttctcagatcatcacttcggtggtcagtgttgtaaaagagcttattgaaaactccttggatgctggtgccacaagcgtagatgttaaactggagaactatggatttgataaaattgaggtgcgagataacggggagggtatcaaggctgttgatgcacctgtaatggcaatgaagtactacacctcaaaaataaatagtcatgaagatcttgaaaatttgacaacttacggttttcgtggagaagccttggggtcaatttgttgtatagctgaggttttaattacaacaagaacggctgctgataattttagcacccagtatgttttagatggcagtggccacatactttctcagaaaccttcacatcttggtcaaggtacaactgtaactgctttaagattatttaagaatctacctgtaagaaagcagttttactcaactgcaaaaaaatgtaaagatgaaataaaaaagatccaagatctcctcatgagctttggtatccttaaacctgacttaaggattgtctttgtacataacaagg

SEQ ID NO: 300244 - DNA, 560 bp, Artificial Sequence
  derived and/or modified sequence
gtgctgggtgcgggtgcgggtgcggggttgggcctgcgcatcgggtgagacgctggctgcttgcggctagtggatggtaattgcctgcctcgcgctagcaggaaggtagtgtggtgtgactaacgggtatttattatatcctcgatggctcgagggccccgtcccctctactcgtcctggtccgggcgcgaacgctatagggcagctaagggcgctccccgcggggcgggaagcgaagccgggcttgcgggcgcgcacacgtggaacgcgttttctgagcaggcacacctgttgtccttaactgactttccgggtcatcagcacttcttcagaagtgttccttttccctcccagcaaatatggaagactgactatcctgatattcccagacattctttgctgtgatttctgctctgttaaaagcgaaaatgaaacaattgcctgcggcaacagttcgactcctttcaagttctcagatcatcacttcggtggtcagtgttgtaaaagagcttattgaaaactccttggatgctggtgccacaagcgtagatgttaaactg

SEQ ID NO: 300245 - protein, 38 aa, Artificial Sequence
  derived and/or modified sequence
MAGASVKVAVRVRPFNSREMSRDSKCIIQMSGSTTTIV

SEQ ID NO: 300246 - DNA, 117 bp, Artificial Sequence
  derived and/or modified sequence
atggctggcgcttccgtgaaggttgcagtccgggtcagaccctttaactcccgcgagatgtcccgtgatagcaaatgtataatccaaatgagcggctctacgacaacaatcgtgtag

SEQ ID NO: 300247 - DNA, 117 bp, Artificial Sequence
  derived and/or modified sequence
atggccggggcctctgtgaaggtggccgtgcgggtgcggcccttcaacagccgggagatgagccgggacagcaagtgcatcatccagatgagcggcagcaccaccaccatcgtgtag

SEQ ID NO: 300248 - DNA, 117 bp, Artificial Sequence
  derived and/or modified sequence
atggccggcgccagcgtgaaggtggccgtgcgggtgcggcccttcaattctagagaaatgtctcgcgatagcaagtgtatcatccagatgtccggttctaccaccactatcgtgtag

SEQ ID NO: 300249 - DNA, 117 bp, Artificial Sequence
  derived and/or modified sequence
atggctggggcatctgtgaaggttgccgtgcgggtgagaccattcaactccagggaaatgtccagggattcaaagtgcattattcagatgagcggatccacgaccactatcgtttag

SEQ ID NO: 300250 - DNA, 117 bp, Artificial Sequence
  derived and/or modified sequence
atggccggcgccagcgtgaaggtggccgtgagagtgagacccttcaacagcagagagatgagcagagacagcaagtgcatcatccagatgagcggcagcaccaccaccatcgtgtag

SEQ ID NO: 300251 - protein, 250 aa, Artificial Sequence
  derived and/or modified sequence
MFSLPLSLPLCEDTAFLPSKCCSSHKTIKQARTLIMIFLASGTHFQTMLKSKLNVLTLKKEPLPAVIFHEPEAIELCTTTPLMKTRTHSGCKVTYLGKVSTTGMQFLSGCTEKPVIELWKKHTLAREDVFPANALLEIRPFQVWLHHLDHKGEATVHMDTFQVARIAYCTADHNVSPNIFAWVYREINDDLSYQMDCHAVECESKLEAKKLAHAMMEAFRKTFHSMKSDGRIHSNSSSEEVSQELESDDG

SEQ ID NO: 300252 - protein, 168 aa, Artificial Sequence
  derived and/or modified sequence
MWQPATERLQVTYLGKVSTTGMQFLSGCTEKPVIELWKKHTLAREDVFPANALLEIRPFQVWLHHLDHKGEATVHMDTFQVARIAYCTADHNVSPNIFAWVYREINDDLSYQMDCHAVECESKLEAKKLAHAMMEAFRKTFHSMKSDGRIHSNSSSEEVSQELESDDG

SEQ ID NO: 300253 - DNA, 753 bp, Artificial Sequence
  derived and/or modified sequence
atgttctcactcccattgtctctccccctatgcgaggacaccgcattcttgccgagtaagtgttgcagctcccacaaaaccatcaaacaagcccgcacactcatcatgatctttctcgcttctggtacacacttccagacaatgctgaagtctaagctcaatgtgcttacgctgaaaaaggaaccattgccagcagtgatattccacgaacctgaggcgatcgaactctgcacaaccacccctctcatgaaaaccagaacccactccgggtgcaaagtgacatatcttggcaaagtttctaccactggcatgcaattcttgtctggttgcactgaaaaacctgtgatcgaactctggaaaaaacacaccctggccagagaggatgtcttccccgccaatgcccttctggaaattagacctttccaagtgtggctccaccacctggaccacaaaggtgaagctaccgtgcatatggacacatttcaagtggcgaggatcgcatattgcaccgcagaccataacgtatcccccaacatcttcgcctgggtgtatcgagagatcaacgacgatctgtcttaccagatggattgccatgccgtcgagtgtgaaagcaagcttgaggccaagaaactggcacatgccatgatggaagcgtttaggaagacctttcacagtatgaaatcggacggaagaattcattctaactcaagctctgaggaagtgtcccaggaattggaatcagacgacggctag

SEQ ID NO: 300254 - DNA, 753 bp, Artificial Sequence
  derived and/or modified sequence
atgttctcactaccactgagcttgccgttgtgcgaagacactgcattcctgcccagtaagtgttgttcgagtcacaagacgatcaagcaggcccggaccctcatcatgattttcctcgcttccggcacacacttccagactatgcttaaaagtaagcttaacgtattgacactgaaaaaggagccactgcccgcggtcatcttccacgaacccgaggccatagaactgtgcaccacaacacctcttatgaagaccaggacacattccgggtgcaaggtcacttacttaggcaaggtgtcaaccacagggatgcagtttctgtcaggttgcaccgagaagcccgttatcgagttgtggaaaaagcatacgttggcacgagaggatgtgttccccgcaaatgcactccttgagatacgtccctttcaggtctggctccaccatttggaccacaagggcgaagccacggtccacatggatacctttcaggtcgccaggatcgcctattgtactgccgaccacaacgtgagcccaaacatcttcgcgtgggtgtacagagaaattaacgacgaccttagttaccagatggattgccatgctgtggagtgtgagtccaagctcgaagcaaaaaaactggcacatgcaatgatggaggccttccggaaaacctttcatagtatgaagtccgatgggcgaatacactcaaactctagtagtgaagaggtttctcaggagctcgagagcgacgacggctag

SEQ ID NO: 300255 - DNA, 753 bp, Artificial Sequence
  derived and/or modified sequence
atgttcagcctgcccctgagcctgcccctgtgtgaggacacagccttcctgcccagcaagtgctgcagcagccacaagaccatcaagcaggcccggaccctcatcatgatcttcctggccagcggcacccacttccagaccatgctgaagagcaagctgaatgtgctgaccctgaagaaggagcccctgcctgctgtgatcttccacgagcctgaggccatcgagctgtgcaccaccacccccctgatgaagaccaggacccacagcggctgcaaggtgacctacctgggcaaggtgtccaccaccggcatgcagttcctgagcggctgcacagagaagcctgtgattgagctgtggaagaagcacaccctggccagagaagatgtgtttcctgccaatgccctgctggagatccggcccttccaggtgtggctgcaccacctggaccacaagggggaggccaccgtgcacatggacaccttccaggtggcccgcatcgcctactgcacagctgaccacaacgtgagccccaacatctttgcctgggtgtaccgggagatcaatgatgacctgagctaccagatggactgccacgctgtggagtgtgagagcaagctggaggccaagaagctggcccacgccatgatggaggccttcaggaagaccttccacagcatgaagagtgatggccgcatccacagcaacagcagcagcgaggaggtgtcccaggagctggagagtgatgatggatag

SEQ ID NO: 300256 - DNA, 753 bp, Artificial Sequence
  derived and/or modified sequence
atgttcagcctgcccctgagcctgcccctgtgcgaggacaccgcctttctgcctagcaagtgttgttcgagtcataagaccataaaacaggcaaggactcttatcatgatcttccttgcctctggtacccattttcagactatgttgaaatccaagctaaacgttctcacactgaaaaaagagccgttacctgctgtgattttccacgaacccgaggctattgagctctgtactacaactccgctgatgaagaccaggacacatagcgggtgtaaggtcacttacctggggaaagtgtcgactaccgggatgcaattcctgtccggctgcacagaaaagccagtgatagagctctggaagaaacacacgttagccagggaggacgtgtttccagctaatgccttactcgagattagacccttccaggtgtggctgcatcatttggatcataaaggtgaggcgactgtgcatatggacacatttcaggtggcacgcatcgcttactgtacagccgatcataacgttagccccaacatctttgcttgggtgtacagggagatcaacgacgacctgagttaccaaatggattgccacgccgtggagtgcgagagtaagctggaggctaaaaagctcgctcacgcgatgatggaggcctttagaaaaactttccacagcatgaaatcagacggtcggatccatagcaacagctcgtcagaagaggtctcccaggagctcgaatcagacgacggctag

SEQ ID NO: 300257 - DNA, 753 bp, Artificial Sequence
  derived and/or modified sequence
atgttcagcctgcccctgagcctgcccctgtgcgaggacaccgccttcctgccaagcaagtgctgttcctctcacaaaaccataaagcaggcccgtacattgataatgatcttcctcgcttctggtactcactttcagactatgctgaaatccaagctgaatgtgctaactctgaaaaaagaacctttgccggccgtgatcttccacgaaccagaggcaatagagctttgcactactacgcctttgatgaaaactaggacacattctggctgcaaggttacttacctgggtaaagtgtccacaacaggaatgcagtttctgtcgggctgtaccgagaagccagtcattgaactatggaaaaagcacaccctggcccgggaggatgtatttcccgccaacgctttgctggaaattagacctttccaggtgtggctccaccatttagaccataaaggggaagctaccgtacacatggataccttccaggtggccaggatagcctactgcactgctgaccataacgtgagcccaaatatcttcgcatgggtgtaccgagagattaacgatgacttaagctaccagatggattgccatgccgttgagtgcgaaagtaaactggaagctaagaagctagctcacgctatgatggaagctttcaggaagacattccactctatgaagagtgatggccggattcacagtaactcgtcctccgaagaagtgtcacaggagttggaatccgatgatggatag

SEQ ID NO: 300258 - DNA, 839 bp, Artificial Sequence
  derived and/or modified sequence
atgaaaagccttgtacaagaggcttcgtgccatgttcagcctgccccttagccttccactgtgtgaggacacagcattccttccttccaagtgctgcagctctcacaagacaatcaaacaagcccgcaccttgatcatgatcttcctagcctccggaacgcactttcagaccatgctgaagtctaaattgaatgtcttaacactgaaaaaggaacctctcccagcggtcatcttccatgagccggaggccattgagctgtgcacgaccacaccgctgatgaagacaaggactcacagtggctgcaaggttacctacctgggcaaagtctccaccactggcatgcagtttttgtcaggctgcacagaaaagccagtcattgagctctggaagaagcacacgctagcccgagaggatgtctttccggccaatgccctcctggaaatccggccattccaagtttggctccatcatctcgaccacaaaggggaggccacagtgcacatggataccttccaggtggcccgcatcgcctactgcaccgccgaccacaacgtgagccccaacatcttcgcctgggtctacagggagatcaatgatgacctgtcctaccagatggactgccacgccgtggagtgcgagagcaagctcgaggccaagaaactggcccacgccatgatggaggccttcaggaagactttccacagtatgaagagcgacgggcggatccacagcaacagctcctccgaagaggtttcccaggaattggaatccgatgatggctgaatgaacttgagacgcttcagcaaaggcagcattggtcacggagttcaagggaata

SEQ ID NO: 300259 - DNA, 1524 bp, Artificial Sequence
  derived and/or modified sequence
atgaaaagccttgtacaagaggcttcgtgccatgttcagcctgccccttagccttccactgtgtgaggacacagcattccttccttccaagtgctgcagctctcacaagacaatcaaacaagcccgcaccttgatcatgatcttcctagcctccggaacgcactttcagaccatgctgaagtctaaattgaatgtcttaacactgaaaaaggaacctctcccagcggtcatcttccatgagccggaggccattgagctgtgcacgaccacaccgctgatgaagacaaggactcacagtggctgcaaggttacctacctgggcaaagtctccaccactggcatgcagtttttgtcaggctgcacagaaaagccagtcattgagctctggaagaagcacacgctagcccgagaggatgtctttccggccaatgccctcctggaaatccggccattccaagtttggctccatcatctcgaccacaaaggggaggccacagtgcacatggataccttccaggtggcccgcatcgcctactgcaccgccgaccacaacgtgagccccaacatcttcgcctgggtctacagggagatcaatgatgacctgtcctaccagatggactgccacgccgtggagtgcgagagcaagctcgaggccaagaaactggcccacgccatgatggaggccttcaggaagactttccacagtatgaagagcgacgggcggatccacagcaacagctcctccgaagaggtttcccaggaattggaatccgatgatggctgaatgaacttgagacgcttcagcaaaggcagcattggtcacggagttcaagggaatagatgagtaagcaacgtttcaaatttgggatgaaaagactgccaaactattggctgaccaaggtttttaaattcagaagagcaattctaaatctaaagaaatgtatcattaaagtaattacgttacattgaaacctgctgctgctgtgactgtgaggagggtgggagtgtggatggggaggaaggttctaggctctcttatttttctcatttcccaatgcctctctgtgggagagctccatgccagttttcaccacgctcaggcaaatactctgcagctgttattggatgggccattccgatctgccttatgaaattccacaagaatgttaggggcaccctctttccccttctaacatccttagagggatgaaatctcagcatatgttgcaggacaccaaaaggaagaaaacaatcaagcaaataaaataaacagtcaaacaaaccaggagtttaaaacaacaaccccaacaacagaagccttggcaaagaggaataagtgatcagcaagtgaacacactctatgtcaactctccttttatccagctgagatttatggtaacttatttaattaatggtcctgtctgatgcatccttgatggcaagcttcaaatctgatttggtatcaccgaggaaaccttgcccccatcactcagcattgcacttagatacagaatgagttagata

SEQ ID NO: 300260 - DNA, 753 bp, Artificial Sequence
  derived and/or modified sequence
atgttctccttacctctgagtttgccactttgcgaagacacggctttccttcctagcaaatgctgctcgagccataagaccatcaaacaggccagaactttaattatgatatttctcgccagcggcacccattttcagacgatgctcaagtctaagcttaatgtcctaaccttgaagaaagagccactcccagccgtgatttttcacgaacccgaggcaatcgagttatgtacgaccacgccactcatgaaaacccgcactcacagcggatgtaaagtgacctatctggggaaggtctccactaccggcatgcagtttctgagcggatgcacagaaaaacctgtcatcgagctgtggaagaagcatacacttgccagagaagacgtcttcccagctaacgcacttctggagattcggccatttcaggtctggttacatcatctcgatcataagggagaggccactgttcatatggataccttccaggtggcccgaatcgcgtactgcaccgcggatcacaacgtgtctccaaacatctttgcctgggtttatcgggagattaatgacgatctgtcttatcagatggactgccatgctgttgagtgcgaatccaaactggaagccaagaagttagcccatgcaatgatggaagcctttcgaaagaccttccactccatgaagtcagacggccgaatccacagtaattctagcagtgaggaagtaagccaagaactggagagtgatgatggttag

SEQ ID NO: 300261 - DNA, 753 bp, Artificial Sequence
  derived and/or modified sequence
atgttttctcttcctttgagtcttcctctctgcgaggacaccgcctttctgccttccaagtgctgcagcagccataagactattaaacaggccagaactctgatcatgatattcttagcctccggaacacactttcagactatgctcaagagtaaattaaatgtcctgactctgaaaaaggagcctctgcccgcagtgatattccacgagccagaagctatagaactttgcacgaccacacccctcatgaagacacgtacccactctgggtgcaaggttacgtacttgggcaaggtcagcaccacgggaatgcaatttctttctggctgtacggaaaaaccagtgattgagctctggaaaaaacataccctggccagggaggatgtgttccctgccaacgctcttcttgagataaggccttttcaggtttggctgcatcaccttgaccataagggagaagcaaccgtgcacatggatacatttcaggttgctcgaattgcctactgcaccgctgatcataacgtctctcctaatatctttgcgtgggtgtacagggagatcaatgacgatctgtcctaccaaatggactgtcacgcggtggagtgtgaaagcaaactcgaggccaagaaactggcccacgccatgatggaggctttccggaaaaccttccacagcatgaaaagtgacgggaggatccattcaaatagctcatcggaggaagtctctcaggagctcgaatccgatgacggttag

SEQ ID NO: 300262 - DNA, 753 bp, Artificial Sequence
  derived and/or modified sequence
atgttcagcctgcccctgagcctgcccctgtgcgaggacaccgccttcctgcccagcaagtgctgcagcagccacaagaccatcaagcaggccagaaccctgatcatgatcttcctggccagcggcacccacttccagaccatgctgaagagcaagctgaacgtgctgaccctgaagaaggagcccctgcccgccgtgatcttccacgagcccgaggccatcgagctgtgcaccaccacccccctgatgaagaccagaacccacagcggctgcaaggtgacctacctgggcaaggtgagcaccaccggcatgcagttcctgagcggctgcaccgagaagcccgtgatcgagctgtggaagaagcacaccctggccagagaggacgtgttccccgccaacgccctgctggagatcagacccttccaggtgtggctgcaccacctggaccacaagggcgaggccaccgtgcacatggacaccttccaggtggccagaatcgcctactgcaccgccgaccacaacgtgagccccaacatcttcgcctgggtgtacagagagatcaacgacgacctgagctaccagatggactgccacgccgtggagtgcgagagcaagctggaggccaagaagctggcccacgccatgatggaggccttcagaaagaccttccacagcatgaagagcgacggcagaatccacagcaacagcagcagcgaggaggtgagccaggagctggagagcgacgacggctag

SEQ ID NO: 300263 - protein, 87 aa, Artificial Sequence
  derived and/or modified sequence
MTARGQSPLAPLLETLEDPSASHGGQTDAYLTLTSRMTGEEGKEVITEIEKKLPRLYKVLKTHISSQNSELSSAALQALGFCLYNPK

SEQ ID NO: 300264 - protein, 341 aa, Artificial Sequence
  derived and/or modified sequence
MTARGQSPLAPLLETLEDPSASHGGQTDAYLTLTSRMTGEEGKEVITEIEKKLPRLYKVLKTHISSQNSELSSAALQALGFCLYNPKITSELSEANALELLSKLNDTIKNSDKNVRTRALWVISKQTFPSEVVGKMVSSIIDSLEILFNKGETHSAVVDFEALNVIVRLIEQAPIQMGEEAVRWAKLVIPLVVHSAQKVHLRGATALEMGMPLLLQKQQEIASITEQLMTTTLHRSGSFINSLLQLEELGFRSGAPMIKKIAFIAWKSLIDNFALNPDILCSAKRLKLLMQPLSSIHVRTETLALTKLEVWWYLLMRLGPHLPANFEQVLPPRTEPRELPE

SEQ ID NO: 300265 - DNA, 1026 bp, Artificial Sequence
  derived and/or modified sequence
atgaccgccagaggccagagccccctggcccccctgctggagaccctggaggaccccagcgccagccacggcggccagaccgacgcctacctgaccctgaccagcagaatgaccggcgaggagggcaaggaggtgatcaccgagatcgagaagaagctgcccagactgtacaaggtgctgaagacccacatcagcagccagaacagcgagctgagcagcgccgccctgcaggccctgggcttctgcctgtacaaccccaagatcaccagcgagctgagcgaggccaacgccctggagctgctgagcaagctgaacgacaccatcaagaacagcgacaagaacgtgagaaccagagccctgtgggtgatcagcaagcagaccttccccagcgaggtggtgggcaagatggtgagcagcatcatcgacagcctggagatcctgttcaacaagggcgagacccacagcgccgtggtggacttcgaggccctgaacgtgatcgtgagactgatcgagcaggcccccatccagatgggcgaggaggccgtgagatgggccaagctggtgatccccctggtggtgcacagcgcccagaaggtgcacctgagaggcgccaccgccctggagatgggcatgcccctgctgctgcagaagcagcaggagatcgccagcatcaccgagcagctgatgaccaccaccctgcacagaagcggcagcttcatcaacagcctgctgcagctggaggagctgggcttcagaagcggcgcccccatgatcaagaagatcgccttcatcgcctggaagagcctgatcgacaacttcgccctgaaccccgacatcctgtgcagcgccaagagactgaagctgctgatgcagcccctgagcagcatccacgtgagaaccgagaccctggccctgaccaagctggaggtgtggtggtacctgctgatgagactgggcccccacctgcccgccaacttcgagcaggtgctgccccccagaaccgagcccagagagctgcccgagtag

SEQ ID NO: 300266 - DNA, 1026 bp, Artificial Sequence
  derived and/or modified sequence
atgactgctcgtggacagagcccactggcccctctgctcgaaacactcgaagatccaagtgccagccatggagggcagactgacgcctacctcactcttacttctcggatgacaggggaggagggtaaggaggtaataactgaaatagagaagaagctccctcgcctgtacaaagttctgaaaactcacatttcttcccaaaattcggaactgagcagcgccgcgttacaggcgctaggattctgtttatacaaccctaagattacatcagagctgtcagaagccaacgcgcttgagctccttagcaagcttaatgatacaatcaagaatagcgataagaacgtcaggactagagccctgtgggtgatttccaagcagaccttcccgtccgaggtggtgggaaaaatggtctccagcatcattgattccctggagatcctgtttaataagggggagactcattctgccgtcgtggacttcgaagccctaaatgtgatcgtcagacttatcgagcaggcccctatccaaatgggggaggaggcagttcggtgggctaagcttgtgatcccccttgtcgtccatagtgctcagaaggtacacttgaggggggctacagctctggagatggggatgcccctgctgctgcaaaaacagcaggaaattgcgagcataacagaacaattgatgaccaccaccctccatcggtccgggagttttatcaattcacttctgcagctagaggagcttggattccgcagtggcgctcccatgattaagaaaattgcattcatcgcttggaagagcctcatcgataattttgccctcaatcccgacatactatgtagcgcaaaaaggcttaagcttctaatgcagcccctttcatccattcatgtaaggacggagacccttgcgttaactaagctagaggtctggtggtacctgctgatgcgcctgggcccccatctcccggcaaactttgagcaggtcctgccgccacggaccgaacctcgagaactaccagagtag

SEQ ID NO: 300267 - DNA, 1026 bp, Artificial Sequence
  derived and/or modified sequence
atgacagcccggggccagagccccctggcccccctgctggagaccctggaggaccccagcgccagccatggaggccagacagatgcctacctgaccctgaccagcaggatgaccggggaggagggcaaggaggtgatcacagaaattgagaagaagctgccccggctgtacaaggtgctgaagacccacatcagcagccagaacagcgagctgagcagcgctgccctgcaggccctgggcttctgcctgtacaaccccaagatcaccagcgagctgtctgaggccaatgccctggagctgctgagcaagctgaatgacaccatcaagaacagcgacaagaatgtgaggacccgggccctgtgggtgatcagcaagcagaccttccccagcgaggtggtgggcaagatggtgagcagcatcatcgacagcctggagatcctcttcaacaagggggagacccacagcgctgtggtggactttgaggccctgaatgtcatcgtgcggctcatcgagcaggcccccatccagatgggagaggaggccgtgcgctgggccaagctggtgatccccctggtggtgcacagcgcccagaaggtgcacctgcggggggccacagccctggagatgggcatgcccctgctgctgcagaagcagcaggagatcgccagcatcacagagcagctgatgaccaccaccctgcacaggagcggcagcttcatcaacagcctgctgcagctggaggagctgggcttccgcagcggggcccccatgatcaagaagatcgccttcatcgcctggaagagcctgattgacaactttgccctgaacccagacatcctgtgcagcgccaagaggctgaagctgctgatgcagcccctgagcagcatccacgtgaggacagagaccctggccctgaccaagctggaggtgtggtggtacctgctgatgaggctgggcccccacctgcctgccaactttgagcaggtgctgccccccaggacagagccccgggagctgcctgagtag

SEQ ID NO: 300268 - DNA, 1026 bp, Artificial Sequence
  derived and/or modified sequence
atgaccgcccggggccagagccccctggcccccctgctggagaccctggaagacccttcagcctctcatggcgggcagaccgacgcctatctgaccctgactagccgaatgacgggagaagaaggaaaggaggtgatcacagagatagagaagaaactcccgcgtctatacaaagtgctgaaaacccacatctcatcgcagaactccgagcttagcagcgccgcactgcaagccctcgggttttgtttgtacaaccccaaaattactagtgagctctccgaggcgaatgctctcgagttgctgtcaaaactcaacgatacaattaagaactcggacaagaatgtcagaacgagggcactgtgggtcatatccaagcagaccttccccagcgaggttgtaggtaagatggtctcatccattatcgatagtctagaaattctgtttaacaagggtgagacacattccgccgtggtggattttgaggccctaaatgtaatcgtgagactcatcgagcaggctccgattcaaatgggagaggaagcagtaaggtgggccaagcttgtgatccccctggttgtgcactcagcccagaaggtgcatctgaggggtgccacagctctagagatgggaatgcccctgctactgcagaaacagcaggaaatcgcaagtattactgagcagcttatgaccacaacacttcaccgctccgggagttttataaattcactgctccagttagaggaattgggcttccgtagcggcgcccccatgatcaagaaaattgcttttatcgcttggaaaagtctgattgataacttcgcacttaatcccgacatcttgtgctccgccaaaagactgaaactgttgatgcagcccctgagcagcattcatgtgcggactgaaaccctggcgctgactaaactggaggtgtggtggtaccttctgatgagactgggcccccatctgccagcaaatttcgaacaggtgctgccaccccggacagagccgcgcgaactcccagaatag

SEQ ID NO: 300269 - DNA, 1026 bp, Artificial Sequence
  derived and/or modified sequence
atgacggctcggggtcagtcccccctagcccctctgctggaaacactggaggacccatccgcctctcacggcggacagacagacgcttacctgaccctgacatcccgcatgaccggggaagaaggtaaagaagtgatcacagagatcgaaaagaaattacccagactgtacaaggtgcttaaaactcacatcagctcccaaaattctgagctgtcctcggcggctctgcaggcgctcggtttttgcctttacaatcccaaaattacgtcagaactgtctgaggccaacgccctcgaattactgtcaaagcttaatgatactatcaaaaattcagacaaaaacgtgcgcactagagccctctgggttattagcaaacaaacatttcctagcgaggtagtgggaaaaatggtgagtagcataattgattcattagaaattctgttcaataagggggagacgcattcagcagttgttgactttgaagctctcaatgtgattgtgagactcatcgaacaggcgccaatacaaatgggtgaggaggccgtgagatgggccaagctggtgataccactggtggtccattcagcacagaaagtccatctgcgcggtgcaacagccctggaaatgggcatgccattactgttacaaaagcagcaggagatcgcctccattaccgagcaattaatgacaacaacactccaccgaagcggttctttcattaacagcctactgcaactagaagagcttgggttcaggtccggagccccaatgatcaagaaaatcgcctttatcgcctggaagtctctcatcgataatttcgcactgaatccggacattctgtgtagtgctaaaagactgaagcttcttatgcaacccttgagttctattcacgtgcgtactgaaaccctggccctcactaagcttgaggtttggtggtacctcctgatgagactaggcccacacctccccgctaactttgaacaggttctgcctcctagaacggagcctagggaactccctgagtag

SEQ ID NO: 300270 - DNA, 544 bp, Artificial Sequence
  derived and/or modified sequence
ttggtctaggagggagcgcgccgcacgcgtgagtaaacagccggagctgggaaagtcgagctctggcagcgtctgggtgctgaggggcagaggcggagagaaccctgtcctgatcttcctaggtgggataaatatcggggtgacagtggtaggccgcggggaaccctcagtctgcccaccctccgccccctcgcggcgagatgcctcgttccccgggcttctcccgccctccgccgatctcctccctctgttgaaagctgcccgggaaagtggtggccgacatgacggccaggggtcagagccccctcgcgccgctgttggagactttggaagacccttctgcctcccatggagggcagactgacgcttacctgactctgaccagtcgtatgactggagaagaaggaaaagaagtaattacagaaattgagaaaaaacttcctcggctgtacaaagttttaaagactcacatttccagtcaaaactcggagctgagtagtgctgctctacaagccctggggttttgcttatataatcccaaaat

SEQ ID NO: 300271 - DNA, 1605 bp, Artificial Sequence
  derived and/or modified sequence
ccagccgccatcttggtctaggagggagcgcgccgcacgcggtggccgacatgacggccaggggtcagagccccctcgcgccgctgttggagactttggaagacccttctgcctcccatggagggcagactgacgcttacctgactctgaccagtcgtatgactggagaagaaggaaaagaagtaattacagaaattgagaaaaaacttcctcggctgtacaaagttttaaagactcacatttccagtcaaaactcggagctgagtagtgctgctctacaagccctggggttttgcttatataatcccaaaattacctcagaattatcagaggcaaatgctctagaattgctttcaaaattgaatgataccattaagaattcagacaaaaatgtacgtactagagcactttgggtgatatctaagcagacatttccctctgaagtggttggcaaaatggtatccagtataattgattcattagaaatactgtttaacaaaggagagacgcattctgctgttgttgattttgaagcattaaatgttatcgtaaggctaattgaacaagccccaattcaaatgggagaagaggcagtgaggtgggcaaaactggtcatacctttagtggttcattcagcacaaaaggtacatttgcggggagcaactgctctggagatgggaatgccattattgcttcagaaacagcaagaaatagcatctattacggagcagcttatgactactaccttgcatcgaagtgggagtttcatcaattctctcttgcaactagaagaacttggatttcgtagtggagcacccatgattaaaaagatagcttttattgcttggaagagtttaatagataattttgctttaaatccagatatactatgtagtgcaaaaagactcaagttgttaatgcagcctttgagttccatccatgtgagaacagaaactctagcattaacaaaactagaagtctggtggtatttactgatgagacttggacctcatcttcctgctaattttgaacaggtgcttcctccccgtacggagccccgggaactccccgaatgaacctgagttcgaatttaggtggaatggccacaatcccatccattcaacttttgggacttgaaatgttgcttcatttcttgttgggtccagaagccttgagttttgctaagcaaaataaacttgtgctgagcttagagccattggaacatccgttaatcagcagcccttcctttttttccaaacatgcaaatacacttatcactgctgttcatgatagctttgttgcagttggaaaagatgcccccgatgtggttgtcagtgctatctggaaggagctaattagcttggtgaagtcagttactgaatcaggtaacaaaaaagagaaaccaggttctgaagttttgactctcttattaaagtctttggaaagcatagtaaagtctgaagtatttcctgtatcaaaaacgctggtcctcatggaaattacaattaaaggacttcctcagaaagtattaggttcaccagcatatcaggttgctaatatggatattcttaatggaactccagctttgttcttaattcaattaat

SEQ ID NO: 300272 - protein, 328 aa, Artificial Sequence
  derived and/or modified sequence
MFGDLFEEEYSTVSNNQYGKGKKLKTKALEPPAPREFTNLSGIRNQGGTCYLNSLLQTLHFTPEFREALFSLGPEELGLFEDKDKPDAKVRIIPLQLQRLFAQLLLLDQEAASTADLTDSFGWTSNEEMRQHDVQELNRILFSALETSLVGTSGHDLIYRLYHGTIVNQIVCKECKNVSERQEDFLDLTVAVKNVSGLEDALWNMYVEEEVFDCDNLYHCGTCDRLVKAAKSAKLRKLPPFLTVSLLRFNFDFVKCERYKETSCYTFPLRINLKPFCEQSELDDLEYMTSSQLLYTKVAATEAITMYILKMLIIWETGSFKRKKVNQM

SEQ ID NO: 300273 - DNA, 987 bp, Artificial Sequence
  derived and/or modified sequence
atgttcggcgacctgttcgaggaggagtacagcaccgtgagcaacaaccagtacggcaagggcaagaagctgaagaccaaggccctggagccccccgcccccagagagttcaccaacctgagcggcatcagaaaccagggcggcacctgctacctgaacagcctgctgcagaccctgcacttcacccccgagttcagagaggccctgttcagcctgggccccgaggagctgggcctgttcgaggacaaggacaagcccgacgccaaggtgagaatcatccccctgcagctgcagagactgttcgcccagctgctgctgctggaccaggaggccgccagcaccgccgacctgaccgacagcttcggctggaccagcaacgaggagatgagacagcacgacgtgcaggagctgaacagaatcctgttcagcgccctggagaccagcctggtgggcaccagcggccacgacctgatctacagactgtaccacggcaccatcgtgaaccagatcgtgtgcaaggagtgcaagaacgtgagcgagagacaggaggacttcctggacctgaccgtggccgtgaagaacgtgagcggcctggaggacgccctgtggaacatgtacgtggaggaggaggtgttcgactgcgacaacctgtaccactgcggcacctgcgacagactggtgaaggccgccaagagcgccaagctgagaaagctgccccccttcctgaccgtgagcctgctgagattcaacttcgacttcgtgaagtgcgagagatacaaggagaccagctgctacaccttccccctgagaatcaacctgaagcccttctgcgagcagagcgagctggacgacctggagtacatgaccagcagccagctgctgtacaccaaggtggccgccaccgaggccatcaccatgtacatcctgaagatgctgatcatctgggagaccggcagcttcaagagaaagaaggtgaaccagatgtag

SEQ ID NO: 300274 - DNA, 987 bp, Artificial Sequence
  derived and/or modified sequence
atgttcggcgacttatttgaggaagagtacagcacagtcagcaacaaccagtacggtaagggtaaaaagctgaaaacaaaagctcttgagccacccgcaccaagggagttcacgaatcttagcggaatcagaaatcagggaggaacatgttacctgaatagtctcttgcagactttacatttcacgcctgagtttagggaggcattattcagccttggccccgaggagctgggcttgtttgaggacaaggacaagcccgacgctaaggtacgtatcattccgctccaactgcagcggttatttgcccagctcctgctcctagatcaggaggcggccagtacagcagacctgacagacagttttggatggacgtctaatgaggaaatgcgacaacacgatgtgcaagaactaaacaggattcttttctctgccctcgaaacttccctagttggtaccagcgggcacgatttgatttaccgcctataccacggaacgatcgtcaatcaaatcgtttgtaaggagtgcaagaacgtttccgagaggcaggaagactttttggatctaaccgtcgctgtgaaaaatgtgtcagggctggaggatgccctgtggaacatgtacgtggaggaagaggtctttgactgcgataatctataccactgcggcacgtgtgaccgcctcgtgaaggccgctaaaagtgccaagctgcgcaaactgccgccttttctgaccgtgagcttgctgagattcaatttcgatttcgtgaaatgcgaaagatacaaggaaaccagctgttatactttcccactgcgcattaacctcaagcccttttgcgagcagtccgagctagacgacctggagtacatgacatcctcacagctgttgtacaccaaggtggccgctaccgaggctattaccatgtatatcttgaaaatgctgattatctgggaaactgggtcatttaaaaggaaaaaagtgaatcaaatgtag

SEQ ID NO: 300275 - DNA, 987 bp, Artificial Sequence
  derived and/or modified sequence
atgtttggagacctgtttgaggaggagtacagcacagtgagcaacaaccagtatggcaagggcaagaagctgaagaccaaggccctggagcccccagccccccgggagttcaccaacctgagcggcatccggaaccagggcggcacctgctacctgaacagcctgctgcagaccctgcacttcaccccagagttccgggaggccctcttcagcctgggccctgaggagctgggcctgtttgaggacaaggacaagccagatgccaaggtgcgcatcatccccctgcagctgcagaggctgtttgcccagctgctgctgctggaccaggaggccgccagcacagctgacctgacagacagctttggctggaccagcaatgaggagatgaggcagcatgatgtgcaggagctgaaccgcatcctcttcagcgccctggagaccagcctggtgggcaccagcggccatgacctgatctaccgcctgtaccacggcaccatcgtgaaccagatcgtgtgcaaggagtgcaagaatgtgtctgagcggcaggaggacttcctggacctgactgtggccgtgaagaatgtgtctggcctggaggatgccctgtggaacatgtatgtggaggaggaggtgtttgactgtgacaacctgtaccactgcggcacctgtgaccggctggtgaaggccgccaagagcgccaagctgaggaagctgccccccttcctgactgtgtccctgctgcgcttcaactttgattttgtgaagtgtgagcgctacaaggagaccagctgctacaccttccccctgcgcatcaacctgaagcccttctgtgagcagagcgagctggatgacctggagtacatgaccagcagccagctgctgtacaccaaggtggccgccacagaggccatcaccatgtacatcctgaagatgctgatcatctgggagaccggcagcttcaagaggaagaaggtgaaccagatgtag

SEQ ID NO: 300276 - DNA, 987 bp, Artificial Sequence
  derived and/or modified sequence
atgttcggcgacctgttcgaggaggagtacagcaccgtgagcaacaatcaatacgggaaggggaaaaaacttaaaacaaaagccctggagcctccagcaccacgcgagttcaccaatctgagcggaatccgtaatcagggcgggacctgttaccttaactcactccttcaaactctgcacttcacccccgaatttagggaagccctcttcagtctcggcccagaagagctggggttattcgaggacaaagacaagccggacgcgaaggtccgaattatccctctgcagctccaaaggctgttcgctcaactgctgctgcttgatcaagaggccgcatcaacagctgatctgactgactcttttggctggacctcaaacgaggagatgagacagcacgacgtgcaggagttaaacagaattttgtttagcgccctggaaacctcactagttggcacaagtggccatgatttgatttacaggctgtatcacggtaccatcgtgaaccagattgtctgtaaagaatgtaagaacgtatccgaacgccaggaggactttctcgatctgactgtggcggtgaagaatgtttccgggctagaggatgccttgtggaacatgtatgtggaggaggaggtgttcgattgtgataatctgtaccattgcgggacctgtgatagactggtcaaggctgctaaatcggctaaattgcggaaactgccccccttcttgaccgtaagtctgctgaggtttaattttgattttgtgaaatgcgaacgctacaaggagacttcctgttacacgttccctctgcgaatcaacctgaagcctttctgtgagcagagtgagctggatgatctggagtatatgacaagctctcagcttctgtatactaaagtggcagctaccgaagcaattaccatgtatattctgaagatgctgatcatttgggaaacagggagtttcaagaggaagaaagtgaaccagatgtag

SEQ ID NO: 300277 - DNA, 987 bp, Artificial Sequence
  derived and/or modified sequence
atgtttggagatctgtttgaggaagaatactccacagtctctaataatcaatatggaaaaggcaaaaagctgaagaccaaggccttggaacccccagctcctagggagttcacaaacctgagcggcattaggaaccagggaggcacatgttaccttaacagtctcctgcagaccttgcacttcacacccgaattccgcgaggccctgttttcactgggtcccgaggaactgggcctctttgaggacaaagataaacccgatgccaaagtaaggatcatcccgctccagctgcagagactgttcgctcagcttttgttgcttgatcaggaagcggcttcaacagccgacctcaccgactccttcggatggaccagtaacgaagagatgagacaacacgacgtccaggagctgaatcgaattctgttttctgctctcgaaacctctctggtgggcacctcaggccacgatttgatctatagactgtatcacggcactatcgtcaaccagatagtttgtaaagaatgcaagaatgtctcagagcgtcaagaggacttcctcgacctgaccgtagcagtgaaaaacgtgtccgggcttgaggacgccctgtggaatatgtacgtggaggaagaagtattcgactgcgataacctttaccactgtgggacgtgtgaccgtcttgtcaaagcagccaaatcagctaagttacgaaagttgcctccattccttaccgtgagcctgctgcgcttcaacttcgattttgtaaagtgcgagcggtataaagagacctcctgttataccttccccttgaggattaaccttaagccattctgcgagcagagcgagctcgatgacctggagtatatgacatctagtcaactgttgtacactaaggtggcagcgaccgaagcgataaccatgtacatcctcaaaatgctgatcatttgggagactgggagcttcaagagaaagaaagttaatcagatgtag

SEQ ID NO: 300278 - DNA, 1110 bp, Artificial Sequence
  derived and/or modified sequence
actttctggagacccgccctcgccaacatggcggcgcccagttggggcgggttcgttcgcttcgcgttttggccagggcgggggtctgggctttaggcaggtagtatttagtttcacaatgtttggggacctgtttgaagaggagtattccactgtgtctaataatcagtatggaaaagggaagaaattaaagactaaagctttggagccacctgctcctagagaattcaccaatttaagcggaatcagaaatcagggtggaacctgttacctcaattcccttcttcagactcttcatttcacacctgaattcagagaagctctattttctcttggcccagaagagcttggtttgtttgaagataaggataaacccgatgcaaaggttcgaatcatccctttacagttacagcgcttgtttgctcagcttctgctcttagaccaggaagctgcatccacagcagacctcactgacagctttgggtggaccagtaatgaggaaatgaggcaacatgatgtgcaggaactgaatcgaatcctcttcagcgctttggaaacttctttagttgggacctccggtcatgacctcatctatcgtctgtaccatggaaccattgttaaccagattgtttgtaaagaatgtaagaacgttagcgagaggcaggaagacttcttagatctaacagtagcagtcaaaaatgtatccggtttggaagatgctctctggaacatgtatgtagaagaggaagtttttgattgtgacaacttgtaccactgtggaacttgtgacaggctggttaaagcagcaaagtcggccaaattacgtaagctgcctccttttcttactgtttcattactaagatttaattttgattttgtgaaatgcgaacgctacaaggaaactagctgttatacattccctctccggattaatctcaagcccttttgtgaacagagtgaattggatgacttagaatatatgacctcttctcagttattatacacaaaggtggctgctacggaggccattaccatgtatatattaaagatgttgatcatttgggaaactggcagtttcaagaggaaaaaagtaaaccagatgtgaatctg

SEQ ID NO: 300279 - DNA, 492 bp, Artificial Sequence
  derived and/or modified sequence
atgggcagcagcctgggcctgtgcctgggcaaggcccccagcagcagccagctgttcctgttcttcgccatgggcagcgacgtgcagcccggcaccgagatggagatcgtggtggaggagaccatcagcgtgagagactgcctgaagctgatgctgaagaagagcggcctgcagggcgacgcctggcacctgagaaagatggactggtgctacgaggccggcgagcccctgtgcgaggaggacgccaccctgaaggagctgctgatctgcagcggcgacaccctgctgctgatcgagggccagctgccccccctgggcttcctgaaggtgcccatctggtggtaccagctgcagggccccagcggccactgggagagccaccaggaccagaccaactgcaccagcagctggggcagagtgtggagagccaccagcagccagggcgagaacagaatgggcttccagcagcccgtgcaccacaaggagaagtag

SEQ ID NO: 300280 - DNA, 492 bp, Artificial Sequence
  derived and/or modified sequence
atgggatcttctctagggctctgcctaggcaaagcgccaagctcgagtcagctcttccttttctttgccatgggctcagacgtccagccaggcactgagatggaaatcgtggtggaggaaactatctccgtacgggactgtcttaagctaatgctgaagaagagcggacttcagggcgacgcatggcacctcagaaagatggattggtgttacgaggctggtgagcccctgtgtgaggaagacgctacactgaaagagctgttgatctgctctggggacaccctgcttttaattgagggccagttgccccccctcgggttcctaaaagtcccaatatggtggtatcaactccagggacccagtgggcactgggaatctcaccaggatcaaacaaactgcactagctcatggggcagagtgtggagggcaacgagtagccagggggaaaacaggatggggttccagcagccagtgcatcataaggagaaatag

SEQ ID NO: 300281 - DNA, 492 bp, Artificial Sequence
  derived and/or modified sequence
atgggcagcagcctgggcctgtgcctgggcaaggcccccagcagcagccagctgttcctgttctttgccatgggcagtgatgtgcagcccggcacagagatggagatcgtggtggaggagaccatctctgtgcgggactgcctgaagctgatgctgaagaagagcggcctgcagggagatgcctggcacctgaggaagatggactggtgctatgaagctggggagcccctgtgtgaggaggatgccaccctgaaggagctgctgatctgcagcggggacaccctgctgctgattgagggccagctgccccccctgggcttcctgaaggtgcccatctggtggtaccagctgcagggccccagcggccactgggagagccaccaggaccagaccaactgcaccagctcctggggccgggtgtggagggccaccagcagccagggagaaaataggatgggcttccagcagcctgtgcaccacaaggagaagtag

SEQ ID NO: 300282 - DNA, 492 bp, Artificial Sequence
  derived and/or modified sequence
atgggcagcagcctgggcctgtgcctgggcaaggcccccagcagcagccagttgttccttttcttcgctatgggatctgacgtgcagcctggaaccgagatggaaatcgtggtggaggagactatcagtgtccgcgattgcttgaagttgatgctgaagaagagcggcctgcagggagacgcatggcatctgcgtaagatggattggtgttatgaggctggcgagcccctttgtgaggaggacgcaaccttgaaagagcttcttatttgttccggtgacaccctcctgctgattgaaggtcagcttccaccactcggatttctcaaagttcccatctggtggtatcagttacagggtccctcaggccactgggagtctcatcaagatcagacgaattgtacgagtagttggggacgcgtgtggcgcgccaccagcagccagggcgaaaaccggatgggttttcagcagccggtccaccacaaggaaaaatag

SEQ ID NO: 300283 - DNA, 492 bp, Artificial Sequence
  derived and/or modified sequence
atgggatctagcctcggactgtgtttggggaaagctccaagttcgagtcagctttttctttttttcgctatgggcagtgatgttcaaccaggcacagagatggaaatcgtggtcgaagagactatctcagtgagggactgcctcaaactgatgttgaaaaaatcaggcctgcagggcgacgcctggcacctgcgaaagatggattggtgttatgaggccggtgagcccctgtgtgaggaggacgctaccctgaaggaactgttgatctgctcaggagacaccctcctgctgatcgaggggcaattgccccctctgggctttctgaaggtgcctatttggtggtatcagctacaaggaccgagcggtcattgggaatcccaccaggaccaaaccaactgcaccagttcttggggtagggtttggagagcaaccagcagtcagggggaaaaccgaatgggcttccaacaaccagtccatcataaggagaaatag

SEQ ID NO: 300284 - DNA, 1946 bp, Artificial Sequence
  derived and/or modified sequence
ctccaatacctaatatttaaaaattaccttttggaaactgatttataggacatattttcttccaggtatcttacctttatattgcagaaatccttaaccagaaacaaacacttctgttttctaaatgaaacaccattctttctgattatccgattctcattttactcacgggtttgatctagttatattttttccagctttattttcaaaatttttccatttttttgtgaattttattgcgataccaattatgaaataaaatcttcagttctcatctctgtatcacctcttaccattagatttaatttagtcatggatgagcctaattattgatggtaataacaatctcaactttaaacttggaagaagctacttcttcatttatggattgatttggattatctggcttttaatctatataaacaacagctctttgaacaagtcatttttattaagtaggaaactagactttcatagcttccatttagcattgttacatagaaaacaggaagacaatatcttaagagtatggaaattgaaaatcaaacctaatcttagtgcatgtaatccttttgtctgaagtgcaactcatttttcttctttcttgatattcttgattttcaaagaaatactgatttcagcatttatttttcttagagagctaggaattaataaccttcatcatattatcaaaatttttttaagtgccggacagctatactttgaaggaagcagaattgaagatgggaagttcattgggactgtgtcttggaaaagcaccaagttcgtctcagttgttcctgttttttgcaatggggagtgacgttcaacctgggacagaaatggaaatcgtagtagaagaaacaatatctgtgagagattgtttaaagttaatgctgaagaaatctggcctacaaggagatgcctggcatttacgaaaaatggattggtgctatgaagctggagagcctttatgtgaagaagatgcaacactgaaagaacttctgatatgttctggagatactttgcttttaattgaaggacaacttcctcctctgggtttcctgaaggtgcccatctggtggtaccagcttcagggtccctcaggacactgggagagtcatcaggaccagaccaactgtacttcgtcttggggcagagtttggagagccacttccagccaaggtgagaacagaatgggatttcagcagccagtgcatcataaagagaagtaaattgactgcctgtgctctgagagtcaattgatatatttatttttaaaacgtaagatcttgaaaatcaagacctattaatttcataagtcattccagacatcacataataataacactgtgccatttctgtacgtgctctgtaacctctgtaaagcactatatatcttgttgtttattattatatcaatatattacactttccaaagacttttatgtatcatctctcaagatcctcagggcaacaggggccccatttatcaccacgtaccagaatattgagacttcatccaattctaatgatgtcattttagcccacaggggcagagaccaggagtccacatcctacatgtcttccaatctttctgcctcaaaaccctcaggaactgcttctagggcatttgatatcatctcactgacttctgagaaggaacatagacaagtacaagcatgttgtcttactcagcactcagccgcacacatcacgatgggcagaagtcactatcagtgagttctgttgcccttgtacaaagaggagttccacttcattataaagaaatggagcgagtatatttttaataggcccaactctttagctatgtttttctttttatcaggctttacttatttagtttttctagtgccttgaagtatattacttatatttctttttaatcttttcagcctcagtaataaaattaatataaatgagtc

SEQ ID NO: 300285 - protein, 279 aa, Artificial Sequence
  derived and/or modified sequence
MRALTVQRVKFAMDLPLLKRAGQDLAEKTKNFVSRSLVIGEVLSMADMATGVKCGIIYWLFGGAIRNLGSPEHVTKWFQPLQEQKYTGMFAMTERGHGSNARGIQTEATFDLSAQEFVIDTPCENAEKMYIGNAMYGNYAAVFAQLIIDGRSQGPHCFIVPVRDENGSLYPGVTAIDMMYKEGLHGVDNGILIFDKVRIPRENLLDKFGSVAPDGQYHSPIRNKSARFNAMLAALTPSRLAVAFQAMGAMKLGLTIAIRYSHRSRIISQNCCSAPAGLY

SEQ ID NO: 300286 - DNA, 2714 bp, Artificial Sequence
  derived and/or modified sequence
acctgctgggagctggaggaggcgcggagcgaagccggccctgccagccacgcggagaagcagaggcaggtgagcgcgatgcagccggcgccgggtctggggctcggggactcctccctgcaccgctacctggacggcgacttctggagcctcaagaacgagctgcgcggactcctcggcggcgcccgctcttccggcaaaggtatgatttaagcttggatgaaatgagagctttgacagttcagagagtgaagtttgccatggacctgcctctgttaaaacgtgcaggtcaggatctggcagagaaaacaaagaattttgtcagccgaagccttgtcataggagaagtcctctccatggcggacatggccacaggagtgaagtgcggaataatttattggctatttggtggtgctatcaggaatctcggaagccctgaacatgttactaagtggtttcagccactccaggagcagaaatacactgggatgtttgcaatgaccgagaggggccatgggagcaacgcgagagggatccagaccgaagccacctttgacctctctgcccaggagtttgtaattgacacgccgtgtgaaaatgcggagaagatgtatattggaaatgccatgtacgggaattatgcagctgtctttgcccagctcatcatagatggaagatctcaagggccccactgtttcatcgttcctgtccgggatgaaaacggaagcttgtacccaggagtcacagctattgatatgatgtacaaggagggtctgcatggtgtggacaatgggatattaatatttgacaaggttcggatacccagggagaacctgctggataagtttggttccgtggctccagatggacagtaccattcgcctattaggaacaagagtgcaagattcaatgccatgctggcagcactgaccccttcgagattagctgtggctttccaagctatgggtgccatgaagcttgggttgacgatagccattcgctatagccacagccggaggcagtttgggcccaaaaccaaggaagaggtgaagatcattgagcaccaaacacagaccctgcggctgatgccccacctggccacagccttggccctgaccttcgtcagcaggtatgctggggccctcctggatgaggatgtcttccagggaaaggagctggtcaacagtcgctcgctgcaggctctggtggcggggctgaaggcctacagcacctgggagaacatccgctgcctgcaggactgccgcgagtgcactggaggcatgggttacatgatggaaaatcgaatctcaggcttaaagtgtgacacagatgtgtttgccacttttgaaggtgacgatgttgttatgcttcaggttgtggggcgggaactgctggcccaatacaccaaacagtatgaagaaaaaccactctttggcctgctccaaaactgggctgaatctgtgggggacaagctgagaaccagtttcctggcatttaacatggacacagttgatgatctcgcctttctgttgaaagcagtgaaatttcgtgaaagggttcttcagcggggtttggtggccagaatttattataaggtaaagaccaagaaggaggattttttccatgcctggaactcgtgtctgcaccacgtggcttctctgtccctggcacacactcaccgagttaccttagagcagttctccctagcagtgaagagctgtcctgaccaagaggaccagactttgttaatgaagttttgtctgttgtatggaaccaagctggtgtttcaggagcgggcctggtatttagaacataaatacttgactcccatggccagcacgaggatcaggaatcaggagagatgctgaaacacaaacaggtataagactcagtctccacatgaagggagctcatatccaaggacacaaaaccactttaaaaacataaatactggccaggtgcagtggctcatgcctgtaatcccagcactatgggaggctgaggcgggcagatctcctgagctcaggagttcgacaccatcttgggcaacatggtgaaaccctgtctactaaaatacaaaaaaattagctgggcgtggtggcatgtggctgtagtcccagctactcgggaggctgaggcacgagaatcgcttgagccctggagttggaggttgcagtgagcagagattgcgccactgtactccagtttggactacagagtgagactccatctcaaaacaaaacaaaacaacaacagcaaaaaacaacaaaacaaaacacaaatactctcacagggcatggaggttttcgaatgaacttggccataagaataaattcagagttgacagaacagacgtcttaggaataaatgccattcttatgctagaccttgaagagtagaaaattaagagatggtggcccaattgagaggggaaaatgcagttgaaacttcagacagggttgataaagtgaggacgatcatagacatggagtacttagacatattaataaacaataaagactttacctgtctaatggaaaacctggagaagtcgtcaggaaccagactacagtggaccctggagaaccttgaagaacatttttccttttcaggaaaacggaggttacagagaaaagtatatgtaatgatgctacagtaatgtatttctgtataacaaatgactccaaacttacgacttaaaacaaccaccactt

SEQ ID NO: 300287 - protein, 547 aa, Artificial Sequence
  derived and/or modified sequence
MRALTVQRVKFAMDLPLLKRAGQDLAEKTKNFVSRSLVIGEVLSMADMATGVKCGIIYWLFGGAIRNLGSPEHVTKWFQPLQEQKYTGMFAMTERGHGSNARGIQTEATFDLSAQEFVIDTPCENAEKMYIGNAMYGNYAAVFAQLIIDGRSQGPHCFIVPVRDENGSLYPGVTAIDMMYKEGLHGVDNGILIFDKVRIPRENLLDKFGSVAPDGQYHSPIRNKSARFNAMLAALTPSRLAVAFQAMGAMKLGLTIAIRYSHSRRQFGPKTKEEVKIIEHQTQTLRLMPHLATALALTFVSRYAGALLDEDVFQGKELVNSRSLQALVAGLKAYSTWENIRCLQDCRECTGGMGYMMENRISGLKCDTDVFATFEGDDVVMLQVVGRELLAQYTKQYEEKPLFGLLQNWAESVGDKLRTSFLAFNMDTVDDLAFLLKAVKFRERVLQRGLVARIYYKVKTKKEDFFHAWNSCLHHVASLSLAHTHRVTLEQFSLAVKSCPDQEDQTLLMKFCLLYGTKLVFQERAWYLEHKYLTPMASTRIRNQERC

SEQ ID NO: 300288 - DNA, 1644 bp, Artificial Sequence
  derived and/or modified sequence
atgagagccctgaccgtgcagagagtgaagttcgccatggacctgcccctgctgaagagagccggccaggacctggccgagaagaccaagaacttcgtgagcagaagcctggtgatcggcgaggtgctgagcatggccgacatggccaccggcgtgaagtgcggcatcatctactggctgttcggcggcgccatcagaaacctgggcagccccgagcacgtgaccaagtggttccagcccctgcaggagcagaagtacaccggcatgttcgccatgaccgagagaggccacggcagcaacgccagaggcatccagaccgaggccaccttcgacctgagcgcccaggagttcgtgatcgacaccccctgcgagaacgccgagaagatgtacatcggcaacgccatgtacggcaactacgccgccgtgttcgcccagctgatcatcgacggcagaagccagggcccccactgcttcatcgtgcccgtgagagacgagaacggcagcctgtaccccggcgtgaccgccatcgacatgatgtacaaggagggcctgcacggcgtggacaacggcatcctgatcttcgacaaggtgagaatccccagagagaacctgctggacaagttcggcagcgtggcccccgacggccagtaccacagccccatcagaaacaagagcgccagattcaacgccatgctggccgccctgacccccagcagactggccgtggccttccaggccatgggcgccatgaagctgggcctgaccatcgccatcagatacagccacagcagaagacagttcggccccaagaccaaggaggaggtgaagatcatcgagcaccagacccagaccctgagactgatgccccacctggccaccgccctggccctgaccttcgtgagcagatacgccggcgccctgctggacgaggacgtgttccagggcaaggagctggtgaacagcagaagcctgcaggccctggtggccggcctgaaggcctacagcacctgggagaacatcagatgcctgcaggactgcagagagtgcaccggcggcatgggctacatgatggagaacagaatcagcggcctgaagtgcgacaccgacgtgttcgccaccttcgagggcgacgacgtggtgatgctgcaggtggtgggcagagagctgctggcccagtacaccaagcagtacgaggagaagcccctgttcggcctgctgcagaactgggccgagagcgtgggcgacaagctgagaaccagcttcctggccttcaacatggacaccgtggacgacctggccttcctgctgaaggccgtgaagttcagagagagagtgctgcagagaggcctggtggccagaatctactacaaggtgaagaccaagaaggaggacttcttccacgcctggaacagctgcctgcaccacgtggccagcctgagcctggcccacacccacagagtgaccctggagcagttcagcctggccgtgaagagctgccccgaccaggaggaccagaccctgctgatgaagttctgcctgctgtacggcaccaagctggtgttccaggagagagcctggtacctggagcacaagtacctgacccccatggccagcaccagaatcagaaaccaggagagatgctag

SEQ ID NO: 300289 - DNA, 1644 bp, Artificial Sequence
  derived and/or modified sequence
atgagagccctgacagtgcagcgggtgaaatttgccatggacttaccactgctcaagcgcgccggacaggatctggctgagaaaaccaagaattttgttagccggtcactcgttatcggcgaggtactgtcaatggccgacatggctaccggcgtgaagtgcggcatcatctactggctattcggcggtgccatccgcaatcttggctcccccgaacacgtgaccaagtggttccaaccccttcaggaacagaaatatacggggatgtttgctatgaccgagcggggtcatggatccaacgcgcgcggtattcaaacagaggccacctttgatttgagcgcccaagagtttgtcatagatacaccctgtgagaacgccgagaaaatgtacatcggcaacgcgatgtacggaaactacgcggccgtctttgcccagctcataatcgatgggaggtctcagggaccccattgttttatcgtcccagtccgggatgaaaacgggtcactctaccccggtgtcacggccatcgacatgatgtataaggaaggtctgcatggagttgataacgggattctgatatttgacaaagttcgaattccacgcgaaaacctgctggataagtttgggagcgtggcccctgatggacagtaccactccccaatcaggaataagtctgcaaggtttaatgcaatgttggccgcactaacaccgagtaggcttgccgtggccttccaggctatgggggcaatgaagctcggcctgactattgctatcaggtacagccacagtcgcaggcaatttggcccaaagaccaaagaagaggtgaaaattattgaacatcaaacccaaaccctgcgtctgatgcctcatttagccaccgccctggcccttacctttgtgtcacgttacgcaggcgccttgctggacgaggatgtgttccagggaaaagaactggttaacagccggtctcttcaggcgcttgtggccggccttaaagcgtacagcacatgggagaacattcgctgtctacaggattgcagagagtgcaccggagggatgggctatatgatggagaacaggatcagtggccttaagtgtgataccgatgtctttgcaactttcgagggggatgatgtcgtgatgcttcaggttgttggaagggagctgctcgcacagtacaccaaacagtatgaggagaaaccattgttcgggctgctgcaaaattgggcggagagcgttggcgacaaactccgaacatcttttctggccttcaatatggataccgtagatgacctggccttcctcctgaaagccgttaagtttagggagagggtattacagagggggcttgtagccagaatctattataaagtgaaaaccaaaaaagaagatttcttccacgcttggaacagctgccttcaccatgtggccagtctgagtttggctcacacccacagggtaactctcgaacagtttagtttagcggtgaaatcttgcccagatcaagaagatcagacactcctgatgaagttttgtcttctctatggaactaaactggtgttccaggaacgcgcttggtatctcgaacacaagtacttaacccctatggcatcaacaaggatccgtaaccaggagagatgttag

SEQ ID NO: 300290 - DNA, 1644 bp, Artificial Sequence
  derived and/or modified sequence
atgagggccctgactgtgcagagggtgaagtttgccatggacctgcccctgctgaagagagctggccaggacctggccgagaagaccaagaactttgtgagccgcagcctggtgattggagaggtgctgtccatggctgacatggccaccggggtgaagtgtggcatcatctactggctgtttggaggagccatccggaacctgggcagccctgagcacgtgaccaagtggttccagcccctgcaggagcagaagtacacaggcatgtttgccatgacagagcggggccacggcagcaatgcccggggcatccagacagaggccacctttgacctgagcgcccaggagtttgtgattgacaccccctgtgaaaatgctgagaagatgtacatcggaaatgccatgtatggcaactatgctgctgtgtttgcccagctgatcattgatggccgcagccagggcccccactgcttcatcgtgcctgtgagagatgaaaatggcagcctgtacccaggagtgacagccatcgacatgatgtacaaggagggcctgcatggagtggacaatggcatcctgatctttgacaaggtgcgcatcccccgggagaacctgctggacaagtttggatctgtggccccagatggccagtaccacagccccatccggaacaagagcgcccgcttcaatgccatgctggccgccctgacccccagccggctggccgtggccttccaggccatgggcgccatgaagctgggcctgaccatcgccatccgctacagccacagccggcggcagtttggccccaagaccaaggaggaggtgaagatcatcgagcaccagacccagaccctgcggctgatgccccacctggccacagccctggccctgacctttgtgagccgctatgctggggccctgctggatgaagatgtgttccagggcaaggagctggtgaacagccgcagcctgcaggccctggtggccggcctgaaggcctacagcacctgggagaacatccgctgcctgcaggactgccgggagtgcaccggcggcatgggctacatgatggagaaccgcatcagcggcctgaagtgtgacacagatgtgtttgccacctttgaaggagatgatgtggtgatgctgcaggtggtgggccgggagctgctggcccagtacaccaagcagtatgaggagaagcccctgtttggcctgctgcagaactgggccgagagcgtgggggacaagctgcggaccagcttcctggccttcaacatggacacagtggatgacctggccttcctgctgaaggctgtgaagttccgggagcgggtgctgcagaggggcctggtggcccgcatctactacaaggtgaagaccaagaaggaggacttcttccacgcctggaacagctgcctgcaccacgtggccagcctgagcctggcccacacccaccgggtgaccctggagcagttcagcctggccgtgaagagctgcccagaccaggaggaccagaccctgctgatgaagttctgcctgctgtatggcaccaagctggtgttccaggagcgggcctggtacctggagcacaagtacctgacccccatggccagcacccgcatccggaaccaggagcgctgctag

SEQ ID NO: 300291 - DNA, 1644 bp, Artificial Sequence
  derived and/or modified sequence
atgcgggccctgaccgtgcagcgggtgaagttcgccatggacctgccactgcttaagagagctgggcaagacctggccgaaaagacaaagaattttgtttcaaggagcctcgtaattggggaagtgctttccatggcagacatggctactggtgttaagtgtggtatcatctattggctgtttggaggggctattaggaaccttggcagcccagaacacgtaaccaagtggttccaacccctgcaagaacagaaatatactggaatgtttgccatgactgaacgaggccatggttcaaatgctcgaggaatccagactgaggccacattcgacctcagtgcacaagagtttgtcatcgatacaccatgtgagaatgccgagaagatgtatatcggcaacgctatgtatggaaattacgctgcagtatttgctcagcttatcatcgacggaagatcccagggaccacactgcttcatcgtgcccgtgcgcgacgagaacggatctctgtatccaggtgtaacggctatcgacatgatgtacaaagaagggctgcatggggtggacaatggtatcttgatctttgataaggtcaggatcccaagagagaatctcttagacaagtttggatctgtagcgcctgacggacagtatcacagcccaatacgtaacaaatcagccagatttaacgctatgctggctgcccttacccctagcagacttgccgtggccttccaagctatgggggctatgaagttaggcctcacaatcgcgattcgctactctcactcacgaagacaatttggtcctaaaacaaaagaagaggtgaagatcatcgagcatcaaacccagaccctgcgccttatgccccacctggctactgcactggctttgacgtttgtctctcggtatgccggcgccctgctggacgaggacgtgttccagggtaaagagttagtgaattcccgcagtctgcaggccttggtggctggtctcaaggcttacagtacctgggagaacataagatgcttgcaggactgccgggagtgtaccggcggcatgggatacatgatggaaaacagaatatccggtcttaagtgcgacacagatgtattcgcaacattcgagggcgatgacgttgtcatgctgcaggtcgtcggccgagagttgcttgctcagtataccaaacagtatgaggagaagcccctcttcggcttgcttcagaactgggccgagtctgtgggggacaaactgcggacaagcttcctcgcctttaacatggatactgtagacgaccttgcattcttgttaaaggcagtcaagtttagggaacgcgtgctacaacgcgggctagtggcaaggatctactacaaagttaaaactaagaaggaggactttttccatgcttggaatagctgtctccatcacgtggccagtctgtctctggctcacacacatagggtgacactggagcagttctctctggccgtaaaatcatgtcccgaccaggaggaccagacgttgcttatgaagttctgtcttctgtatgggactaagctcgttttccaagaacgcgcctggtacctcgagcacaagtacctgacacctatggcttctactcgtatccgcaaccaggagcgctgctag

SEQ ID NO: 300292 - DNA, 1644 bp, Artificial Sequence
  derived and/or modified sequence
atgagagcactgactgtccagcgcgttaaattcgccatggatttgcccctgctgaagcgtgctgggcaggacctcgccgagaagaccaaaaatttcgtgtccagaagtctggtcatcggtgaggtgcttagtatggctgacatggcgaccggcgttaagtgtggaattatatactggctcttcggcggagccatccgtaacctggggagccccgaacacgtaacaaaatggttccagcctctgcaagagcagaagtacaccgggatgttcgctatgacagagcgtggccacgggagcaacgccagaggtattcagaccgaggccaccttcgatctctccgctcaggaattcgtaatcgataccccgtgtgaaaacgctgagaaaatgtatattggaaacgccatgtatggtaattacgctgccgtctttgctcagctgattatagatggtcgctcgcagggcccacattgcttcattgtccctgtgcgagacgagaacggctctttgtatcccggtgtaaccgcgattgatatgatgtataaagagggtctacacggagttgataatgggatcttgatcttcgataaagtacggatcccccgtgaaaatctactggacaagtttggctctgtcgccccagatggccagtatcacagcccaattcggaacaaaagcgcccgtttcaacgctatgctagcggcactcactccatcccgcctggccgttgcctttcaagccatgggggcaatgaagttaggtttaacaatcgccattcgctactcacacagccgaagacagtttggacccaagaccaaagaggaggttaaaatcatcgaacaccagacacaaacgttgaggctaatgccgcatctcgcgacggccctggctcttaccttcgtgagtcgttatgccggtgcactcctggatgaggacgtttttcaggggaaagagcttgtgaattcgaggagtctccaggcacttgtggctggacttaaagcgtatagtacatgggagaacattcgttgcctgcaggattgccgggagtgcaccggaggtatgggctacatgatggagaatcggatttcagggctgaagtgtgatactgatgtgttcgctaccttcgagggggacgatgttgtgatgctgcaggtggtcgggagggagttgttggctcagtacaccaaacagtacgaggagaaacccctctttggactactgcagaattgggcggaaagcgttggtgacaaactccgcacttcatttctggcttttaacatggacactgtggacgacctggcatttctcttgaaagctgtgaaattccgagaacgggtacttcagcggggactcgtggccagaatttattataaagtcaaaaccaagaaagaggacttctttcatgcctggaattcttgtcttcatcacgtggcctctctgtcacttgcacatacccaccgcgtgacgcttgaacagttcagccttgctgttaagagctgtccagatcaggaggaccagactcttcttatgaagttttgtctgctgtacggaacgaaactcgtttttcaggaacgtgcatggtaccttgagcacaaatacttgacaccaatggctagcacgcgtattcgaaaccaggagcgttgctag

SEQ ID NO: 300293 - protein, 70 aa, Artificial Sequence
  derived and/or modified sequence
MRALTVQRVKFAMDLPLLKRAGQDLAEKTKNFVSRSLVIGEVLSMADMATGVKCGIIYWLFGGAIRNLGS

SEQ ID NO: 300294 - DNA, 840 bp, Artificial Sequence
  derived and/or modified sequence
atgagagccctgaccgtgcagagagtgaagttcgccatggacctgcccctgctgaagagagccggccaggacctggccgagaagaccaagaacttcgtgagcagaagcctggtgatcggcgaggtgctgagcatggccgacatggccaccggcgtgaagtgcggcatcatctactggctgttcggcggcgccatcagaaacctgggcagccccgagcacgtgaccaagtggttccagcccctgcaggagcagaagtacaccggcatgttcgccatgaccgagagaggccacggcagcaacgccagaggcatccagaccgaggccaccttcgacctgagcgcccaggagttcgtgatcgacaccccctgcgagaacgccgagaagatgtacatcggcaacgccatgtacggcaactacgccgccgtgttcgcccagctgatcatcgacggcagaagccagggcccccactgcttcatcgtgcccgtgagagacgagaacggcagcctgtaccccggcgtgaccgccatcgacatgatgtacaaggagggcctgcacggcgtggacaacggcatcctgatcttcgacaaggtgagaatccccagagagaacctgctggacaagttcggcagcgtggcccccgacggccagtaccacagccccatcagaaacaagagcgccagattcaacgccatgctggccgccctgacccccagcagactggccgtggccttccaggccatgggcgccatgaagctgggcctgaccatcgccatcagatacagccacagaagcagaatcatcagccagaactgctgcagcgcccccgccggcctgtactag

SEQ ID NO: 300295 - DNA, 2188 bp, Artificial Sequence
  derived and/or modified sequence
agaggcaggtgagcgcgatgcagccggcgccgggtctggggctcggggactcctccctgcaccgctacctggacggcgacttctggagcctcaagaacgagctgcgcggactcctcggcggcgcccgctcttccggcaaaggtatgatttaagcttggatgaaatgagagctttgacagttcagagagtgaagtttgccatggacctgcctctgttaaaacgtgcaggtcaggatctggcagagaaaacaaagaattttgtcagccgaagccttgtcataggagaagtcctctccatggcggacatggccacaggagtgaagtgcggaataatttattggctatttggtggtgctatcaggaatctcggaagccctgaacatgttactaagtggtttcagccactccaggagcagaaatacactgggatgtttgcaatgaccgagaggggccatgggagcaacgcgagagggatccagaccgaagccacctttgacctctctgcccaggagtttgtaattgacacgccgtgtgaaaatgcggagaagatgtatattggaaatgccatgtacgggaattatgcagctgtctttgcccagctcatcatagatggaagatctcaagggccccactgtttcatcgttcctgtccgggatgaaaacggaagcttgtacccaggagtcacagctattgatatgatgtacaaggagggtctgcatggtgtggacaatgggatattaatatttgacaaggttcggatacccagggagaacctgctggataagtttggttccgtggctccagatggacagtaccattcgcctattaggaacaagagtgcaagattcaatgccatgctggcagcactgaccccttcgagattagctgtggctttccaagctatgggtgccatgaagcttgggttgacgatagccattcgctatagccacaggtccagaatcatctcccagaactgctgttcagctccagctggtctttattgagcccctcttgtggaccaggctaatttcctgaaaactggtttttgctaacgtttcttacgcttgctcgtgaaatcagccacttaactgttctgggttttcccgtggcagatccctataggcttctcactgcactatcccaaactttttatctgagaatgttgtgtggcaagatgtctgcagagtgccgcttaggagatgctggcctggcgtccacgggtctgctgtgtatgtctctccaggcagatggcctgtctctgcctggcaaggacgatctggggtggaaaaactctgatctgaaagtgaaatcattgactccgttaccatgttctgaattcccagatctccctgatatggaaagtgaaaattggcttctattacacaatgcatcaaaattcttttgtataggaccagaccactgatatcaagggcagtgcactgactttcagttcctctgcatcccttggtcatgttcccacctttcaatgggaacagagaataaaaattccagctctagggcccagcctagtggccacctctcacggacaggcacccggctgctcagtgttatccaattactagaggccattcctagcatttcaacttggggaattaatttactattactttatttttatctttagagacagagtcttgctctgtcacccagactagagtgtagtggcatgatcatagctcactgcagccttgaactcctgagctcaggcaatcctcctgccacagccacctgagtagctggaactataggcatgtgccatcatgcccaactaattttatttttatttcagttgtagagatggagccttaccctgttgcccaggctggtctctgactcctggtctctagtgatcctcctgccttggcctcccaaagtgctaggattataggtgtgagccaacatgctgtccccattattgactgttaccctaaagtgtgtgttgcctttctagtttgagtagaaagtccagcattatctttttggataatatccaggttttgctgtttctttctttatttttcataatgagaacatttgctctcttgctgacattggagggcgtctgtttacctctcctgtaggcacacaaaattcccaacgtttatttgaagaaaaagacaattatttgagtaatttgaataaataaacattttaagtgattcccaaaa

SEQ ID NO: 300296 - DNA, 213 bp, Artificial Sequence
  derived and/or modified sequence
atgagagccctgaccgtgcagagagtgaagttcgccatggacctgcccctgctgaagagagccggccaggacctggccgagaagaccaagaacttcgtgagcagaagcctggtgatcggcgaggtgctgagcatggccgacatggccaccggcgtgaagtgcggcatcatctactggctgttcggcggcgccatcagaaacctgggcagctag

SEQ ID NO: 300297 - DNA, 840 bp, Artificial Sequence
  derived and/or modified sequence
atgagagctctcacagttcagcgagtcaagtttgccatggatcttcccctcctgaaaagggctgggcaggacctggccgagaagactaagaactttgtaagtcgatctctggtcataggcgaggttctatccatggccgatatggccactggagtgaaatgcgggataatttactggctctttggaggggctatacgcaacctcggctctcccgagcatgtgacaaaatggtttcagcccttgcaggagcaaaagtatacaggcatgttcgcaatgactgagagagggcatgggtccaacgcccgaggcatacagacagaagccacattcgacctctctgcacaggagtttgtgatcgacaccccctgcgagaatgctgagaagatgtatataggaaatgccatgtacggcaattacgccgcagtttttgcgcagctgatcatcgatggacgcagtcaaggacctcattgcttcatcgtgccagtgagagacgaaaatggtagtctttatcctggggttaccgcgatcgatatgatgtataaagaaggcttacatggagtggataatggaatactcatcttcgacaaagtgagaatccccagagagaatttactagataaattcggctcagtggcccctgatggccagtatcactcccctatacgtaacaaatctgctagattcaatgcaatgttggctgcgctaactccctcaaggcttgcagttgcatttcaggcaatgggggccatgaagttgggtctgactatcgcgatccgctatagccatcggagcagaatcatcagccagaattgctgctctgctcctgccggactctactag

SEQ ID NO: 300298 - DNA, 213 bp, Artificial Sequence
  derived and/or modified sequence
atgcgtgcactgacagttcagcgtgtgaaatttgccatggacctgccgctcctgaagcgggccggccaggatctggccgaaaaaacaaaaaatttcgtgagcagaagtttagtgatcggggaggtgctctcaatggccgacatggccacaggagtgaaatgtgggataatctactggctgtttgggggtgcaattcgtaacttgggtagctag

SEQ ID NO: 300299 - DNA, 840 bp, Artificial Sequence
  derived and/or modified sequence
atgagggccctgactgtgcagagggtgaagtttgccatggacctgcccctgctgaagagagctggccaggacctggccgagaagaccaagaactttgtgagccgcagcctggtgattggagaggtgctgtccatggctgacatggccaccggggtgaagtgtggcatcatctactggctgtttggaggagccatccggaacctgggcagccctgagcacgtgaccaagtggttccagcccctgcaggagcagaagtacacaggcatgtttgccatgacagagcggggccacggcagcaatgcccggggcatccagacagaggccacctttgacctgagcgcccaggagtttgtgattgacaccccctgtgaaaatgctgagaagatgtacatcggaaatgccatgtatggcaactatgctgctgtgtttgcccagctgatcattgatggccgcagccagggcccccactgcttcatcgtgcctgtgagagatgaaaatggcagcctgtacccaggagtgacagccatcgacatgatgtacaaggagggcctgcatggagtggacaatggcatcctgatctttgacaaggtgcgcatcccccgggagaacctgctggacaagtttggatctgtggccccagatggccagtaccacagccccatccggaacaagagcgcccgcttcaatgccatgctggccgccctgacccccagccggctggccgtggccttccaggccatgggcgccatgaagctgggcctgaccatcgccatccgctacagccacaggagccgcatcatcagccagaactgctgcagcgccccagctggcctgtactag

SEQ ID NO: 300300 - DNA, 213 bp, Artificial Sequence
  derived and/or modified sequence
atgagggccctgactgtgcagagggtgaagtttgccatggacctgcccctgctgaagagagctggccaggacctggccgagaagaccaagaactttgtgagccgcagcctggtgattggagaggtgctgtccatggctgacatggccaccggggtgaagtgtggcatcatctactggctgtttggaggagccatccggaacctgggcagctag

SEQ ID NO: 300301 - DNA, 840 bp, Artificial Sequence
  derived and/or modified sequence
atgcgggccctgaccgtgcagcgggtgaagttcgccatggacctgccgctactgaagcgggctggacaagatctagccgagaaaaccaaaaactttgtttcaagatcactcgtcatcggggaggttcttagtatggccgacatggctaccggcgtgaaatgcggcattatatactggttattcggcggcgctattagaaaccttgggtcccccgagcatgtgacaaaatggtttcagcccctacaggagcaaaagtataccggcatgttcgcgatgactgagcgcggacatggatctaacgctagaggcattcagactgaggccacatttgacctaagcgcacaagaattcgtgatagatacaccttgcgagaatgccgaaaaaatgtacattggtaatgcgatgtacggaaattatgctgccgtgttcgcccagttgatcatcgacggacgaagccagggtccccactgcttcatcgtccctgtacgcgatgagaatggttccctttatcccggcgtaacggcaattgacatgatgtacaaggaggggttgcacggggtggacaatggaatattgatttttgacaaggttcggatacctagggagaatctgctcgacaagtttggctccgttgcccccgatggccagtatcactccccgattcgtaataagtcagcccgctttaacgcaatgctcgcggccctaaccccgtctagattggcagtggcatttcaggcaatgggggcgatgaaattgggcctgactattgctataagatactcccaccggagtagaataatctcccaaaactgctgttcggcccccgcaggcctttactag

SEQ ID NO: 300302 - DNA, 213 bp, Artificial Sequence
  derived and/or modified sequence
atgcgggccctgaccgtgcagcgggtgaagttcgccatggacctgcctctgctgaaacgcgctggccaggacctagccgagaaaacaaagaacttcgttagtaggtcgctggtcatcggcgaagtcctttctatggccgacatggcaacaggcgtaaaatgcggcatcatttactggctcttcggcggagcgatccgaaatctgggaagctag

SEQ ID NO: 300303 - DNA, 840 bp, Artificial Sequence
  derived and/or modified sequence
atgcgggctttaacagttcagagagtgaagttcgccatggacctgcccctgctaaaacgcgctggccaggacttagcggaaaaaacaaagaacttcgtgagtagatccctcgtcatcggtgaggtgttgtccatggccgatatggcaacaggcgtgaaatgcggaatcatttactggctgtttggaggagccatccgcaatctaggctctcccgaacatgtgactaagtggtttcagccactgcaggagcagaaatacaccggcatgttcgctatgacagagagaggccacggctcaaacgccagagggattcagactgaggcgacatttgacctgagcgcccaggaatttgtgatagacactccatgcgaaaacgccgagaagatgtatataggcaatgcaatgtacggcaattacgccgctgtgttcgcacagttaattattgatgggagaagccagggtcctcactgtttcatcgtaccagtgcgcgacgagaatggcagcctctatccgggagtgaccgccatagatatgatgtacaaggaaggtctgcacggtgtcgataatgggatcctgatctttgataaggtgcggatcccacgcgagaacctgctcgataaatttggctcggtggctccagacgggcagtaccatagtcccattcggaataaatccgcacgctttaatgccatgttggcagctttaacacctagccgcctagccgttgctttccaagctatgggagctatgaaactggggttaacgatagcgattcgctattctcatcgtagccggataatttcccagaactgctgctccgcccctgctggactgtactag

SEQ ID NO: 300304 - DNA, 213 bp, Artificial Sequence
  derived and/or modified sequence
atgagagcattgacggtacagcgcgtgaagtttgccatggaccttcccctgctcaagcgcgctgggcaggacttagctgagaaaaccaagaattttgttagccgatccttggtgatcggggaagttttgtccatggcggacatggctaccggggtcaaatgtgggattatttactggctttttggaggagctatccgaaatctgggctcttag

SEQ ID NO: 300305 - DNA, 486 bp, Artificial Sequence
  derived and/or modified sequence
ggacaacgccctggcgagggcgaggtggggtgtgcgccgcgcctgagaggcgggtccctgcctcgccgcaggtgacgggctcccctccccaggtgtgtgggcgcagccggccgccgccgacctcttcggccccctgagaggtgccctctcctcccgagctccctcccccacgaagagtcgggtgcagggctgggccccgcggtgacaggcgcggtgtctacgaagaccgtgtggctggaagatcggccttgctggtatgatttaagcttggatgaaatgagagctttgacagttcagagagtgaagtttgccatggacctgcctctgttaaaacgtgcaggtcaggatctggcagagaaaacaaagaattttgtcagccgaagccttgtcataggagaagtcctctccatggcggacatggccacaggagtgaagtgcggaataatttattggctatttggtggtgctatcaggaatctcggaagc

SEQ ID NO: 300306 - DNA, 2820 bp, Artificial Sequence
  derived and/or modified sequence
atgagacctgggaccggcgcagagagaggcgggctcatggtgtccgaaatggaatcccatccccctagccagggtccgggcgatggggaacgcaggctgtccggatcaagcctgtgcagtggcagttgggtcagcgctgacgggttcctgcgaagaagaccaagtatggggcatccgggcatgcactacgcccctatgggaatgcacccgatggggcagcgggcgaatatgccaccagttccgcatggcatgatgccccagatgatgccacccatgggcggcccacctatgggacagatgccagggatgatgtcttcagtgatgcctggaatgatgatgtcccacatgtcacaggccagtatgcaacccgcactcccccccggggtcaactccatggatgtggccgcaggcacatacactctttataagagcatgtggacagaacacaagtctccagacggaaggacatactactataacaccgagaccaagcagagtacctgggaaaagccggatgatctcaagacacccgctgagcagctgttatccaagtgcccatggaaagaatacaagtcagacagtggcaagccatactactataattcacaaacaaaagagagccgctgggctaaacccaaggagttggaagacctcgaagggaaaatgggaaagattaagtactctaagcaagaggagtgtaccacaacctcaactgcaccagtcccaaccaccgagatccctacaacaatgagcactatggctgcggccgaggccgctgccgctgttgttgctgcagcggccgctgccgcagccgccgctgcagccgcgaatgcgaacgcttctacatctgcatctaatacagtttccgggaccgtgccagtcgtgcccgagcctgaagtaacaagcatagttgcaactgtggtggataatgagaataccgtcactatatcgaccgaggagcaagcccagctgacctcaactccagctatccaggaccagtcagtggaggtgtcttctaatactggcgaggagacatccaagcaagaaaccgtggccgatttcacaccaaagaaagaggaggaggaatcacagcccgctaaaaaaacgtacacttggaatacaaaagaggaggcaaagcaggcgttcaaggagctgctcaaagagaaaagggtcccctccaatgcctcttgggaacaagccatgaagatgataatcaacgatccaaggtattcggcactggcaaagctttccgaaaagaagcaagcctttaatgcttacaaggtgcagaccgagaaggaggagaaagaagaagcccggtcgaagtacaaggaggcaaaagagagcttccagcgatttctcgagaaccatgaaaagatgacaagtacaactagatacaagaaagcggagcagatgttcggggaaatggaggtctggaatgccattagtgaaagagatcgcctggagatttacgaggacgtgctattcttcctcagcaaaaaggagaaagagcaggccaagcagctgaggaagcgtaactgggaggccttgaagaatattcttgataatatggctaacgtgacttatagtacaacttggtcggaagctcagcagtacctcatggacaatccaacttttgctgaggatgaggagctccagaatatggataaagaggacgcacttatttgctttgaggagcacattagggccctcgaaaaagaagaggaggaggagaagcagaaaagcctgcttagggaacggcggcgtcagcgaaagaaccgggaaagcttccaaatcttcctggatgagctgcacgagcatggacagttacactctatgagcagctggatggagttataccccactatttcctctgacattagattcacaaacatgctgggccagcccggatctaccgcgcttgatttgtttaaattttacgtagaagatctgaaggctaggtaccatgatgagaaaaaaatcatcaaggatattctgaaggataaggggttcgtggtggaggtgaatactacatttgaggatttcgtcgcaataatatctagtaccaagcgctcaacaacactcgatgcaggcaatataaagctggcatttaatagcctcctggagaaggcagaggcgcgcgaaagggaaagagaaaaagaggaggcaaggaagatgaagaggaaggaatccgcctttaaaagcatgctgaagcaagctgcaccgcccatcgagttggacgccgtgtgggaagacatcagggagcgctttgttaaagagcccgcctttgaggatatcacccttgaatcagaaaggaagcggattttcaaggattttatgcatgtgctggagcacgaatgccaacatcatcattccaagaacaaaaaacattcaaagaaatctaagaaacatcaccggaagcggtcaagatctcgtagcggttccgactccgacgacgacgacagccattcaaaaaaaaaaagacaaaggtccgagtcaagatcggcttcggagcatagttcatccgcagagtcagagcgttcatacaagaaaagcaaaaaacacaagaagaagtccaagaaaaggcgtcacaagtctgattcccccgaaagcgacgccgagcgcgagaaagataagaaggagaaagaccgtgagagcgagaaggatcgaacccgccaaaggtcagaaagtaaacacaaatctcctaagaaaaagacgggcaaagactcaggtaactgggatacatccggtagcgagttgagcgaaggtgagttagagaaaaggcgcagaaccctgttggagcagcttgacgacgatcaatag

SEQ ID NO: 300307 - DNA, 2820 bp, Artificial Sequence
  derived and/or modified sequence
atgaggcctggcactggagctgagcggggcggcctgatggtgtctgagatggagagccacccccccagccagggccctggagatggagagcggcggctgagcggcagcagcctgtgcagcggctcctgggtgtctgcagatggcttcctgcggcggcggcccagcatgggccaccctggcatgcactacgcccccatgggcatgcaccccatgggccagagggccaacatgcctcctgtgccccacggcatgatgccccagatgatgccacccatgggcggcccccccatgggccagatgcctggcatgatgagctctgtgatgcctggcatgatgatgagccacatgagccaggcctccatgcagcctgccctgcccccaggagtgaacagcatggatgtggccgccggcacctacaccctgtacaagtccatgtggacagagcacaagagcccagatggccgcacctactactacaacacagagaccaagcagagcacctgggagaagccagatgacctgaagaccccagctgagcagctgctgagcaagtgcccctggaaggagtacaagagtgacagcggcaagccctactactacaacagccagaccaaggagagccgctgggccaagcccaaggagctggaggacctggagggcaagatgggcaagatcaagtacagcaagcaggaggagtgcaccaccaccagcacagcccctgtgcccaccacagagatccccaccaccatgagcaccatggctgctgctgaggccgctgctgctgtggtggccgctgctgctgctgctgctgctgctgctgctgctgccaatgccaatgccagcaccagcgccagcaacacagtgtctggaacagtgcctgtggtgcctgagcctgaggtgaccagcatcgtggccaccgtggtggacaatgaaaatacagtgaccatcagcacagaggagcaggcccagctgaccagcaccccagccatccaggaccagagcgtggaggtgagcagcaacacaggagaggagaccagcaagcaggagaccgtggccgacttcacccccaagaaggaggaggaggagagccagcctgccaagaagacctacacctggaacaccaaggaggaggccaagcaggccttcaaggagctgctgaaggagaagagggtgcccagcaatgcctcctgggagcaggccatgaagatgatcatcaatgacccccgctacagcgccctggccaagctgtctgagaagaagcaggccttcaatgcctacaaggtgcagacagagaaggaggagaaggaggaggcccggagcaagtacaaggaggccaaggagagcttccagcgcttcctggagaaccacgagaagatgaccagcaccacccgctacaagaaggccgagcagatgtttggagagatggaggtgtggaatgccatcagcgagcgggaccggctggagatctatgaagatgtgctcttcttcctgagcaagaaggagaaggagcaggccaagcagctgaggaagaggaactgggaggccctgaagaacatcctggacaacatggccaacgtgacctacagcaccacctggagcgaggcccagcagtacctgatggacaaccccacctttgctgaagatgaggagctgcagaacatggacaaggaggatgccctgatctgctttgaggagcacatccgggccctggagaaggaggaggaggaggagaagcagaagagcctgctgcgggagcggcggcggcagaggaagaaccgggagagcttccagatcttcctggatgagctgcacgagcacggccagctgcacagcatgagctcctggatggagctgtaccccaccatcagcagtgacatccgcttcaccaacatgctgggccagcccggcagcacagccctggacctcttcaagttctacgtggaggacctgaaggcccgctaccatgatgagaagaagatcatcaaggacatcctgaaggacaagggctttgtggtggaggtgaacaccacctttgaagattttgtggccatcatcagcagcaccaagaggagcaccaccctggatgctggcaacatcaagctggccttcaacagcctgctggagaaggccgaggcccgggagcgggagcgggagaaggaggaggccaggaagatgaagaggaaggagagcgccttcaagtccatgctgaagcaggccgccccacccatcgagctggatgctgtgtgggaggacatccgggagagatttgtgaaggagcccgcctttgaggacatcaccctggagagcgagaggaagaggatcttcaaggacttcatgcacgtgctggagcacgagtgccagcaccaccacagcaagaacaagaagcacagcaagaagagcaagaagcaccacaggaagaggagccgcagccgcagcggcagtgacagtgatgatgatgacagccacagcaagaagaagaggcagaggtctgagagccgcagcgccagcgagcacagcagcagcgctgagagcgagaggagctacaagaagagcaagaagcacaagaagaagagcaagaagagaagacacaagagtgacagccctgagagtgatgctgagcgggagaaggacaagaaggagaaggaccgggagagcgagaaggacaggacccggcagaggtctgagagcaagcacaagagccccaagaagaagacaggcaaggacagcggcaactgggacaccagcggcagcgagctgtctgagggggagctggagaagagaagaaggaccctgctggagcagctggatgatgaccagtag

SEQ ID NO: 300308 - DNA, 2820 bp, Artificial Sequence
  derived and/or modified sequence
atgcggcccggcaccggcgccgagcggggcggcctgatggtgagcgagatggagtcccatcctcctagccagggaccgggggacggggaaagacggctctcaggcagcagtctgtgttccggatcctgggtttccgcagacggcttcctcaggagaagaccctccatgggtcaccccgggatgcattacgcccccatgggcatgcacccaatgggacagcgtgctaacatgccgcccgttccacacggaatgatgccgcagatgatgccaccaatgggcggcccacccatggggcagatgcccggcatgatgagctcagttatgcctggaatgatgatgagccatatgagccaggcttccatgcagccagcactgcccccaggcgtgaacagcatggacgtggctgccggtacttataccctgtataagtctatgtggactgagcataagtcccctgacgggaggacgtactattacaacacagagactaaacagtctacctgggagaagcccgacgatttgaagacccccgcagagcagctgttgtctaagtgtccttggaaggagtacaagtcggattccggcaaaccatactattataatagccagacgaaggaaagtcggtgggccaaacctaaggaactagaggacctggagggaaagatgggaaagattaaatactccaaacaggaggagtgtacaacaaccagcaccgctcccgttccaaccactgagatcccaactaccatgagtacaatggctgcggccgaagcagccgccgcggtggttgctgccgctgccgccgccgccgcagccgcggcagccgcaaacgctaacgcgagtacctcagcctcaaacacggtgagcggcaccgtgcctgtggtacccgaacccgaagttaccagcatagtcgcgacagtggtagacaatgaaaacaccgtgaccataagcacagaagaacaggctcagttaactagtacacctgcaatccaggatcagtccgtcgaggtctcctccaataccggcgaagagacttctaaacaggagaccgtggcagattttacccctaagaaggaggaagaggagtcccagcccgcaaagaaaacttacacctggaacacgaaggaagaggcaaaacaggcttttaaggagttgttaaaggagaagcgagtacctagcaacgcatcttgggagcaggcaatgaagatgatcatcaacgatcctcgctacagcgctctggcgaagctctccgagaagaaacaggcatttaacgcgtataaggtgcaaaccgaaaaggaggagaaggaggaagctagatctaaatataaagaggcaaaggaatctttccagaggttcttggagaatcacgagaaaatgacttcgactacacgctacaaaaaagctgaacagatgtttggggagatggaagtgtggaatgccatctccgaaagagaccgcctcgagatttacgaagatgttctgttctttcttagtaaaaaagagaaagagcaggcgaagcaactgaggaagcggaattgggaagcgttgaaaaacattctcgataatatggccaatgttacctacagtacgacatggtctgaagcgcagcagtacctgatggataatccaacttttgccgaagatgaagaactgcagaacatggacaaggaggacgcacttatttgttttgaggagcatattcgagcactcgagaaagaagaggaagaggaaaaacagaagtccttgttacgtgaaagaaggagacagaggaagaacagggaatcatttcagatcttcttggacgagttacatgaacatggccagctccatagcatgtcttcctggatggagctgtatcccacaattagcagcgacattagattcactaacatgctcgggcagcctgggtccacagccctcgacctgtttaaattttacgtggaggacctgaaggcccgataccacgatgaaaagaaaattatcaaagacatcttaaaggataaagggtttgtggtcgaagttaacacaactttcgaagacttcgtcgctattatcagttcaaccaaaagatctactaccctggacgccggcaacattaaactagctttcaacagccttctggagaaagcagaggcccgggagcgggagcgcgagaaagaggaggcacgaaaaatgaaaaggaaggaaagcgctttcaagtccatgctgaaacaagcagcacctccaattgagcttgatgcggtctgggaagatatccgggagcgctttgtcaaggagccagccttcgaggatattacgttggagtctgaacgaaagcggatctttaaagatttcatgcacgtcctcgaacatgaatgccagcaccatcacagtaagaataaaaaacactcaaaaaagtcaaaaaagcaccataggaaaagatctcgatcccgttctggatccgactccgacgatgatgacagtcactctaagaaaaaaagacagcggtccgagtctcgatcagcctcagaacactcaagtagcgcagagagcgaaaggagttacaaaaagagcaagaaacataagaagaaatccaagaagcggcgacacaaatcagactcacccgaaagcgacgccgaaagagaaaaggataagaaagagaaagaccgagagtctgaaaaagaccgcacacggcagcgatctgagtcgaaacataagagtcccaagaaaaaaactggaaaagatagtggcaattgggacacctctgggagcgagctaagtgaaggggagttggaaaagagacgcaggactcttctggaacagctcgacgatgaccagtag

SEQ ID NO: 300309 - DNA, 2820 bp, Artificial Sequence
  derived and/or modified sequence
atgcgaccaggaaccggtgcagaacgcggaggattgatggttagtgagatggagtcacatcccccatcccagggccctggagacggagaaaggagactgtctgggtcatccctgtgcagtgggtcctgggtgtctgctgacgggttccttcgacgcaggccaagtatgggacacccgggaatgcactatgcaccgatggggatgcaccccatgggtcaacgagccaacatgccaccagtccctcacggtatgatgccccagatgatgcctcctatgggcggacctccaatgggacagatgcctggcatgatgagctccgtcatgcccggtatgatgatgtcccacatgtctcaagcctcaatgcagcccgcactgcccccaggtgtaaatagcatggacgtggccgcaggcacctacactctgtacaagtctatgtggactgagcataagtctcctgatggtcgcacatactactacaacacagagacaaaacagtctacctgggaaaaacctgacgacttaaaaacacctgcagagcagctcctcagcaaatgtccgtggaaggagtacaagtctgactccggaaaaccatattactacaattcacaaacaaaggagtccagatgggctaaacccaaagagctcgaagatcttgagggaaaaatgggcaagataaaatactctaaacaggaggagtgcactaccacttctaccgcccctgtgccaacgacagagatccctactacgatgtcaacgatggcggctgctgaagcagccgctgccgtcgtcgcagctgcagctgcagccgcagcagccgcagccgctgcaaacgccaacgcttctacttcagcttccaataccgtaagcgggaccgtgcctgtggtgcctgaaccagaggtcacttctattgtcgcaacagtggttgataacgaaaacacagtaacaatatctaccgaagaacaggcccagctcacttctacaccagcaattcaggaccagagcgtggaagtctcatccaacactggtgaagaaacatcaaaacaggagactgtcgcggacttcaccccgaagaaggaggaggaggagtcacaaccggctaaaaaaacatacacttggaatacgaaggaggaggcaaagcaggcattcaaagagctgttaaaggagaaacgtgtgccctctaacgcgtcttgggagcaggccatgaaaatgattatcaatgatcctaggtactctgccttggctaagctgtctgagaagaaacaggccttcaacgcctacaaggtacagaccgagaaggaggaaaaagaagaggctaggagcaaatacaaggaagcgaaggagtcttttcaaagattcttagagaatcatgaaaagatgactagtaccacccgatacaagaaagctgagcagatgtttggggaaatggaagtatggaacgccatctctgagcgtgataggctggagatttacgaagacgtactgttctttctatccaagaaggaaaaggaacaggctaagcagctgaggaaacgtaactgggaggccctcaaaaacatcctggataacatggcaaacgtgacttactctacaacgtggagcgaggcgcagcaatacctgatggacaacccgacctttgccgaggacgaggagctccagaacatggacaaggaggacgccctgatctgttttgaggagcacattcgggctctcgagaaagaggaggaagaagaaaaacagaaatccctgttgcgagaacggagacgccagcgaaagaatcgcgagtcttttcagatttttctcgatgagttgcatgagcatggacaactccattccatgtcaagctggatggagctgtaccctacaatctctagcgatattaggttcaccaatatgctgggccaacctggatctactgcattagatctatttaagttttatgtggaagacctgaaggcacggtaccacgacgaaaagaagatcattaaagacattctcaaggataagggttttgtagtagaggtcaatacgacctttgaggattttgtggcgatcattagcagcacaaaacgaagcaccaccttagacgcaggtaacattaaactggcttttaatagcctcctagaaaaagccgaggcgagggagcgcgagcgggagaaggaagaagcacggaagatgaaaaggaaagaaagcgcgtttaaaagcatgctaaagcaggccgctccccctatcgaattagatgccgtgtgggaagatatccgggagcggttcgtgaaagagcccgctttcgaggatataacacttgagagtgaacgcaaacgtatttttaaggattttatgcacgtgctggagcatgaatgtcagcatcatcacagcaagaacaagaagcacagcaagaagtcgaaaaaacatcatcgcaagagatcacggtccagatccggttcagacagcgatgatgatgacagtcattctaaaaaaaagaggcagcggtctgagtcaagatcggcatctgaacatagcagctccgctgaatctgaacggtcctacaaaaaaagcaagaagcacaaaaagaagtctaagaagcggcgacacaagtctgacagccccgagtcggatgccgaaagggaaaaagacaaaaaggagaaggatagagagtcagagaaggacagaacacggcagcgctccgaatccaagcataaatcgccaaaaaaaaagaccggcaaagactcgggcaattgggataccagtggcagcgaactatctgagggggaacttgagaagcggagaagaacattgttagaacagctggacgacgatcaatag

SEQ ID NO: 300310 - DNA, 3096 bp, Artificial Sequence
  derived and/or modified sequence
atgaggccggggacgggagctgagcgtggaggcctcatggtgagtgaaatggagagccatcctccctcgcagggtcctggggacggggagcggagattgtccggctcaagcctctgctccggctcttgggtctctgctgacggcttcctgaggagacggccctcgatggggcaccctggcatgcattatgccccaatgggaatgcaccctatgggtcagagagcgaatatgcctcctgtacctcatggaatgatgccgcagatgatgccccctatgggagggccaccaatgggacaaatgcctggaatgatgtcgtcagtaatgcctggaatgatgatgtctcatatgtctcaggcttccatgcagcctgccttaccgccaggagtaaatagtatggatgtagcagcaggtacgtatactctgtataaatcaatgtggactgaacataaatcacctgatggaaggacttactactacaacactgaaaccaaacagtctacctgggagaaaccagatgatcttaaaacacctgctgagcaactcttatctaaatgcccctggaaggaatacaaatcagattctggaaagccttactattataattctcaaacaaaagaatctcgctgggccaaacctaaagaacttgaggatcttgaaggtaaaatggggaaaattaagtatagtaagcaagaagagtgcaccacaacatcaacagccccagtccctacaacagaaattccgaccacaatgagcaccatggctgctgccgaagcagcagctgctgttgttgcagcagcagcagcggcagcagcagcagcagctgcagccaatgctaatgcttccacttctgcttctaatactgtcagtggaactgttccagttgttcctgagcctgaagttacttccattgttgctactgttgtagataatgagaatacagtaactatttcaactgaggaacaagcacaacttactagtacccctgctattcaggatcaaagtgtggaagtatccagtaatactggagaagaaacatctaagcaagaaactgtagctgattttactcccaaaaaagaagaggaggagagccaaccagcaaagaaaacatacacttggaatacaaaggaagaggcaaagcaagcttttaaagaattattgaaagaaaagcgggtaccatcgaatgcttcatgggagcaggctatgaaaatgattattaatgatccacgatacagtgctttggcaaagttaagtgaaaaaaagcaagcctttaatgcctataaagtccagacagaaaaagaagaaaaagaagaagcaagatcaaagtacaaagaggctaaggaatcctttcagcgttttcttgaaaatcatgagaaaatgacttctacaaccagatacaaaaaagcagagcaaatgtttggagagatggaagtttggaatgcaatatcagaacgtgatcgtcttgaaatctatgaagatgttttgttctttctttcaaaaaaagaaaaggaacaagcaaagcagttgcgaaagagaaattgggaagccttaaaaaacatacttgacaacatggctaatgtaacatactctaccacttggtctgaagcccagcagtatctgatggataatccaacttttgcagaagatgaggagttacaaaatatggacaaagaagatgcattaatttgctttgaagaacacattcgggctttagaaaaggaggaagaagaagaaaaacagaagagtttgctgagagaaaggagacgacagcgaaaaaatagggaatctttccagatatttttagatgaattacatgaacatggacaactgcattctatgtcatcttggatggaattgtatccaactattagttctgatattagattcactaatatgcttggtcagcctggatcaactgcacttgatcttttcaagttttatgttgaggatcttaaagcacgttatcatgacgagaagaagataataaaagacattctaaaggataaaggatttgtagttgaagtaaacactacttttgaagattttgtggcgataatcagttcaactaaaagatcaactacattagatgctggaaatatcaaattggctttcaatagtttactagaaaaggcagaagcccgtgaacgtgaaagagaaaaagaagaggctcggaagatgaaacgaaaagaatctgcatttaagagtatgttaaaacaagctgctcctccgatagaattggatgctgtctgggaagatatccgtgagagatttgtaaaagagccagcatttgaggacataactctagaatctgaaagaaaacgaatatttaaagattttatgcatgtgcttgagcatgaatgtcagcatcatcattcaaagaacaagaaacattctaagaaatctaaaaaacatcataggaaacgttcccgctctcgatcggggtcagattcagatgatgatgatagccattcaaagaaaaaaagacagcgatcagagtctcgttctgcttcagaacattcttctagtgcagagtctgagagaagttataaaaagtcaaaaaagcataagaagaaaagtaagaagaggagacataaatctgactctccagaatccgatgctgagcgagagaaggataaaaaagaaaaagatcgggaaagtgaaaaagacagaactagacaaagatcagaatcaaaacacaaatcgcctaagaaaaagactggaaaggattctggtaattgggatacttctggcagcgaactgagtgaaggggaattggaaaagcgcagaagaacccttttggagcaactggatgatgatcaataaattataccaaatatatgtttacagtatgatttaaagtctgattcagaccagggactctattttaagttcaactgaaataacactgggttttaattatatcacaggaaaaaaaaagtgcatttaagtattgttatcgtggactttataaaagcaaaggaaattgaaagtaacttttgattctgtatcaagaatcatattttcatacagtcataactgtctttctgtgaccctttcacagggcactgtaggatggattaaaggtggcaatttactgat

SEQ ID NO: 300311 - DNA, 2820 bp, Artificial Sequence
  derived and/or modified sequence
atgagacccggcaccggcgccgagagaggcggcctgatggtgagcgagatggagagccacccccccagccagggccccggcgacggcgagagaagactgagcggcagcagcctgtgcagcggcagctgggtgagcgccgacggcttcctgagaagaagacccagcatgggccaccccggcatgcactacgcccccatgggcatgcaccccatgggccagagagccaacatgccccccgtgccccacggcatgatgccccagatgatgccccccatgggcggcccccccatgggccagatgcccggcatgatgagcagcgtgatgcccggcatgatgatgagccacatgagccaggccagcatgcagcccgccctgccccccggcgtgaacagcatggacgtggccgccggcacctacaccctgtacaagagcatgtggaccgagcacaagagccccgacggcagaacctactactacaacaccgagaccaagcagagcacctgggagaagcccgacgacctgaagacccccgccgagcagctgctgagcaagtgcccctggaaggagtacaagagcgacagcggcaagccctactactacaacagccagaccaaggagagcagatgggccaagcccaaggagctggaggacctggagggcaagatgggcaagatcaagtacagcaagcaggaggagtgcaccaccaccagcaccgcccccgtgcccaccaccgagatccccaccaccatgagcaccatggccgccgccgaggccgccgccgccgtggtggccgccgccgccgccgccgccgccgccgccgccgccgccaacgccaacgccagcaccagcgccagcaacaccgtgagcggcaccgtgcccgtggtgcccgagcccgaggtgaccagcatcgtggccaccgtggtggacaacgagaacaccgtgaccatcagcaccgaggagcaggcccagctgaccagcacccccgccatccaggaccagagcgtggaggtgagcagcaacaccggcgaggagaccagcaagcaggagaccgtggccgacttcacccccaagaaggaggaggaggagagccagcccgccaagaagacctacacctggaacaccaaggaggaggccaagcaggccttcaaggagctgctgaaggagaagagagtgcccagcaacgccagctgggagcaggccatgaagatgatcatcaacgaccccagatacagcgccctggccaagctgagcgagaagaagcaggccttcaacgcctacaaggtgcagaccgagaaggaggagaaggaggaggccagaagcaagtacaaggaggccaaggagagcttccagagattcctggagaaccacgagaagatgaccagcaccaccagatacaagaaggccgagcagatgttcggcgagatggaggtgtggaacgccatcagcgagagagacagactggagatctacgaggacgtgctgttcttcctgagcaagaaggagaaggagcaggccaagcagctgagaaagagaaactgggaggccctgaagaacatcctggacaacatggccaacgtgacctacagcaccacctggagcgaggcccagcagtacctgatggacaaccccaccttcgccgaggacgaggagctgcagaacatggacaaggaggacgccctgatctgcttcgaggagcacatcagagccctggagaaggaggaggaggaggagaagcagaagagcctgctgagagagagaagaagacagagaaagaacagagagagcttccagatcttcctggacgagctgcacgagcacggccagctgcacagcatgagcagctggatggagctgtaccccaccatcagcagcgacatcagattcaccaacatgctgggccagcccggcagcaccgccctggacctgttcaagttctacgtggaggacctgaaggccagataccacgacgagaagaagatcatcaaggacatcctgaaggacaagggcttcgtggtggaggtgaacaccaccttcgaggacttcgtggccatcatcagcagcaccaagagaagcaccaccctggacgccggcaacatcaagctggccttcaacagcctgctggagaaggccgaggccagagagagagagagagagaaggaggaggccagaaagatgaagagaaaggagagcgccttcaagagcatgctgaagcaggccgccccccccatcgagctggacgccgtgtgggaggacatcagagagagattcgtgaaggagcccgccttcgaggacatcaccctggagagcgagagaaagagaatcttcaaggacttcatgcacgtgctggagcacgagtgccagcaccaccacagcaagaacaagaagcacagcaagaagagcaagaagcaccacagaaagagaagcagaagcagaagcggcagcgacagcgacgacgacgacagccacagcaagaagaagagacagagaagcgagagcagaagcgccagcgagcacagcagcagcgccgagagcgagagaagctacaagaagagcaagaagcacaagaagaagagcaagaagagaagacacaagagcgacagccccgagagcgacgccgagagagagaaggacaagaaggagaaggacagagagagcgagaaggacagaaccagacagagaagcgagagcaagcacaagagccccaagaagaagaccggcaaggacagcggcaactgggacaccagcggcagcgagctgagcgagggcgagctggagaagagaagaagaaccctgctggagcagctggacgacgaccagtag

SEQ ID NO: 300312 - protein, 146 aa, Artificial Sequence
  derived and/or modified sequence
MSDALANAVCQRCQARFSPAERIVNSNGELYHEHCFVCAQCFRPFPEGLFYEFEGRKYCEHDFQMLFAPCCGSCGEFIIGRVIKAMNNNWHPGCFRCELCDVELADLGFVKNAGRHLCRPCHNREKAKGLGKYICQRCHLVIDEQP

SEQ ID NO: 300313 - DNA, 441 bp, Artificial Sequence
  derived and/or modified sequence
atgagcgacgccctggccaacgccgtgtgccagagatgccaggccagattcagccccgccgagagaatcgtgaacagcaacggcgagctgtaccacgagcactgcttcgtgtgcgcccagtgcttcagacccttccccgagggcctgttctacgagttcgagggcagaaagtactgcgagcacgacttccagatgctgttcgccccctgctgcggcagctgcggcgagttcatcatcggcagagtgatcaaggccatgaacaacaactggcaccccggctgcttcagatgcgagctgtgcgacgtggagctggccgacctgggcttcgtgaagaacgccggcagacacctgtgcagaccctgccacaacagagagaaggccaagggcctgggcaagtacatctgccagagatgccacctggtgatcgacgagcagccctag

SEQ ID NO: 300314 - DNA, 441 bp, Artificial Sequence
  derived and/or modified sequence
atgagcgatgccttggctaatgctgtttgtcagaggtgccaggctagattttccccagctgaaaggattgtaaattcgaatggagagctgtatcacgagcactgcttcgtttgtgctcagtgttttcgtcctttccctgaagggctgttctacgagtttgaaggtaggaagtattgcgagcatgacttccagatgctatttgctccttgttgtggttcctgtggtgaatttatcatcggtcgggtgatcaaggctatgaacaataattggcatccaggatgttttcgatgtgaactgtgcgatgtagaactggctgaccttggattcgtcaagaacgcaggcaggcatctttgcagaccttgtcacaacagggagaaggccaaggggttaggtaagtatatctgccagagatgtcatctggtgattgatgagcagccctag

SEQ ID NO: 300315 - DNA, 441 bp, Artificial Sequence
  derived and/or modified sequence
atgtctgatgccctggccaatgctgtgtgccagcgctgccaggcccgcttctccccagctgagagaattgtgaacagcaatggagagctgtaccacgagcactgctttgtgtgtgcccagtgcttccggcccttccctgagggcctcttctatgaatttgagggcaggaagtactgtgaacatgacttccagatgctgtttgccccctgctgcggcagctgtggggagttcatcatcggccgggtcatcaaggccatgaacaacaactggcaccctggctgcttccgctgtgagctgtgtgatgtggagctggccgacctgggctttgtgaagaatgccggccgccacctgtgccggccctgccacaaccgggagaaggccaagggcctgggcaagtacatctgccagcgctgccacctggtgattgatgagcagccctag

SEQ ID NO: 300316 - DNA, 441 bp, Artificial Sequence
  derived and/or modified sequence
atgagcgacgccctggccaacgccgtgtgccagcggtgccaggcccgtttttcacccgctgaaaggatcgtgaacagcaatggagagttgtatcacgagcactgcttcgtctgtgcccaatgctttaggccttttcccgaggggctcttttatgaattcgaggggcggaaatactgtgaacacgacttccagatgctgtttgcaccctgttgcgggtcatgtggagaatttatcataggtcgagttatcaaggcaatgaataacaattggcatccaggttgtttcaggtgcgagctatgcgatgttgagcttgcagatctgggttttgttaagaacgccggtagacatctgtgcaggccctgtcataacagggagaaagccaagggactagggaaatatatctgccagagatgccacctggtgatagatgagcagccttag

SEQ ID NO: 300317 - DNA, 441 bp, Artificial Sequence
  derived and/or modified sequence
atgtccgatgctcttgcgaacgccgtctgccagcgctgccaagccagattctctcctgcggagcgaatcgtgaattcgaatggggagctgtatcatgaacactgcttcgtgtgcgcccagtgctttaggcctttccctgagggactgttctacgaatttgaagggaggaagtattgtgaacatgactttcagatgctgttcgctccctgctgcggctcctgtggcgaatttattatcggcagggttataaaggccatgaacaacaactggcaccccggttgttttagatgtgagttatgtgacgtcgagttggccgacctaggcttcgttaaaaacgccggtcgtcacctgtgccggccatgtcacaaccgtgagaaagccaagggcctcggaaaatacatatgtcagagatgtcacctcgtcattgacgaacagccttag

SEQ ID NO: 300318 - DNA, 2637 bp, Artificial Sequence
  derived and/or modified sequence
atggcccacagaggcggcgagagagacttccagaccagcgccagaagaatgggcaccagcctgctgttccagctgagcgtgcacgagagagagctggacctggtgttcctggaccacagctacgccaagccctggagcgcccaccccgacgccagcagcgccagacccaccagaatgctgttcgtgacccccagaagacagcacgagagcaccatcgagagcgacgtgcccatcgacgtggagaccgtgaccagcacccccatgcccctgtacgacaaccagaaggccagaagcgtgatgaacgagtgcgagagacacgtgatcttcgccagaaccgacgccgacgccccccccccccccgaggactgggaggagcacgtgaacagaaccggctggaccatggcccagaacaagctgttcaacaagatcctgaaggccctgcagagcgacagactggccagactggccaacgagggcgcctgcaacgagcccgtgctgagaagagtggccgtggacaagtgcgccagaagagtgagacaggccctggccagcgtgagctgggacaccaagctgatccagtggctgcacaccaccctggtggagaccctgagcctgcccatgctggccgcctacctggacgccctgcagaccctgaagggcaagatccccaccctgatcgacagaatgctggtgagcagcaacaccaagaccggcgccgccggcgccgaggccctgagcctgctgctgaagagaccctgggaccccgccgtgggcgtgctgagccacaacaagcccagcaagctgcccggcagccccctgatcctgatcgccagcagcggccccagcagcagcgtgttccccaccagcagaagacacagattctggcagagccagctgagctgcctgggcaaggtgatccccgtggccacccacctgctgaacaacggcagcggcgtgggcgtgctgcagtgcctggagcacatgatcggcgccgtgagaagcaaggtgctggagatccacagccacttcccccacaagcccatcatcctgatcggctggaacaccggcgccctggtggcctgccacgtgagcgtgatggagtacgtgaccgccgtggtgtgcctgggcttccccctgctgaccgtggacggccccagaggcgacgtggacgaccccctgctggacatgaagacccccgtgctgttcgtgatcggccagaacagcctgcagtgccaccccgaggccatggaggacttcagagagaagatcagagccgagaacagcctggtggtggtgggcggcgccgacgacaacctgagaatcagcaaggccaagaagaagagcgagggcctgacccagagcatggtggacagatgcatccaggacgagatcgtggacttcctgaccggcgtgctgaccagagccgagggccacatgggcagcgagcccagagaccaggacgccgagaagaagaagaagcccagagacgtggccagaagagacctggccttcgaggtgcccgagagaggcagcagacccgccagccccgccgccaagctgcccgccagccccagcggcagcgaggacctgagcagcgtgagcagcagccccaccagcagccccaagaccaaggtgaccaccgtgaccagcgcccagaagagcagccagatcggcagcagccagctgctgaagagacacgtgcagagaaccgaggccgtgctgacccacaagcaggcccaggtgcccatcagcagcgagccccccgaggagggcgagaaggaggacctgagagtgcagctgaagagacaccaccccagcagccccctgcccggcagcaagaccagcaagagacccaagatcaaggtgagcctgatcagccagggcgacaccgccggcggcccctgcgcccccagccagggcagcgcccccgaggccgccggcggcaagcccatcaccatgaccctgggccaggccagcgccggcgccaaggagctgaccggcctgctgaccaccgccaagagcagcagcagcgagggcggcgtgagcgccagccccgtgcccagcgtggtgagcagcagcaccgcccccagcgccctgcacaccctgcagagcagactggtggccaccagccccggcagcagcctgcccggcgccaccagcgccagcagcctgctgcagggcctgagcttcagcctgcaggacatcagcagcaagaccagcggcctgcccgccaaccccagccccggccccgccccccaggccaccagcgtgaagctgcccacccccatgcagagcctgggcgccatcaccaccggcaccagcaccatcgtgagaaccatccccgtggccaccaccctgagcagcctgggcgccacccccggcggcaagcccaccgccatccaccagctgctgaccaacggcggcctggccaagctggccagcagcctgcccggcctggcccagatcagcaaccaggccagcggcctgaaggtgcccaccaccatcaccctgaccctgagaggccagcccagcagaatcaccaccctgagccccatgggcagcggcgccgcccccagcgaggagagcagcagccaggtgctgcccagcagcagccagagactgccccccgccccctag

SEQ ID NO: 300319 - DNA, 2637 bp, Artificial Sequence
  derived and/or modified sequence
atggcccataggggcggtgagagagatttccagacctccgcacgacggatggggactagcctcctctttcagctgagcgttcacgaacgagaacttgacttagtcttcctggatcattcttacgctaagccctggagcgcccaccctgatgcttcttccgcacggcccaccaggatgttgttcgtaacccctcgacggcaacacgagtccactattgaatctgatgtgcccattgacgtcgaaacggtcacttcaaccccaatgcctttgtacgataaccagaaggctagatcagtcatgaatgaatgcgagagacacgtcatttttgctcggacagatgcagatgctcctccccctcccgaagattgggaagaacatgtaaatcggacgggctggacaatggcccagaataagttgtttaacaaaattttgaaggcactccagagcgaccggctggcgaggttagcgaatgagggcgcctgcaatgagcctgttttgcgcagggtggccgtcgataagtgtgccagaagagtccggcaggcgctcgcgtcggtcagctgggatacaaaacttatccagtggctacatacgactctcgtagagacgctaagtttgcccatgctggctgcctacctcgacgcactgcaaaccctgaaaggtaagattccgactcttatcgacagaatgcttgtatctagtaacaccaaaacaggagccgccggcgccgaagctctgtccctgctgctgaaaagaccatgggacccagctgtgggcgtcttgtctcataataagcccagtaagctgcctggaagccccctgatcttgattgccagcagcgggccatcatcaagcgtgtttccgacttctcggcggcaccgattctggcagtcgcagctaagctgcctgggaaaggtgattccagtcgctactcatttactcaacaatggcagcggggtcggtgtgctgcaatgtctggagcacatgatcggggccgttaggagcaaggtgctggaaatccattcacattttccccacaaaccaatcattctcattgggtggaatacgggggccctggttgcttgccacgtttctgtgatggaatacgtgactgctgttgtgtgccttggctttcctctgctcaccgtggacggcccaaggggcgacgtggatgatcctctgttagatatgaaaactcctgttctgttcgtgataggtcaaaattccctccagtgccatcctgaggccatggaggatttccgcgagaaaataagggcagagaattcgctcgtcgtggtgggcggcgccgacgacaacttaaggatatctaaggccaagaagaagagtgagggcttgacgcagagtatggtggataggtgcatccaagacgagatcgtggattttttaacgggcgtcctcactcgcgctgagggccatatgggaagcgaacccagagaccaggatgccgaaaagaaaaagaagccaagagacgtggccagacgcgacttagcttttgaggtcccggaaagaggatctagaccagcaagccccgctgccaagctgcctgcatctccctctggatctgaagacctgtcctctgtgagcagctcccctacaagctcgccaaagactaaagttacaaccgttactagtgcacaaaagtcctcccagatcgggtcgtcacagcttcttaagagacatgtacaacggacagaggcagtactgacccataagcaagctcaggtgcctatttctagcgaacccccagaagagggagaaaaggaggatctgagagtccagttgaagagacatcatcctagctcaccgctgcctggaagtaagacgtccaaacgccctaagattaaagtgtccctgattagccagggagatactgccggcgggccctgcgccccttcccagggctccgccccagaggcagccgggggcaaacccataacaatgaccctaggacaggcgtctgctggcgctaaagaattaacgggtctgttaaccactgccaaatctagctccagcgaaggaggagtgagtgcaagtccagtacctagcgttgtgtcctccagcaccgccccttccgccctgcacaccctgcaatcacgtctggttgcaacatctcccggctcttcgctgcctggggccacaagcgcttcttcattactgcagggtctgagcttctcactccaggacatttcatctaaaacaagcggcctgcctgccaacccttcaccaggtcccgcccctcaggccactagcgtcaagctgcctacccccatgcagagcctcggtgccatcactaccggaacaagtaccatagtgaggactatcccggttgccactaccctgagctctctgggggctacccccggcggaaagcccacagccattcaccagttgctcaccaacggtggtctggcaaaactcgcatctagtctgccgggcctcgcccagatctccaaccaagcatcaggtctgaaagtgcctacaacaattactctgacactgcgtgggcagcctagccggattaccacactcagtccaatgggtagtggcgcggcaccgagcgaagagtcttccagccaggtgctcccgagctcctctcagcgactccctccagccccgtag

SEQ ID NO: 300320 - DNA, 2637 bp, Artificial Sequence
  derived and/or modified sequence
atggcccacagaggaggagagcgggacttccagaccagcgcccggaggatgggcaccagcctgctcttccagctgtctgtgcatgagcgggagctggacctggtgttcctggaccacagctatgccaagccctggagcgcccacccagatgccagcagcgcccggcccaccaggatgctgtttgtgaccccccggcggcagcacgagagcaccatcgagagtgatgtgcccattgatgtggagaccgtgaccagcacccccatgcccctgtatgacaaccagaaggcccggtctgtgatgaatgaatgtgagcggcacgtgatctttgccaggacagatgctgatgcccctcctcctcctgaggactgggaggagcacgtgaacagaacaggctggaccatggcccagaacaagctgttcaacaagatcctgaaggccctgcagagcgaccggctggcccggctggccaatgaaggagcctgcaatgaacctgtgctgcggcgggtggccgtggacaagtgtgcccggcgggtgcggcaggccctggcctctgtgtcctgggacaccaagctgatccagtggctgcacaccaccctggtggagaccctgagcctgcccatgctggccgcctacctggatgccctgcagaccctgaagggcaagatccccaccctgattgacaggatgctggtgagcagcaacaccaagacaggagctgctggagctgaggccctgagcctgctgctgaagaggccctgggaccctgctgtgggcgtgctgagccacaacaagcccagcaagctgcccggcagccccctcatcctgattgccagcagcggccccagcagcagcgtcttccccaccagccgccgccaccgcttctggcagagccagctgagctgcctgggcaaggtgattcctgtggccacccacctgctgaacaatggaagtggagtgggcgtgctgcagtgcctggagcacatgattggagctgtgcgcagcaaggtgctggagatccacagccacttcccccacaagcccatcatcctgattggctggaacacaggagccctggtggcctgccacgtgtctgtgatggagtatgtgacagctgtggtgtgcctgggcttccccctgctgactgtggatggccccagaggagatgtggatgaccccctgctggacatgaagacccctgtgctcttcgtcatcggccagaacagcctgcagtgccaccctgaggccatggaggacttccgggagaagatccgggcagagaacagcctggtggtggtgggcggcgcagatgacaacctgcgcatcagcaaggccaagaagaagtctgagggcctgacccagagcatggtggaccgctgcatccaggatgagatcgtggacttcctgactggagtgctgaccagggctgagggccacatgggcagcgagccccgggaccaggatgctgagaagaagaagaagcccagagatgtggcccggcgggacctggcctttgaggtgcctgagcggggcagcaggcctgccagccctgctgccaagctgcctgccagccccagcggcagcgaggacctgagctctgtgagcagcagccccaccagcagccccaagaccaaggtgaccaccgtgaccagcgcccagaagagcagccagatcggcagcagccagctgctgaagagacatgtgcagaggacagaggccgtgctgacccacaagcaggcccaggtgcccatcagcagcgagcccccagaggagggggagaaggaggacctgcgggtgcagctgaagaggcaccaccccagcagccccctgcccggcagcaagaccagcaagaggcccaagatcaaggtgtccctcatcagccagggcgacacagctgggggcccctgtgcccccagccagggcagcgcccctgaggccgccggcggcaagcccatcaccatgaccctgggccaggccagcgctggggccaaggagctgaccggcctgctgaccacagccaagagcagcagcagcgagggcggcgtgtctgccagccctgtgcccagcgtggtgagcagcagcacagcccccagcgccctgcacaccctgcagagccggctggtggccaccagccctggcagcagcctgcccggggccaccagcgccagcagcctgctgcagggcctgtccttcagcctgcaggacatcagcagcaagaccagcggcctgcctgccaaccccagccctggccctgccccccaggccacctctgtgaagctgcccacccccatgcagagcctgggcgccatcaccaccggcaccagcaccatcgtgaggaccatccctgtggccaccaccctgagcagcctgggcgccaccccaggcggcaagcccacagccatccaccagctgctgaccaacggcggcctggccaagctggccagcagcctgcccggcctggcccagatcagcaaccaggccagcggcctgaaggtgcccaccaccatcaccctgaccctgcggggccagcccagccgcatcaccaccctgagccccatgggcagcggggccgcccccagcgaggagagcagcagccaggtgctgcccagcagcagccagaggctgcccccagccccctag

SEQ ID NO: 300321 - DNA, 5253 bp, Artificial Sequence
  derived and/or modified sequence
aggcgttaacgcgcacgcgcttagggatccggccgtggccgagcgcgcggccgtaagaccgcgggtgactagcatgcagatacccatgctctgactttctgcccctccactgacatggcccaccggggtggggagagggacttccagacttcagctcgacgcatgggcacctcgctgctcttccagctttcagtgcatgaacgggagctggacctggtttttctggatcatagctatgccaagccttggagtgcccacccagatgccagtagtgcccgccccacccgcatgctctttgtcactccccggcggcagcacgaaagtaccatatgattgttaaatacctgtgaagtatgtgtggcccggtcctatttcctcacctgtttacagtgaatcagacgtcccaatagatgtggagacggtcacatcaacgcctatgccactctatgacaatcagaaggcacgcagcgtgatgaatgagtgtgaacggcatgtcatctttgccaggactgatgcagatgcccctcctccaccagaggactgggaggagcatgtcaacaggactggctggacaatggcccagaacaagctattcaacaagatcctcaaagccctgcagtctgaccggcttgcccgcttggccaacgaaggggcttgtaatgagccagtgctgcgccgtgttgctgtggacaagtgtgcaaggagagtgcggcaggctctggcaagtgtgagctgggataccaagctgatccagtggctgcacaccacccttgtggagaccttgagtctgcccatgctggcagcctacctggatgctttgcagacgctgaaggggaagatcccaaccttgattgaccggatgcttgtgtcatccaacacaaagactggggctgcaggagctgaggccttgtctctcctactgaagaggccctgggaccctgctgtgggtgtgctttctcataacaaaccaagcaaactccctggctctccgctgattctcatcgcctcctctggtccctccagctctgtgtttcccacttcacgccgccaccgcttctggcaatctcagctgtcctgcttgggcaaggtcatccctgtagccacccatctgctgaacaatggcagtggggtaggagttctacagtgtctcgagcatatgattggggcagtgagaagcaaagtgctggagattcacagccatttcccacacaaacccattatcttgattggctggaacacaggagctttggtggcctgtcatgtgtcagtaatggagtatgtcactgcagttgtctgccttgggtttcctctgcttactgtggatggccccagaggggatgtagatgatcccctcttggatatgaagactccagtcctctttgtcattggtcagaattcccttcaatgtcaccctgaagccatggaggacttccgggagaagattcgagctgagaacagcttggtggtggttgggggagctgatgacaatctcagaataagcaaagcaaagaagaaatcagaagggttgactcagagcatggtggacagatgtattcaggatgagattgtggactttctgactggagtgctcactcgtgctgagggtcacatgggctctgaacctcgggatcaggatgctgagaagaagaagaagccccgcgatgtggcccgcagagacttggcctttgaagtccctgagcggggcagtcgacctgcctccccagctgccaagctgcccgcctcaccctcaggctcagaggatctctccagtgtgtccagcagccccacctccagtcccaagaccaaagtgaccacagtgacctctgcccagaagtccagtcagattggaagttctcagctgctgaagagacatgtgcagcggacagaagctgtgctgacccacaaacaagctcaagttcccatttcatcagaaccaccagaggaaggagagaaagaggatcttagggttcagctgaagcgacaccatccctcgagtccccttcctggcagtaagacctccaaacgaccgaagatcaaggtgtcccttatctcccaaggggacacagctggagggccttgtgctccttcccaaggaagtgctccagaagctgcaggtgggaagcccatcaccatgacactggggcaggcttcagcaggggccaaggagctcacaggacttctcaccacagccaagtccagttcttctgaaggtggagtctcagccagcccagtcccttcagtggtctccagcagcactgcacccagtgccttgcacacactgcagagccgcctggtggccacatctcctggcagctccctcccaggggccacatcagccagcagcctcctccaaggcctcagcttcagcttgcaggatatcagcagcaagacctctggccttccagcaaatccctccccaggaccagccccacaggccaccagtgtgaagttgcccacccccatgcagagcctgggtgccatcaccacgggcaccagcaccattgtccgtaccattcctgtggccaccactctctcctccttgggtgccactcctggtgggaagcccacagccatccaccagctgctgaccaatgggggcctcgctaagttggcaagcagcctccctggcctggctcagatctctaaccaagcatcaggcttgaaggtccccaccaccattactctgacacttcgtggccagccgagcaggatcactacactgagccctatgggctcaggagcagccccatccgaggagtcctcttcccaggtgctgccctccagctcacagcgcctgcctccagcaccctgaagatgctgtgtgatatgtcctccttaccaagttggtgatggctgcctcatggtgggccctggacaggtgtgtggtcctgctgagctgtccacgtgtcggaagacctgtttaagacagtcatttttgcctctccgccaactgtcttcagagaaaccattaggttaggtgatacggtgccagcaagggaagcaccatcgtccaggatctgcaaatctggttcctgggaaccccagactcctcagcagatctggctgtacatggatcagaaccacttcttcccccgcttaagctgtggtttgacccaagggtcagcatataggactgcctgctgcatttaatgaaggtgtttccttttggaagtctgtgctaccctctgcgcctagttgggaggagacatccatctggtctgggatttcgggagttagaatggaaagctctttgctaaagactggagtcatcctggcctgccaactggtggttcagagccggacgggcttgttttggacatcactgttgccttcactcagcagccacgggagagtgctccccatgcaactccaccttagaaaccacgtcagatactgagtagcttgctgactcctggaaacttctggtttttgttagtatcataatgaaggcaaagagaactaggctgtcatctttcagcctctttgacttactctagatgttgggagcagtggttgccaggtgaaacctgggccctttgtctttttcaccatgctttgggcagtttctgtatccagagagtccgcaggttcagataagctgaagaagagtaatagaacagcaaaggaagtggcttgaaggatgtgctagtaagccctgtggtttgtgcttaggtctctgctctgctacccaaggaactggtggttcagctggagataaaaagaagaatttgccaagtcagagaagaaaccccaaccccggaaaatcctctgtctccagtctctggaggtgaagcagggacaataagctaaggtagtatcttggccatcccaggaaacttgtggcattaggacgatgaaggccatgcttcagtgttttcgtttctatttcatgagactttttgtcttcctgcttacaagtgggaagatgattgacagtgactctactatgcagggctgttggtaccaacctgagccctataggtggcagtccctggagaagtggtcacagaagatggagctctgatcccctgcttacctcttcacaacacttgtgtgcaaagatagttttagatttggtttagaagctatcctccagaacaggctcccatacttagaatgtttctagttaaggtaataaattaggcaacccaagtgtgactccactcaagtgtccttttctgtaggcaggaagggcccacaacatggcttaaaatgtagtccatggttctggcccacagtacagtgtgtatctataccaggtcacctgtgttcaatctgggagccttcctggccagtctgagtggcagccagaagggagctcatagtgtctaggagtctcaggcaaggtaggtcagggtactgtgggcaggggggatgtgtgtgataggagagggtaccctaaaccccataccttccctccctgacctgaaaagctgatctcaacagggattcacacagaattaggctgtgtttttgcattagctggtaggtgactttctcaaaattcttaaattcagaaagtatttagtaaacttgaggaaggtatgaaatctggaggaggcatccaggacccaggggtttgatagctttacaggtaggatcataccacaccaaaagagcagtggacaataagactatatgagctatatgaagcttttaggaatcatttaggacagacagagccctaaacaacccattcatgacttaagttgttggctcagtgtatgctggggacaaagaaaaactaacaagccgacctgcctttatgataaattctagtgtgcttacaagggatgacttcctgaggtgtgatctgtccaccttgaagaactccacaactgaagaaggggagctgtgagaacgtggattgttctacaacttgcacagggtaacagaggaagtggctgaggcctagagtcacgttttccagttcccttcgcaaactatatttcttggaacgcgaaaggaagctttacctatttcatagaagacctggaatccataacctcagaaggcaatattattgatagaaaatgtggaaggatcaggaagttcttagattcttggatgacagatgcatgttgatgccctatggagatgtccttgtgttttgaggtcactgaggtaggaagacctgtctactcttggtttcaccactagaacagtcttgggctggatgggttatagagctgagcggctgtgatggttctgtttttacattaacaaaaacaattaaaaacaccaaaaacaaca

SEQ ID NO: 300322 - DNA, 5153 bp, Artificial Sequence
  derived and/or modified sequence
gccgagcgcgcggccgtaagaccgcgggtgactagcatgcagatacccatgctctgactttctgcccctccactgacatggcccaccggggtggggagagggacttccagacttcagctcgacgcatgggcacctcgctgctcttccagctttcagtgcatgaacgggagctggacctggtttttctggatcatagctatgccaagccttggagtgcccacccagatgccagtagtgcccgccccacccgcatgctctttgtcactccccggcggcagcacgaaagtaccattgaatcagacgtcccaatagatgtggagacggtcacatcaacgcctatgccactctatgacaatcagaaggcacgcagcgtgatgaatgagtgtgaacggcatgtcatctttgccaggactgatgcagatgcccctcctccaccagaggactgggaggagcatgtcaacaggactggctggacaatggcccagaacaagctattcaacaagatcctcaaagccctgcagtctgaccggcttgcccgcttggccaacgaaggggcttgtaatgagccagtgctgcgccgtgttgctgtggacaagtgtgcaaggagagtgcggcaggctctggcaagtgtgagctgggataccaagctgatccagtggctgcacaccacccttgtggagaccttgagtctgcccatgctggcagcctacctggatgctttgcagacgctgaaggggaagatcccaaccttgattgaccggatgcttgtgtcatccaacacaaagactggggctgcaggagctgaggccttgtctctcctactgaagaggccctgggaccctgctgtgggtgtgctttctcataacaaaccaagcaaactccctggctctccgctgattctcatcgcctcctctggtccctccagctctgtgtttcccacttcacgccgccaccgcttctggcaatctcagctgtcctgcttgggcaaggtcatccctgtagccacccatctgctgaacaatggcagtggggtaggagttctacagtgtctcgagcatatgattggggcagtgagaagcaaagtgctggagattcacagccatttcccacacaaacccattatcttgattggctggaacacaggagctttggtggcctgtcatgtgtcagtaatggagtatgtcactgcagttgtctgccttgggtttcctctgcttactgtggatggccccagaggggatgtagatgatcccctcttggatatgaagactccagtcctctttgtcattggtcagaattcccttcaatgtcaccctgaagccatggaggacttccgggagaagattcgagctgagaacagcttggtggtggttgggggagctgatgacaatctcagaataagcaaagcaaagaagaaatcagaagggttgactcagagcatggtggacagatgtattcaggatgagattgtggactttctgactggagtgctcactcgtgctgagggtcacatgggctctgaacctcgggatcaggatgctgagaagaagaagaagccccgcgatgtggcccgcagagacttggcctttgaagtccctgagcggggcagtcgacctgcctccccagctgccaagctgcccgcctcaccctcaggctcagaggatctctccagtgtgtccagcagccccacctccagtcccaagaccaaagtgaccacagtgacctctgcccagaagtccagtcagattggaagttctcagctgctgaagagacatgtgcagcggacagaagctgtgctgacccacaaacaagctcaagttcccatttcatcagaaccaccagaggaaggagagaaagaggatcttagggttcagctgaagcgacaccatccctcgagtccccttcctggcagtaagacctccaaacgaccgaagatcaaggtgtcccttatctcccaaggggacacagctggagggccttgtgctccttcccaaggaagtgctccagaagctgcaggtgggaagcccatcaccatgacactggggcaggcttcagcaggggccaaggagctcacaggacttctcaccacagccaagtccagttcttctgaaggtggagtctcagccagcccagtcccttcagtggtctccagcagcactgcacccagtgccttgcacacactgcagagccgcctggtggccacatctcctggcagctccctcccaggggccacatcagccagcagcctcctccaaggcctcagcttcagcttgcaggatatcagcagcaagacctctggccttccagcaaatccctccccaggaccagccccacaggccaccagtgtgaagttgcccacccccatgcagagcctgggtgccatcaccacgggcaccagcaccattgtccgtaccattcctgtggccaccactctctcctccttgggtgccactcctggtgggaagcccacagccatccaccagctgctgaccaatgggggcctcgctaagttggcaagcagcctccctggcctggctcagatctctaaccaagcatcaggcttgaaggtccccaccaccattactctgacacttcgtggccagccgagcaggatcactacactgagccctatgggctcaggagcagccccatccgaggagtcctcttcccaggtgctgccctccagctcacagcgcctgcctccagcaccctgaagatgctgtgtgatatgtcctccttaccaagttggtgatggctgcctcatggtgggccctggacaggtgtgtggtcctgctgagctgtccacgtgtcggaagacctgtttaagacagtcatttttgcctctccgccaactgtcttcagagaaaccattaggttaggtgatacggtgccagcaagggaagcaccatcgtccaggatctgcaaatctggttcctgggaaccccagactcctcagcagatctggctgtacatggatcagaaccacttcttcccccgcttaagctgtggtttgacccaagggtcagcatataggactgcctgctgcatttaatgaaggtgtttccttttggaagtctgtgctaccctctgcgcctagttgggaggagacatccatctggtctgggatttcgggagttagaatggaaagctctttgctaaagactggagtcatcctggcctgccaactggtggttcagagccggacgggcttgttttggacatcactgttgccttcactcagcagccacgggagagtgctccccatgcaactccaccttagaaaccacgtcagatactgagtagcttgctgactcctggaaacttctggtttttgttagtatcataatgaaggcaaagagaactaggctgtcatctttcagcctctttgacttactctagatgttgggagcagtggttgccaggtgaaacctgggccctttgtctttttcaccatgctttgggcagtttctgtatccagagagtccgcaggttcagataagctgaagaagagtaatagaacagcaaaggaagtggcttgaaggatgtgctagtaagccctgtggtttgtgcttaggtctctgctctgctacccaaggaactggtggttcagctggagataaaaagaagaatttgccaagtcagagaagaaaccccaaccccggaaaatcctctgtctccagtctctggaggtgaagcagggacaataagctaaggtagtatcttggccatcccaggaaacttgtggcattaggacgatgaaggccatgcttcagtgttttcgtttctatttcatgagactttttgtcttcctgcttacaagtgggaagatgattgacagtgactctactatgcagggctgttggtaccaacctgagccctataggtggcagtccctggagaagtggtcacagaagatggagctctgatcccctgcttacctcttcacaacacttgtgtgcaaagatagttttagatttggtttagaagctatcctccagaacaggctcccatacttagaatgtttctagttaaggtaataaattaggcaacccaagtgtgactccactcaagtgtccttttctgtaggcaggaagggcccacaacatggcttaaaatgtagtccatggttctggcccacagtacagtgtgtatctataccaggtcacctgtgttcaatctgggagccttcctggccagtctgagtggcagccagaagggagctcatagtgtctaggagtctcaggcaaggtaggtcagggtactgtgggcaggggggatgtgtgtgataggagagggtaccctaaaccccataccttccctccctgacctgaaaagctgatctcaacagggattcacacagaattaggctgtgtttttgcattagctggtaggtgactttctcaaaattcttaaattcagaaagtatttagtaaacttgaggaaggtatgaaatctggaggaggcatccaggacccaggggtttgatagctttacaggtaggatcataccacaccaaaagagcagtggacaataagactatatgagctatatgaagcttttaggaatcatttaggacagacagagccctaaacaacccattcatgacttaagttgttggctcagtgtatgctggggacaaagaaaaactaacaagccgacctgcctttatgataaattctagtgtgcttacaagggatgacttcctgaggtgtgatctgtccaccttgaagaactccacaactgaagaaggggagctgtgagaacgtggattgttctacaacttgcacagggtaacagaggaagtggctgaggcctagagtcacgttttccagttcccttcgcaaactatatttcttggaacgcgaaaggaagctttacctatttcatagaagacctggaatccataacctcagaaggcaatattattgatagaaaatgtggaaggatcaggaagttcttagattcttggatgacagatgcatgttgatgccctatggagatgtccttgtgttttgaggtcactgaggtaggaagacctgtctactcttggtttcaccactagaacagtcttgggctggatgggttatagagctgagcggctgtgatggttctgtttttacattaacaaaaacaattaaaaacaccaaaaacaa

SEQ ID NO: 300323 - DNA, 2637 bp, Artificial Sequence
  derived and/or modified sequence
atggcccaccggggcggcgagcgggacttccagaccagcgcccggaggatgggcacaagcctcttattccagctctccgtgcacgaacgcgaattggatttggtgttcctagaccacagctacgccaagccttggtctgcacaccctgatgctagcagcgcccggcctacccgtatgctgttcgtcacacccaggcgccagcacgagtccacaatcgagagcgatgttccaatagatgtcgagaccgtgacttctacacctatgccactctatgacaatcagaaagcccgctctgtcatgaatgagtgcgagcgccatgtgatcttcgctcggaccgacgccgacgcacctccacctcctgaagactgggaggagcatgtgaatcgtactgggtggacgatggcacagaacaaacttttcaacaaaattctgaaggcactccagagcgaccggctggcccgtttggccaatgagggagcctgcaacgaacccgtactgagaagagtcgctgtagataagtgtgccagacgtgtgaggcaagctcttgccagcgttagctgggacacaaaactcatccagtggttgcatacaacactggttgagacattgtcactgcctatgctagctgcctatctcgacgctcttcagaccttaaagggaaaaataccaaccctgattgaccggatgttggtgtcaagtaacacaaagacaggggccgcgggagccgaggccttgtcactgctactgaagcgcccttgggaccctgccgtcggggtgctgagtcataacaagccttctaagctgcccgggtctcctctcatcctgattgcttcgagtgggccctctagctctgtgttcccgacatccaggcgacacagattttggcaaagccagttgtcttgtctgggaaaggtgataccagtcgcaacgcacctcttgaacaatggtagcggtgtgggtgtcctacagtgccttgagcacatgattggagccgtgcggtccaaggtgttagagatccattcccactttcctcataagcccattatcctcataggatggaatactggggccctggtggcttgccacgtgagcgttatggagtatgtgacagccgtagtatgtctcggatttccgctgctgacagtggatgggccccgcggcgatgtggacgacccattactcgacatgaaaacacctgttctctttgtgattggccagaattcactgcaatgccaccctgaagcaatggaggatttcagagagaaaatcagagccgaaaatagccttgtggtggtcggcggtgcggatgataatctgaggatttccaaggcaaaaaaaaagagcgaagggctcacacagagtatggtggacagatgcatccaagacgaaattgtggattttttgacgggggtactcacacgagccgaggggcatatggggtccgaacctcgggatcaggacgccgaaaagaaaaaaaagccaagagatgtagcccgtcgagacctcgcattcgaggtgcccgagagggggagcaggccagcaagcccggccgccaaattgcccgcatccccatctggatccgaagatctctcatcagtgtcaagctcccccacatcctccccgaaaacgaaagttaccactgtaacctctgcccagaagtcctctcagatcgggtctagccagctcctgaagagacatgtgcagcggactgaggcggtgctcactcacaaacaggcccaggttccaatcagtagcgaaccccccgaggaaggcgagaaagaggacctacgcgttcagttgaagcgccaccacccttcaagtcctctaccaggttctaagacctctaaaagaccaaagattaaagtctcccttatctcccagggtgatactgctggtgggccctgtgctccctcacagggatcagcacctgaggctgcgggaggcaaacccattaccatgacgctcggtcaggcaagtgccggcgccaaagagctaactggattgcttaccactgccaagtctagctcttccgaaggaggagtctcagcctctcctgttccctcggtggtctcaagcagcacagctccctctgcattgcacaccttacagagtaggcttgtcgccacaagcccgggcagcagcttgcccggggccacctctgcgagcagcctgctgcagggactctctttttctctgcaggacattagctcaaaaacatcaggcttgcccgcgaatccttcgcctgggccagcccctcaggccacaagcgtcaaattacctactcccatgcaatcactgggcgctataactaccggcaccagcactatcgtgaggactatccctgtagcgactaccctctcttcgctgggggctactcctggtgggaaacccacagctatccatcagctcctgacaaatggaggcctggctaaattagccagtagtctgcccggattagctcagatctccaatcaggctagcggtctgaaggtcccaaccaccatcaccctcactcttcgaggccagcccagtagaatcaccactctcagcccaatggggtcaggcgctgctccgagtgaggagagcagctctcaagttctgcccagctcctcccaacggcttcctcctgccccctag

SEQ ID NO: 300324 - DNA, 2637 bp, Artificial Sequence
  derived and/or modified sequence
atggcacaccggggaggggaacgcgattttcaaacgtcagctagacgtatgggcacttccttgctgtttcagctctccgtgcacgaaagggagcttgatctggtatttctcgaccactcttacgcgaagccctggtcagcccatcccgacgcgtcctccgcgaggcccacgaggatgttgtttgtgactccaaggagacagcacgagtccacaattgaatctgatgtgccaattgatgtcgaaactgtaaccagcacacccatgccgttgtacgacaaccagaaggccaggtccgtgatgaacgaatgtgagcgccacgtaatctttgcccgtacggatgcagatgctcccccaccgcctgaggactgggaagagcacgtaaaccgcaccggctggactatggcccagaacaagctcttcaataagatcctgaaggccctccaaagtgataggttggcacggcttgctaacgagggcgcttgcaatgaacccgtccttcgccgagttgctgtcgataagtgtgcaaggagagtgcggcaggcactcgcttctgtgtcgtgggataccaagctgatccagtggctgcataccactctcgtcgaaactctatccctgccaatgctggccgcttatcttgacgctttgcagactcttaagggcaaaatccctacgctcattgatcgcatgctagtgtcctctaacaccaagaccggtgctgctggcgcagaagctctttcactgctgcttaagcggccatgggatcccgctgtcggcgttctgtctcacaacaagccatcaaagctaccaggatcccccttgatcctgatcgctagttctgggccatcgagctccgtgttcccaacttcccggcgtcatagattttggcagtctcaattgagctgcctgggtaaggtgatacccgtcgcaacacaccttctgaacaacggcagtggtgtgggtgtgttgcagtgcttagaacatatgatcggggctgtcaggagcaaggtgctcgagatccattcacacttcccacacaagccaataatactcatcggctggaatacgggcgctctggtggcctgccacgtatcagtgatggaatatgttaccgcagttgtgtgcctgggatttccactcctgaccgtagatggaccccgaggagatgtggatgaccctctactcgatatgaaaactcctgtgcttttcgtcatcgggcagaactctctccagtgccaccctgaagctatggaggacttccgagaaaagattcgcgcagagaattccctcgtagtggtgggaggcgcagacgacaacctccgaatttcaaaggctaaaaagaagagtgaaggtttgacccaatcaatggttgaccgatgcatacaagacgagattgtggatttccttacaggtgtgctcacccgagcagagggtcacatgggctccgagcctagggatcaggacgcagagaagaagaaaaagcccagggacgtggcacggagagatctggcttttgaggtgccggaaagaggcagtagaccagccagtccagctgctaaattacccgcatccccttccgggagcgaggatctgtccagcgtgagctcaagtccaaccagcagccccaagactaaggtgacgaccgtcacctccgctcagaagtcctctcagatagggtccagccagcttctcaagcgccatgtccaacgaactgaggctgtgctcacccacaaacaggcccaggtcccaatttcttctgagcccccagaagagggggagaaagaggatttacgtgtgcagctgaagagacaccatccaagcagcccattgcctgggtcaaagacatcaaagcggccaaagatcaaagtctcccttatatcccagggcgacacagcgggagggccttgcgcaccgagccaaggtagcgctccggaggctgccggagggaagcctatcacaatgacactgggtcaggcctcagctggcgctaaagagctgaccggtttgttgacaaccgccaaatcttcatccagcgaaggtggtgtttcagcctctccggtgcccagcgtggtgagctccagcactgcccctagtgctctacacactttgcagagtcgcctggtggccacctcccccggttcttctttgcctggcgcaacttctgcgtcttccctgctgcagggtttgagtttttcgctccaagacatcagcagtaaaactagcgggctgcccgctaacccatccccgggtccagctccgcaagctacgtcggtaaagctgcccactcctatgcagtccttgggcgcaatcactacaggcaccagtaccatagttaggacaatcccagtggccacaaccctctccagccttggagccaccccagggggaaagcccacagcgatccatcagttactgaccaatggaggtctggctaagctggcctccagtctgcccggactcgcccagatcagcaatcaggctagcggactgaaggtccctacaacaatcactctcaccttgagaggccagccctcccgaataactacgctctccccgatggggtctggagccgcaccatccgaggagtcgtcctcccaggtgctgccttcgtcctctcaacgactgccacccgctccatag

SEQ ID NO: 300325 - protein, 530 aa, Artificial Sequence
  derived and/or modified sequence
MPLYDNQKARSVMNECERHVIFARTDADAPPPPEDWEEHVNRTGWTMAQNKLFNKILKALQSDRLARLANEGACNEPVLRRVAVDKCARRVRQALASVSWDTKLIQWLHTTLVETLSLPMLAAYLDALQTLKGKIPTLIDRMLVSSNTKTGAAGAEALSLLLKRPWDPAVGVLSHNKPSKLPGSPLILIASSGPSSSVFPTSRRHRFWQSQLSCLGKVIPVATHLLNNGSGVGVLQCLEHMIGAVRSKVLEIHSHFPHKPIILIGWNTGALVACHVSVMEYVTAVVCLGFPLLTVDGPRGDVDDPLLDMKTPVLFVIGQNSLQCHPEAMEDFREKIRAENSLVVVGGADDNLRISKAKKKSEGLTQSMVDRCIQDEIVDFLTGVLTRAEGHMGSEPRDQDAEKKKKPRDVARRDLAFEVPERGSRPASPAAKLPASPSGSEDLSSVSSSPTSSPKTKVTTVTSAQKSSQIGSSQLLKRHVQRTEAVLTHKQAQVPISSEPPEEGEKEDLRVQLKRHHPSTPLPVYSWFHH

SEQ ID NO: 300326 - protein, 352 aa, Artificial Sequence
  derived and/or modified sequence
MPLYDNQKARSVMNECERHVIFARTDADAPPPPEDWEEHVNRTGWTMAQNKLFNKILKALQSDRLARLANEGACNEPVLRRVAVDKCARRVRQALASVSWDTKLIQWLHTTLVETLSLPMLAAYLDALQTLKGKIPTLIDRMLVSSNTKTGAAGAEALSLLLKRPWDPAVGVLSHNKPSKLPGSPLILIASSGPSSSVFPTSRRHRFWQSQLSCLGKVIPVATHLLNNGSGVGVLQCLEHMIGAVRSKVLEIHSHFPHKPIILIGWNTGALVACHVSVMEYVTAVVCLGFPLLTVDGPRGDVDDPLLDMKTPVLFVIGQNSLQCHPEAMEDFREKIRAENSLVVVGGADDNL

SEQ ID NO: 300327 - DNA, 2376 bp, Artificial Sequence
  derived and/or modified sequence
atgcccctgtacgacaaccagaaggccagaagcgtgatgaacgagtgcgagagacacgtgatcttcgccagaaccgacgccgacgccccccccccccccgaggactgggaggagcacgtgaacagaaccggctggaccatggcccagaacaagctgttcaacaagatcctgaaggccctgcagagcgacagactggccagactggccaacgagggcgcctgcaacgagcccgtgctgagaagagtggccgtggacaagtgcgccagaagagtgagacaggccctggccagcgtgagctgggacaccaagctgatccagtggctgcacaccaccctggtggagaccctgagcctgcccatgctggccgcctacctggacgccctgcagaccctgaagggcaagatccccaccctgatcgacagaatgctggtgagcagcaacaccaagaccggcgccgccggcgccgaggccctgagcctgctgctgaagagaccctgggaccccgccgtgggcgtgctgagccacaacaagcccagcaagctgcccggcagccccctgatcctgatcgccagcagcggccccagcagcagcgtgttccccaccagcagaagacacagattctggcagagccagctgagctgcctgggcaaggtgatccccgtggccacccacctgctgaacaacggcagcggcgtgggcgtgctgcagtgcctggagcacatgatcggcgccgtgagaagcaaggtgctggagatccacagccacttcccccacaagcccatcatcctgatcggctggaacaccggcgccctggtggcctgccacgtgagcgtgatggagtacgtgaccgccgtggtgtgcctgggcttccccctgctgaccgtggacggccccagaggcgacgtggacgaccccctgctggacatgaagacccccgtgctgttcgtgatcggccagaacagcctgcagtgccaccccgaggccatggaggacttcagagagaagatcagagccgagaacagcctggtggtggtgggcggcgccgacgacaacctgagaatcagcaaggccaagaagaagagcgagggcctgacccagagcatggtggacagatgcatccaggacgagatcgtggacttcctgaccggcgtgctgaccagagccgagggccacatgggcagcgagcccagagaccaggacgccgagaagaagaagaagcccagagacgtggccagaagagacctggccttcgaggtgcccgagagaggcagcagacccgccagccccgccgccaagctgcccgccagccccagcggcagcgaggacctgagcagcgtgagcagcagccccaccagcagccccaagaccaaggtgaccaccgtgaccagcgcccagaagagcagccagatcggcagcagccagctgctgaagagacacgtgcagagaaccgaggccgtgctgacccacaagcaggcccaggtgcccatcagcagcgagccccccgaggagggcgagaaggaggacctgagagtgcagctgaagagacaccaccccagcagccccctgcccggcagcaagaccagcaagagacccaagatcaaggtgagcctgatcagccagggcgacaccgccggcggcccctgcgcccccagccagggcagcgcccccgaggccgccggcggcaagcccatcaccatgaccctgggccaggccagcgccggcgccaaggagctgaccggcctgctgaccaccgccaagagcagcagcagcgagggcggcgtgagcgccagccccgtgcccagcgtggtgagcagcagcaccgcccccagcgccctgcacaccctgcagagcagactggtggccaccagccccggcagcagcctgcccggcgccaccagcgccagcagcctgctgcagggcctgagcttcagcctgcaggacatcagcagcaagaccagcggcctgcccgccaaccccagccccggccccgccccccaggccaccagcgtgaagctgcccacccccatgcagagcctgggcgccatcaccaccggcaccagcaccatcgtgagaaccatccccgtggccaccaccctgagcagcctgggcgccacccccggcggcaagcccaccgccatccaccagctgctgaccaacggcggcctggccaagctggccagcagcctgcccggcctggcccagatcagcaaccaggccagcggcctgaaggtgcccaccaccatcaccctgaccctgagaggccagcccagcagaatcaccaccctgagccccatgggcagcggcgccgcccccagcgaggagagcagcagccaggtgctgcccagcagcagccagagactgccccccgccccctag

SEQ ID NO: 300328 - DNA, 426 bp, Artificial Sequence
  derived and/or modified sequence
atgcccctgtacgacaaccagaaggccagaagcgtgatgaacgagtgcgagagacacgtgatcttcgccagaaccgacgccgacgccccccccccccccgaggactgggaggagcacgtgaacagaaccggctggaccatggcccagaacaagctgttcaacaagatcctgaaggccctgcagagcgacagactggccagactggccaacgagggcgcctgcaacgagcccgtgctgagaagagtggccgtggacaagtgcgccagaagagtgagacaggccctggccagcgtgagctgggacaccaagctgatccagtggctgcacaccaccctggtggagaccctgagcctgcccatgctggccgcctacctggacgccctgcagaccctgaagggcaaggtgatcctgaccttctgcggctag

SEQ ID NO: 300329 - DNA, 1593 bp, Artificial Sequence
  derived and/or modified sequence
atgcccctgtacgacaaccagaaggccagaagcgtgatgaacgagtgcgagagacacgtgatcttcgccagaaccgacgccgacgccccccccccccccgaggactgggaggagcacgtgaacagaaccggctggaccatggcccagaacaagctgttcaacaagatcctgaaggccctgcagagcgacagactggccagactggccaacgagggcgcctgcaacgagcccgtgctgagaagagtggccgtggacaagtgcgccagaagagtgagacaggccctggccagcgtgagctgggacaccaagctgatccagtggctgcacaccaccctggtggagaccctgagcctgcccatgctggccgcctacctggacgccctgcagaccctgaagggcaagatccccaccctgatcgacagaatgctggtgagcagcaacaccaagaccggcgccgccggcgccgaggccctgagcctgctgctgaagagaccctgggaccccgccgtgggcgtgctgagccacaacaagcccagcaagctgcccggcagccccctgatcctgatcgccagcagcggccccagcagcagcgtgttccccaccagcagaagacacagattctggcagagccagctgagctgcctgggcaaggtgatccccgtggccacccacctgctgaacaacggcagcggcgtgggcgtgctgcagtgcctggagcacatgatcggcgccgtgagaagcaaggtgctggagatccacagccacttcccccacaagcccatcatcctgatcggctggaacaccggcgccctggtggcctgccacgtgagcgtgatggagtacgtgaccgccgtggtgtgcctgggcttccccctgctgaccgtggacggccccagaggcgacgtggacgaccccctgctggacatgaagacccccgtgctgttcgtgatcggccagaacagcctgcagtgccaccccgaggccatggaggacttcagagagaagatcagagccgagaacagcctggtggtggtgggcggcgccgacgacaacctgagaatcagcaaggccaagaagaagagcgagggcctgacccagagcatggtggacagatgcatccaggacgagatcgtggacttcctgaccggcgtgctgaccagagccgagggccacatgggcagcgagcccagagaccaggacgccgagaagaagaagaagcccagagacgtggccagaagagacctggccttcgaggtgcccgagagaggcagcagacccgccagccccgccgccaagctgcccgccagccccagcggcagcgaggacctgagcagcgtgagcagcagccccaccagcagccccaagaccaaggtgaccaccgtgaccagcgcccagaagagcagccagatcggcagcagccagctgctgaagagacacgtgcagagaaccgaggccgtgctgacccacaagcaggcccaggtgcccatcagcagcgagccccccgaggagggcgagaaggaggacctgagagtgcagctgaagagacaccaccccagcacccccctgcccgtgtacagctggttccaccactag

SEQ ID NO: 300330 - DNA, 1059 bp, Artificial Sequence
  derived and/or modified sequence
atgcccctgtacgacaaccagaaggccagaagcgtgatgaacgagtgcgagagacacgtgatcttcgccagaaccgacgccgacgccccccccccccccgaggactgggaggagcacgtgaacagaaccggctggaccatggcccagaacaagctgttcaacaagatcctgaaggccctgcagagcgacagactggccagactggccaacgagggcgcctgcaacgagcccgtgctgagaagagtggccgtggacaagtgcgccagaagagtgagacaggccctggccagcgtgagctgggacaccaagctgatccagtggctgcacaccaccctggtggagaccctgagcctgcccatgctggccgcctacctggacgccctgcagaccctgaagggcaagatccccaccctgatcgacagaatgctggtgagcagcaacaccaagaccggcgccgccggcgccgaggccctgagcctgctgctgaagagaccctgggaccccgccgtgggcgtgctgagccacaacaagcccagcaagctgcccggcagccccctgatcctgatcgccagcagcggccccagcagcagcgtgttccccaccagcagaagacacagattctggcagagccagctgagctgcctgggcaaggtgatccccgtggccacccacctgctgaacaacggcagcggcgtgggcgtgctgcagtgcctggagcacatgatcggcgccgtgagaagcaaggtgctggagatccacagccacttcccccacaagcccatcatcctgatcggctggaacaccggcgccctggtggcctgccacgtgagcgtgatggagtacgtgaccgccgtggtgtgcctgggcttccccctgctgaccgtggacggccccagaggcgacgtggacgaccccctgctggacatgaagacccccgtgctgttcgtgatcggccagaacagcctgcagtgccaccccgaggccatggaggacttcagagagaagatcagagccgagaacagcctggtggtggtgggcggcgccgacgacaacctgtag

SEQ ID NO: 300331 - DNA, 2376 bp, Artificial Sequence
  derived and/or modified sequence
atgccactgtatgacaaccaaaaggctcgctcagtgatgaacgagtgtgagcgccatgtgatcttcgcaaggaccgatgctgatgcgccacctcctccagaagattgggaggaacatgtgaatcgtactggatggactatggctcagaataaactgtttaataagatactgaaggcgcttcagtcggatcgcctggccaggcttgcgaacgagggtgcctgcaatgaacccgtgctcaggcgggttgcggttgataagtgtgccagaagggtgcgacaggccttagccagcgtgtcctgggacactaagttgatacaatggttgcacaccacactggtagagacactcagtctgcccatgttggcagcatatttagacgctctgcagactctgaaggggaagattcctaccttaattgacaggatgctcgtttcatctaacaccaagaccggcgctgccggggctgaagctctctcccttctgttaaaaagaccttgggacccagctgtgggcgtcctgagtcacaacaagccttcgaagcttccagggagcccactcattctcattgcttcatcagggcccagcagtagtgtgttccctaccagccggaggcatcgcttttggcagtcacaactgtcctgtcttggcaaagttatccccgttgccacgcaccttcttaataatggaagcggcgtcggcgtcctccagtgtttagaacatatgatcggggccgtacgcagcaaagtgttagaaatacatagccatttccctcataaacccataatactcatcgggtggaacaccggagctttagtggcctgtcatgtgagcgttatggagtacgtgactgccgttgtttgcctgggctttccccttctcactgtcgacgggccccgcggagatgtagatgatcccctgttagacatgaaaacgccagtgctgttcgtaattggccagaatagtctgcagtgccacccagaggccatggaagatttcagggagaagatccgagctgagaattctttagtggtggtcggtggagccgatgacaatttgaggataagcaaggccaaaaagaaatcggaggggctaacccagtctatggttgatcggtgcatacaggacgagattgtggatttcttgaccggcgtgctgacacgcgccgaaggtcacatgggcagcgaacctagagaccaagacgcagagaagaagaaaaaaccccgagacgtcgctagaagggacctggcattcgaagtgccggagcgcggcagtcgacccgcctcaccggctgccaaactcccagcttccccatcaggctccgaggacttatcaagtgtgtctagttctcctacatcttctcctaaaacaaaggtgactaccgtcacctctgctcagaaatcctctcagataggatcatcgcagttgttgaagagacacgtacagcggacagaggcagttttaactcacaaacaggctcaggtccccatttccagcgaacccccagaagagggcgagaaggaagatttgagagtgcagttaaagagacatcatcctagcagcccgctccctgggagcaagacctccaaaaggcctaaaatcaaggtatcactgatttcacagggcgatactgccgggggaccatgcgctccctcccagggatccgcccccgaagcagccgggggcaaacccatcacgatgactctgggacaagcctcagcaggtgcgaaggagttgactggcttgctgacgacagccaaaagcagcagtagcgagggaggggtctctgcctctcccgtaccctccgttgtcagtagctctacggccccctccgctttgcatactctccagtctagactcgtggccacgagccctggtagttcattacctggtgcaactagcgcgagctcattgctgcaaggcttgtctttttcactgcaggacattagctctaagacctccggcctgcccgcaaatccgtcaccaggtccagcccctcaggctacgtctgtcaagctgcccactcctatgcaatctctcggggccattaccacgggaacctccacaatcgtgaggactattcccgtcgccaccacactaagtagcctgggcgctactccgggcgggaagcctactgctattcaccagctccttactaacggcggcctagccaagctagcttcttcactgccgggactggcgcagatatcgaaccaagccagcggtttgaaagtgcccactactatcactttaactcttagagggcagcctagccgcataactacactgtctcctatggggtcaggcgctgcccccagtgaggagtcatcaagtcaggtactgccgagcagcagccagcgcctgcctcccgcaccttag

SEQ ID NO: 300332 - DNA, 426 bp, Artificial Sequence
  derived and/or modified sequence
atgccactgtatgacaaccagaaggcgcgatccgtcatgaacgagtgtgagaggcatgtcattttcgcaaggacagatgccgatgcgccgccaccacccgaggattgggaggagcacgtcaataggactgggtggactatggcccagaacaaactctttaataaaattctgaaagccctgcagtccgatcggctggcccgcctggccaacgagggcgcttgcaacgagccagtgttgcgccgcgtggcagtggacaagtgtgcaagacgggtgcgtcaggccttggcctccgtgtcctgggatacgaaactaatacagtggttacatacaacccttgtagagacactgtctctgccgatgctggcagcctacttagacgccctgcagacactgaaggggaaggtcattctgaccttttgtggctag

SEQ ID NO: 300333 - DNA, 1593 bp, Artificial Sequence
  derived and/or modified sequence
atgcccctgtacgacaaccaaaaggctaggagcgtgatgaatgagtgtgaacgacatgtcatcttcgcccgtacagatgccgatgcaccacctccgccagaggactgggaggaacacgttaatcggaccggatggaccatggcacaaaataagctgttcaacaagattctgaaggccctccagagcgaccggttggcacgactggctaatgagggagcctgcaatgagcccgtgctccgtcgcgtcgctgtcgacaagtgcgcccgacgcgttagacaggcccttgcaagcgtgagctgggatacaaaactaatccaatggctccacaccacgctcgttgagactctttccttacccatgctggcagcttacctggacgccttacaaacactcaaaggcaaaatccctaccctgatcgatagaatgctcgtgtcgagcaataccaaaacgggtgcagccggcgccgaagctcttagcctgctgttgaagcggccgtgggatccagccgtcggcgtactttcccataacaagccatccaagctccctggctctccactgatcttaattgcctcttcaggaccctctagctccgtgttcccaaccagtagaagacatagattctggcagtcccaattatcttgtttgggaaaagtcatccctgtcgccacccatctcctaaataacggaagcggggtcggcgtcctgcaatgcctggaacacatgattggggctgtgcgcagcaaggtgttggagatccacagccatttcccccataagccaattatcctcattggatggaacaccggcgcactggttgcttgtcatgtctccgtgatggaatatgttacagcagttgtgtgcctgggctttcctcttctcacagtggacgggccgcggggtgacgtggatgaccccctgctggacatgaaaacacccgtgctattcgttattggtcagaatagtcttcagtgtcacccagaagccatggaggacttccgagagaagatccgagctgaaaactcactggtggttgttgggggtgccgacgacaatctgcgaatttctaaagcaaagaagaagtcagaagggctcactcaaagtatggtggatcgatgtatacaggatgaaatcgtggatttcctcacaggagtgctgaccagagcagaaggacatatggggtccgagccacgagaccaggatgccgaaaagaaaaaaaagccccgcgatgttgccagaagagacctcgctttcgaggtgcctgagcgagggtcgcgccccgccagccccgcggccaagttgcctgcaagtccctccggatccgaggatttgtcttccgtcagcagctctcccacatcgtctccaaaaactaaggtcacaaccgtgactagcgcccagaaaagctctcaaataggttcaagtcagttattgaagaggcatgtccagcgcactgaggccgtgctgacccataaacaggcacaggtcccaatctcctcggagccccccgaagagggcgagaaggaagaccttcgggttcagttaaaaagacaccaccctagtactcctctgcccgtctacagctggttccaccactag

SEQ ID NO: 300334 - DNA, 1059 bp, Artificial Sequence
  derived and/or modified sequence
atgcctctttatgacaaccaaaaggctcgaagcgtaatgaacgaatgcgagagacatgttatcttcgctcgaacagatgccgacgcaccccctccaccagaggattgggaagagcatgtcaatcggaccgggtggacaatggcccaaaataaactgttcaataaaattctgaaggctttacaatctgatcgactggccaggctggcaaatgagggcgcatgcaatgaacctgttctccgtcgggtcgcagtagacaagtgcgctagaagggttaggcaggctctggccagcgtttcctgggatacaaagctaatacagtggctgcataccaccctggtggagacactcagcctacctatgctcgccgcatacctggatgcattgcagactctcaaagggaaaattcctacccttatcgacaggatgcttgtctcctctaacaccaaaaccggagctgccggcgcagaagccctgtcattgcttctgaagcggccttgggatcctgccgtgggggtacttagccacaacaagccatcaaagttgccaggatcacccctaattctaattgcaagctcaggtccctcttcttccgtgttccccaccagtaggaggcaccgattttggcaaagtcaactgtcctgcctaggaaaagttattcccgtggcaacccatttgttgaataatggatccggggtcggggtcctgcagtgcttagagcacatgattggggcagtgaggagtaaagttctggagatccattctcactttccacacaaacccattattctgatcggctggaatactggcgcactcgttgcttgtcacgttagtgtaatggaatatgtgaccgcagtagtctgtctgggttttccattgctgaccgtcgacggcccgaggggcgatgttgacgatcctctgctcgacatgaagacacccgtgctcttcgtgatcggccagaactcactgcagtgtcaccccgaagccatggaagactttagggaaaaaattagagcagaaaactcactcgtcgtggtgggtggtgccgacgacaatctttag

SEQ ID NO: 300335 - DNA, 2376 bp, Artificial Sequence
  derived and/or modified sequence
atgcccctgtatgacaaccagaaggcccggtctgtgatgaatgaatgtgaaagacatgtgatctttgccaggacagatgctgatgcccctcctcctcctgaggactgggaggagcacgtgaacagaacaggctggaccatggcccagaacaagctgttcaacaagatcctgaaggccctgcagagcgaccggctggcccggctggccaatgaaggagcctgcaatgaacctgtgctgcggcgggtggccgtggacaagtgtgccaggagagtgcggcaggccctggcctctgtgtcctgggacaccaagctgatccagtggctgcacaccaccctggtggagaccctgagcctgcccatgctggccgcctacctggatgccctgcagaccctgaagggcaagatccccaccctgattgacaggatgctggtgagcagcaacaccaagacaggagctgctggagctgaggccctgagcctgctgctgaagaggccctgggaccctgctgtgggcgtgctgagccacaacaagcccagcaagctgcccggcagccccctcatcctgattgccagcagcggccccagcagctctgtgttccccaccagcagaagacaccgcttctggcagagccagctgagctgcctgggcaaggtgattcctgtggccacccacctgctgaacaacggcagcggcgtgggcgtgctgcagtgcctggagcacatgattggagctgtgcgcagcaaggtgctggagatccacagccacttcccccacaagcccatcatcctgattggctggaacacaggagccctggtggcctgccacgtgtctgtgatggagtatgtgacagctgtggtgtgcctgggcttccccctgctgactgtggatggccccagaggagatgtggatgaccccctgctggacatgaagacccctgtgctgtttgtgattggccagaacagcctgcagtgccaccctgaggccatggaggacttccgggagaagatccgggcagagaacagcctggtggtggtgggcggcgcagatgacaacctgcgcatcagcaaggccaagaagaagtctgagggcctgacccagagcatggtggaccgctgcatccaggatgaaattgtggacttcctgactggagtgctgaccagggctgagggccacatgggcagcgagccccgggaccaggatgctgagaagaagaagaagcccagagatgtggcccggcgggacctggcctttgaggtgcctgagcggggcagcaggcctgccagccctgctgccaagctgcctgccagccccagcggcagcgaggacctgagctctgtgagcagcagccccaccagcagccccaagaccaaggtgaccaccgtgaccagcgcccagaagagcagccagatcggcagcagccagctgctgaagagacatgtgcagaggacagaagctgtgctgacccacaagcaggcccaggtgcccatcagcagcgagcccccagaggagggggagaaggaggacctgcgggtgcagctgaagaggcaccaccccagcagccccctgcccggcagcaagaccagcaagaggcccaagatcaaggtgtccctcatcagccagggcgacacagctgggggcccctgtgcccccagccagggcagcgcccctgaggccgccggcggcaagcccatcaccatgaccctgggccaggccagcgctggggccaaggagctgaccggcctgctgaccacagccaagagcagcagcagcgagggcggcgtgtctgccagccctgtgcccagcgtggtgagcagcagcacagcccccagcgccctgcacaccctgcagagccggctggtggccaccagccctggcagcagcctgcccggggccaccagcgccagcagcctgctgcagggcctgtccttcagcctgcaggacatcagcagcaagaccagcggcctgcctgccaaccccagccctggccctgccccccaggccacctctgtgaagctgcccacccccatgcagagcctgggcgccatcaccaccggcaccagcaccatcgtgaggaccatccctgtggccaccaccctgagcagcctgggcgccacccctgggggcaagcccacagccatccaccagctgctgaccaatggaggcctggccaagctggccagcagcctgcccggcctggcccagatcagcaaccaggccagcggcctgaaggtgcccaccaccatcaccctgaccctgcggggccagcccagccgcatcaccaccctgagccccatgggcagcggggccgcccccagcgaggagagcagcagccaggtgctgcccagcagcagccagaggctgcccccagccccctag

SEQ ID NO: 300336 - DNA, 426 bp, Artificial Sequence
  derived and/or modified sequence
atgcccctgtatgacaaccagaaggcccggtctgtgatgaatgaatgtgaaagacatgtgatctttgccaggacagatgctgatgcccctcctcctcctgaggactgggaggagcacgtgaacagaacaggctggaccatggcccagaacaagctgttcaacaagatcctgaaggccctgcagagcgaccggctggcccggctggccaatgaaggagcctgcaatgaacctgtgctgcggcgggtggccgtggacaagtgtgccaggagagtgcggcaggccctggcctctgtgtcctgggacaccaagctgatccagtggctgcacaccaccctggtggagaccctgagcctgcccatgctggccgcctacctggatgccctgcagaccctgaagggcaaggtgatcctgaccttctgtggctag

SEQ ID NO: 300337 - DNA, 1593 bp, Artificial Sequence
  derived and/or modified sequence
atgcccctgtatgacaaccagaaggcccggtctgtgatgaatgaatgtgaaagacatgtgatctttgccaggacagatgctgatgcccctcctcctcctgaggactgggaggagcacgtgaacagaacaggctggaccatggcccagaacaagctgttcaacaagatcctgaaggccctgcagagcgaccggctggcccggctggccaatgaaggagcctgcaatgaacctgtgctgcggcgggtggccgtggacaagtgtgccaggagagtgcggcaggccctggcctctgtgtcctgggacaccaagctgatccagtggctgcacaccaccctggtggagaccctgagcctgcccatgctggccgcctacctggatgccctgcagaccctgaagggcaagatccccaccctgattgacaggatgctggtgagcagcaacaccaagacaggagctgctggagctgaggccctgagcctgctgctgaagaggccctgggaccctgctgtgggcgtgctgagccacaacaagcccagcaagctgcccggcagccccctcatcctgattgccagcagcggccccagcagctctgtgttccccaccagcagaagacaccgcttctggcagagccagctgagctgcctgggcaaggtgattcctgtggccacccacctgctgaacaacggcagcggcgtgggcgtgctgcagtgcctggagcacatgattggagctgtgcgcagcaaggtgctggagatccacagccacttcccccacaagcccatcatcctgattggctggaacacaggagccctggtggcctgccacgtgtctgtgatggagtatgtgacagctgtggtgtgcctgggcttccccctgctgactgtggatggccccagaggagatgtggatgaccccctgctggacatgaagacccctgtgctgtttgtgattggccagaacagcctgcagtgccaccctgaggccatggaggacttccgggagaagatccgggcagagaacagcctggtggtggtgggcggcgcagatgacaacctgcgcatcagcaaggccaagaagaagtctgagggcctgacccagagcatggtggaccgctgcatccaggatgaaattgtggacttcctgactggagtgctgaccagggctgagggccacatgggcagcgagccccgggaccaggatgctgagaagaagaagaagcccagagatgtggcccggcgggacctggcctttgaggtgcctgagcggggcagcaggcctgccagccctgctgccaagctgcctgccagccccagcggcagcgaggacctgagctctgtgagcagcagccccaccagcagccccaagaccaaggtgaccaccgtgaccagcgcccagaagagcagccagatcggcagcagccagctgctgaagagacatgtgcagaggacagaagctgtgctgacccacaagcaggcccaggtgcccatcagcagcgagcccccagaggagggggagaaggaggacctgcgggtgcagctgaagaggcaccaccccagcacccccctgcctgtgtacagctggttccaccactag

SEQ ID NO: 300338 - DNA, 1059 bp, Artificial Sequence
  derived and/or modified sequence
atgcccctgtatgacaaccagaaggcccggtctgtgatgaatgaatgtgaaagacatgtgatctttgccaggacagatgctgatgcccctcctcctcctgaggactgggaggagcacgtgaacagaacaggctggaccatggcccagaacaagctgttcaacaagatcctgaaggccctgcagagcgaccggctggcccggctggccaatgaaggagcctgcaatgaacctgtgctgcggcgggtggccgtggacaagtgtgccaggagagtgcggcaggccctggcctctgtgtcctgggacaccaagctgatccagtggctgcacaccaccctggtggagaccctgagcctgcccatgctggccgcctacctggatgccctgcagaccctgaagggcaagatccccaccctgattgacaggatgctggtgagcagcaacaccaagacaggagctgctggagctgaggccctgagcctgctgctgaagaggccctgggaccctgctgtgggcgtgctgagccacaacaagcccagcaagctgcccggcagccccctcatcctgattgccagcagcggccccagcagctctgtgttccccaccagcagaagacaccgcttctggcagagccagctgagctgcctgggcaaggtgattcctgtggccacccacctgctgaacaacggcagcggcgtgggcgtgctgcagtgcctggagcacatgattggagctgtgcgcagcaaggtgctggagatccacagccacttcccccacaagcccatcatcctgattggctggaacacaggagccctggtggcctgccacgtgtctgtgatggagtatgtgacagctgtggtgtgcctgggcttccccctgctgactgtggatggccccagaggagatgtggatgaccccctgctggacatgaagacccctgtgctgtttgtgattggccagaacagcctgcagtgccaccctgaggccatggaggacttccgggagaagatccgggcagagaacagcctggtggtggtgggcggcgcagatgacaacctgtag

SEQ ID NO: 300339 - DNA, 2376 bp, Artificial Sequence
  derived and/or modified sequence
atgcccctgtacgacaaccagaaggcccggagcgtgatgaacgagtgtgaaaggcacgtgatctttgccaggactgatgctgatgccccgcctccgcccgaggactgggaagaacatgtcaacaggaccggatggacaatggcgcagaataagctctttaacaagatcttaaaggctctgcagtcagatagactggctcgactcgcaaacgaaggggcttgcaatgagccggtgttgcgccgtgtggccgtggataagtgtgcccgaagagttcgacaggccttagcctcggtctcttgggacacaaagctgatacagtggctgcacactacactggtggaaaccctcagtctgccaatgctagcagcttacttggacgctctgcagacactaaaagggaagattcccactctcattgatcgaatgctggtgtctagtaacacaaagacaggggctgccggggccgaggccctgtcactgttgctaaagcggccgtgggaccctgctgtgggcgtgctgtcacacaataagccctctaagctccccggaagtccgctgattctgatcgcatcgagcgggcctagcagtagcgtcttccctacttctagacgacacaggttctggcagagccaactctcctgtctcggcaaggtgatcccagtggctacccatctgcttaacaacggttctggcgttggggttctgcagtgtctggaacacatgattggcgccgtgaggagcaaggtgctcgagattcactcgcacttcccccacaagccaatcattttgattggctggaacactggtgccttagtggcctgtcatgtaagtgttatggaatacgtcactgcggtcgtctgcttgggtttccctctcctcaccgtggacgggcccaggggggacgtggatgacccactgctggatatgaagactccagtgctgtttgtgatcgggcagaacagcctccagtgccatcccgaagctatggaggacttccgcgaaaagatccgcgccgagaattcattagtcgtggtcggtggggccgacgacaatttgcgcatctccaaggcaaaaaaaaagtcggaagggcttacacaaagtatggtggatcgctgcatccaggatgagattgtggattttctcacgggcgtcttaactagagccgaaggccacatgggttccgaaccacgcgatcaagacgccgagaaaaagaaaaagccacgggatgtagccagaagggatttggctttcgaagtgcctgaaagaggaagccgtccggcttctcctgctgccaaactccctgccagtccttccgggagcgaggacctgagcagtgtcagttctagtccaacaagtagcccaaagactaaggtgacaacagtgaccagcgcacaaaaatcttctcagatcggctccagccagttgctgaaacggcatgtgcagcgaactgaagcagtgctgactcacaaacaagcgcaggttcccatctcttctgaacctccagaagaaggtgagaaggaggatctcagagttcagctaaaaagacaccatccctcttctccactacctggatccaaaacctcaaaaagaccaaagattaaagtgtccctcatttcccaaggagacacagccggaggtccttgtgccccaagtcaaggcagtgcccccgaggctgctggaggaaaaccgatcactatgactctggggcaagcatccgcaggtgccaaggaactcaccgggctcctgaccaccgcaaaatctagttcatctgaggggggcgtgtcggcctctcccgttccatcagtagtgtcttcaagcaccgcacccagcgccctgcatactctacagtcaagactagtcgctacatcccctggatcgtctctcccaggggcgacgtccgcctcaagcctgctgcagggcctttctttctcattgcaagacatttcgtccaaaacatcaggactgccagcaaacccctcccccggaccagccccccaggctactagtgtgaaactgccaactcccatgcaaagtcttggagctatcaccaccgggacctcgactattgtgagaaccattcccgtggccaccacgctgtcttctttgggcgctactccgggtggtaagcctacagctattcaccaacttttaaccaatgggggactcgcgaagcttgcgtcatcccttccaggcttggcccagatctccaatcaggcttcagggcttaaggtgcctacaacgattacccttactctgagaggacagcctagcaggatcaccaccttgtcaccaatgggctccggagccgctccatcggaggagtcgagcagccaggttctgccttcttcttctcaaagactgccacctgcaccatag

SEQ ID NO: 300340 - DNA, 426 bp, Artificial Sequence
  derived and/or modified sequence
atgcccctgtacgacaaccagaaggcccggagcgtgatgaacgagtgtgagcggcacgttatctttgcacgaactgatgccgatgctccaccaccacctgaagactgggaagagcatgtgaaccgaacgggctggacaatggctcaaaataaactgttcaacaagatattgaaggcccttcagtctgaccgactggcgagactggcgaacgaaggcgcctgtaatgaaccagtgctgcgtagagtggctgtggacaaatgtgcccgtagggttcggcaggcactggcctccgtcagttgggacaccaagctcattcagtggctgcacacaaccctcgtagaaacgttatcgctgcccatgctcgccgcctacctggatgcactgcagaccctgaaaggtaaagtgatcctgaccttttgcggatag

SEQ ID NO: 300341 - DNA, 1593 bp, Artificial Sequence
  derived and/or modified sequence
atgcccctgtacgacaaccagaaggcccggagcgtgatgaacgagtgtgaacgccacgtcatcttcgcacggaccgacgcagacgcgcccccaccccccgaggattgggaagaacatgtgaatcgcaccggatggacgatggcccagaacaagctgttcaataaaatactaaaagccctgcaaagcgataggttagcccgactggcaaacgagggtgcctgtaatgagcctgtgctgaggagggtggccgtggataagtgcgcaaggcgggtccggcaagccctggcttccgtgtcctgggacacaaaacttattcagtggctgcacacaactctggtggaaacactgagcttgcccatgctggccgcttatctcgacgcccttcagacccttaagggaaaaatccctacccttatcgatcggatgctggtgtcgtctaataccaagactggggccgccggggctgaggccctatctctgttacttaagagaccatgggacccggctgttggggtattgagccacaataagcccagtaagctgcctggaagtcctctgattttaatagcatcatctggccctagttccagtgtcttccccaccagtcggcggcacagattctggcagtcacagctctcctgcctcggcaaggtgattccagtcgctacccatctgctcaacaacggatctggcgtgggcgttctacagtgtcttgagcacatgatcggcgcagtccggtcaaaggtcctggagatccattcacatttcccacacaaacctataattctcattgggtggaacacgggagctctggtggcttgtcacgtttctgtcatggagtacgttaccgctgtggtttgcctgggattcccactgctcaccgtagacggtccgcggggtgacgtggatgacccactgctggatatgaagactcctgtcctgtttgtcataggacaaaacagcctccagtgccaccctgaagccatggaggacttccgggaaaagattcgagccgaaaacagtctcgtggttgttggaggcgccgatgataacctgcggatctcaaaagctaagaagaagtccgaggggctcacacagtctatggtcgacaggtgcattcaggatgagatcgttgacttcctcaccggggtcctgacacgggctgaagggcacatgggatctgagccacgcgatcaggatgctgaaaaaaagaaaaaaccccgcgacgtagcacgcagggacctcgcatttgaggtacccgaaaggggtagcaggccagctagtccagcggcgaagctgccagcttctcccagcggtagcgaagatctcagctcagtcagctcttctccgactagcagccctaagactaaagtgacgactgtgacctctgcacaaaaaagtagtcagatcggtagcagtcaacttttgaaacggcacgtgcagagaactgaagctgtgttgacccataagcaggcccaggtcccaatctcttctgagcctcccgaagagggagagaaggaagacctccgggtgcagttgaagcggcaccatccatctacacccctgcccgtgtatagctggttccaccactag

SEQ ID NO: 300342 - DNA, 1059 bp, Artificial Sequence
  derived and/or modified sequence
atgcccctgtacgacaaccagaaggcccggagcgtgatgaacgagtgtgaacgtcatgtgatctttgcccgaaccgatgctgacgctccccctcccccggaggactgggaggaacatgtgaacaggacgggctggacaatggcacagaataaactatttaacaaaatccttaaagcactccagtcagacagactggcccggctggcaaacgagggagcttgtaatgaaccagttctgcgcagggtggcggtggacaaatgtgcacgacgggttcgtcaggcactggcgtcagtgtcctgggataccaaattgattcagtggctgcatacaaccctggttgagactctctcacttcccatgctcgccgcctatttggatgctcttcaaactcttaagggcaaaatacccaccctgatagatcggatgctggtctcaagcaacaccaaaaccggagcagctggcgctgaggcgctgtctctcctgctgaagcggccctgggatcccgccgtcggagtgttgagtcacaataagccttctaagttgcctggctcaccactgatcttaatcgcctcctcagggcccagcagctcagtttttccaaccagtcgtcgacaccggttctggcagtctcaactgtcatgtctgggcaaagtcatcccggtagccacacatcttcttaacaatggctctggagttggggttctacagtgcttggaacatatgataggcgcagtgcgctcaaaagtgctggagatacatagtcattttccccataagccaataattctcatcgggtggaataccggggcgctggtggcctgtcatgtgagtgtcatggagtacgtaacggctgtggtatgtttgggcttcccgctgctcacggtagatggcccacggggcgacgtcgatgatcctctcttggacatgaagacccccgtactctttgtgatcggtcagaacagtctgcagtgccatcctgaagccatggaggatttccgtgagaaaatacgcgcagagaactctctcgtggtcgtggggggcgccgatgataacctgtag

SEQ ID NO: 300343 - DNA, 2376 bp, Artificial Sequence
  derived and/or modified sequence
atgccgctttacgataatcaaaaagcacgttctgtcatgaatgagtgtgagcgccatgtcatttttgctcgaacagacgccgacgctcccccacctcctgaagactgggaggagcatgtgaatagaacaggatggacaatggcccagaacaaacttttcaataagatcctcaaagcattgcaaagcgatcggttggctcgacttgccaatgaaggagcttgcaatgaaccggtccttcgtagagtggcagtcgacaagtgcgcacgcagagtgcgccaggctctggccagtgtgtcatgggacaccaagctcatccaatggctacacactaccttggtggaaacactgagtctgcccatgttggcagcctacctggacgccctacagaccctcaagggcaagattcccacgctcattgacagaatgttagtgtccagcaacacaaagactggcgctgcaggggctgaggcactgagcctcttgctcaaacgcccttgggatccggcagttggagtcctgagccataacaaaccgtccaaactcccaggatcgcctttgattctgatcgcctcaagtgggccatcatctagcgtcttcccaactagtagacggcaccgtttttggcagtcacagctctcttgtctcggaaaagtgatccctgtcgccacccaccttctcaacaacgggtccggagtgggggttctgcagtgtctggagcacatgattggcgctgtacgctctaaagtgctggagattcacagtcacttccctcacaaacctattatcctcataggttggaatacgggagctctggtcgcttgtcacgtgagcgtaatggaatatgtcactgccgtagtctgtctaggctttcctctcctcacggtggatggcccacggggagacgtggatgatcccctgctcgacatgaagacccctgtcctttttgtcattgggcagaacagcctacaatgtcaccctgaggcaatggaagactttcgcgaaaaaataagggccgagaacagcctcgtagtggtcggcggagcagatgacaatcttcgaatttcaaaggctaaaaagaagagcgaaggtctaacgcagtcaatggtggaccggtgcatccaggacgagatcgtggacttcctgaccggcgttctgacgagggccgagggtcatatgggcagcgagccacgggatcaagatgctgagaagaaaaagaagccacgggacgtggcacggagggacctcgcctttgaggtcccggaacggggttcgcggcctgctagccccgcagctaaactcccggcaagtccttctggtagcgaagacctcagctcggtcagctcatcaccgacatcgagtcccaagaccaaggtgactaccgtgacctcggcccagaaaagcagccagattgggtcctcgcaactgctgaaaaggcatgtgcaaaggaccgaggcagtgctgacccacaagcaggcccaagtgccgatctcctctgaacctcccgaagagggagaaaaggaagaccttcgcgtacagctaaaaagacaccacccctccagtccactgccaggtagcaaaacgtccaagcgcccaaagatcaaagtgagtttaatatcacagggcgacacggccggtggcccttgcgcgccttctcaaggcagtgctccagaggccgcaggcggaaaacctatcaccatgacacttggacaagcttctgccggagctaaggaactcaccggactcctgacaaccgctaagagctcttcaagtgaaggcggagtatccgcgagcccggtgcctagcgtggtgagctcttctacagctccatctgctctccacacactgcagtctcggctcgttgctactagtcctgggtctagtctgcccggagctacgtcagcttcttcacttctgcagggactcagtttttccttgcaggacatttcaagcaagacaagtggcttacccgcaaacccatcccctggtcctgccccacaggccactagtgtaaaactcccaacacctatgcagagtttaggtgctataacaaccgggacatctaccatagttaggactattcctgttgcaactactctttccagtctgggcgctacgcccggaggcaagcccaccgcaattcaccagctgctaacaaatggcggacttgcgaagctcgccagctctttgcccggtttggctcaaatttctaaccaggcctcaggcctcaaggtacccaccacaatcaccttaacgctcagagggcaaccgtctcggattaccacactatcccctatgggctcaggcgctgccccttctgaagaaagcagtagccaagtgttaccaagtagctcacaacgattaccacctgccccttag

SEQ ID NO: 300344 - DNA, 426 bp, Artificial Sequence
  derived and/or modified sequence
atgcccttatacgataaccaaaaggccaggagcgtcatgaacgaatgtgaacgtcatgtgatcttcgccaggaccgacgccgatgctccccctcctcccgaagactgggaggagcatgttaaccgtacaggttggacaatggcccagaataagttgttcaataagatcctgaaagctcttcagagcgatcggctggcaaggctagccaacgagggagcatgtaacgagccagttcttcggagggtcgccgtcgataaatgcgctcgaagagtcaggcaggctctggcatcagtaagctgggacaccaagctcatccagtggctgcacacaactctggtggagacactgagtctccctatgctggctgcatacctggatgcactccagacactcaaaggtaaagtaatcctgacgttttgtgggtag

SEQ ID NO: 300345 - DNA, 1593 bp, Artificial Sequence
  derived and/or modified sequence
atgcctctatacgacaaccagaaagctaggtccgtgatgaacgagtgtgagcgccatgtcattttcgcgcgtactgacgccgatgcccctcctcccccagaagactgggaagaacatgttaatagaaccggctggactatggcgcagaataagctctttaacaagatcctgaaagctctccagagcgataggctggctcgcctggctaacgagggcgcatgtaacgagcctgttctgaggcgggtggctgtagataagtgtgcaaggcgtgtgagacaggccctggcttctgtgagctgggacactaaactgattcagtggctacacactacgttggtggagaccctcagtcttccaatgcttgctgcctaccttgatgcgctccagaccctaaaggggaagatccccaccctcattgatcgtatgctcgtgtcctccaacacaaagactggtgctgccggagctgaggctctaagtttgctgcttaagcgaccctgggacccagccgtaggggtgctgtctcataacaagccttcaaagcttcccggttcacctctgatcttgatcgctagctcagggccttcttcctctgtgttcccaacgtctcgcagacacaggttctggcagagccaactcagctgtttgggcaaggtgatcccagttgccacccatttgctgaataacgggtccggggtgggcgttctgcagtgcctggagcacatgataggcgctgtgcgctctaaagtgcttgagattcactcacacttcccccacaaaccaatcatcctcattggatggaacacaggggcactcgtggcctgtcacgtgtccgtaatggaatacgtgactgccgtagtttgcctgggattcccgcttttgacggttgacgggccacggggtgatgttgatgaccctcttctggatatgaaaacccccgtacttttcgttatcggacagaattccctacaatgccacccagaggccatggaagacttccgggagaagatccgcgctgagaattcactggtcgtggtgggcggagccgacgataatctgcgaattagcaaggcgaaaaaaaagtcagaaggtctgacacagtcaatggtggatcgatgcatccaggatgagatcgtggattttttgaccggggtactcacacgcgctgaggggcacatgggatcagagcctagagaccaagatgccgaaaagaaaaagaaacccagggacgtggcccgaagggatctcgcctttgaggtccctgaaagaggaagtagacctgccagcccagccgctaagctccccgcttccccttcgggcagcgaggatttgagtagcgtcagctcctctcctacttcttctccaaagaccaaggtaacaacagtgacttcagctcagaagtctagtcagattggcagctcacagctattgaagaggcatgttcagcggactgaagcagtactcacccacaaacaggcccaggtcccaatctctagtgaaccccctgaagaaggagagaaggaggacctgagagtgcaattaaaaagacaccacccatccacaccactccctgtgtacagttggtttcaccactag

SEQ ID NO: 300346 - DNA, 1059 bp, Artificial Sequence
  derived and/or modified sequence
atgcccctctacgacaaccagaaggcacgctcagtaatgaatgagtgcgaaagacacgtaatattcgctcgaaccgatgccgatgcccctccccctccagaagactgggaagaacacgtgaaccgtaccggttggacgatggcccaaaataaactgtttaacaaaattcttaaagctctgcagagcgaccggcttgctcgcctcgccaacgagggggcatgtaacgagccggtgctgcggcgtgtagccgtcgacaagtgcgcccgtcgggtaaggcaagccctcgccagcgttagctgggacaccaagctgattcaatggctgcacacaaccctggtcgaaaccttgtcactgcctatgttagctgcatacttggatgctttgcagactctcaagggcaagatacctacgctgatcgaccggatgctagttagcagcaataccaagacaggggctgctggagccgaagccctttcactgctgctcaaacgaccatgggatccagcagtgggcgtcctgagtcataataagccttccaaattgcccggatccccactaatcctcatcgcctcgagcgggccaagcagctctgtctttcccacatcccggcgtcatagattctggcagagtcagcttagctgcctgggtaaggtgattccagtggccacccacttgctgaacaacggctcaggtgtgggggtactgcagtgcctggaacacatgatcggcgctgtgcgcagcaaggtgctggagatccattcgcatttccctcacaaaccaatcatcctcattggctggaataccggcgctctggtcgcttgtcatgtgtcagtgatggaatatgttactgcagtggtgtgccttgggtttcctctacttactgtcgatgggccacgaggcgacgtagatgaccctttactagatatgaagacacctgtgctgtttgtgatcggacaaaactccctccagtgccaccccgaggctatggaggattttcgagagaaaatccgggcagagaattcgctggtggtcgtaggaggagcggatgacaatctgtag

SEQ ID NO: 300347 - protein, 162 aa, Artificial Sequence
  derived and/or modified sequence
MYRHALPPGFVLKKDKKKEEKEDEISLEDLIERERSALGPNVTKITLESFLAWKKRKRQEKIDKLEQDMERRKADFKAGKALVISGREVFEFRPELVNDDDEEADDTRYTQGTGGDEVRGSFVPHLLMLIERNNRKYHNMVKSHQHQSHSAWVQILTPTMGN

SEQ ID NO: 300348 - protein, 501 aa, Artificial Sequence
  derived and/or modified sequence
MSSRQDKSASKEKSKKPVRFLPQLSMEKLASKEKFKAPARALPQLSMVSTKPHWQQAAPSFHLSVKQDDESPEPFSVKNEQSHAEYMERFGKKGKLPHQVDDSYVGPSTSKSKGKSPHKERENFRSTLVNVIMQQDADLDSAVPDGSTIPKPTASAIEKDILRYYYYIHHGIDTDHVAPMEDSWLEHVLDLVPQHLKVFTDSIVTLSDEMREDYLLSVRKSIVDFVLKDPREKGDDKKTDELPAHRAEMEILPKPWRKSFLAASSYIRDHLNAMNPTMLAVLDLWHTNFKKLRLVDIKEFHNCQDALELSSFQNIIMRHMDSAKETLLKMWFPEVQNIYYQGNKKKQLPTGDSSAKLESFFNCAAALMTLQLQDLTLVSMQDFTDLIAQPPDSVRAFEHPGFIMRLILDNDTIKFEPELSDYIDIFLNVYDVMIKAVSFVPRVETKLYSKWRNKAKPGHFYFSHIQRSVTFQHSEVSSPQNSHFKIVSPFSVLGFTWRCQL

SEQ ID NO: 300349 - protein, 501 aa, Artificial Sequence
  derived and/or modified sequence
MSSEQDKSASKEKSKKPVRFLPQLSMEKLASKEKFKAPARALPQLSMVSTKPHWQQAAPSFHLSVKQDDESPEPFSVKNEQSHAEYMERFGKKGKLPHQVDDSYVGPSTSKSKGKSPHKERENFRSTLVNVIMQQDADLDSAVPDGSTIPKPTASAIEKDILRYYYYIHHGIDTDHVAPMEDSWLEHVLDLVPQHLKVFTDSIVTLSDEMREDYLLSVRKSIVDFVLKDPREKGDDKKTDELPAHRAEMEILPKPWRKSFLAASSYIRDHLNAMNPTMLAVLDLWHTNFKKLRLVDIKEFHNCQDALELSSFQNIIMRHMDSAKETLLKMWFPEVQNIYYQGNKKKQLPTGDSSAKLESFFNCAAALMTLQLQDLTLVSMQDFTDLIAQPPDSVRAFEHPGFIMRLILDNDTIKFEPELSDYIDIFLNVYDVMIKAVSFVPRVETKLYSKWRNKAKPGHFYFSHIQRSVTFQHSEVSSPQNSHFKIVSPFSVLGFTWRCQL

SEQ ID NO: 300350 - DNA, 1506 bp, Artificial Sequence
  derived and/or modified sequence
atgagcagcgagcaggacaagagcgccagcaaggagaagagcaagaagcccgtgagattcctgccccagctgagcatggagaagctggccagcaaggagaagttcaaggcccccgccagagccctgccccagctgagcatggtgagcaccaagccccactggcagcaggccgcccccagcttccacctgagcgtgaagcaggacgacgagagccccgagcccttcagcgtgaagaacgagcagagccacgccgagtacatggagagattcggcaagaagggcaagctgccccaccaggtggacgacagctacgtgggccccagcaccagcaagagcaagggcaagagcccccacaaggagagagagaacttcagaagcaccctggtgaacgtgatcatgcagcaggacgccgacctggacagcgccgtgcccgacggcagcaccatccccaagcccaccgccagcgccatcgagaaggacatcctgagatactactactacatccaccacggcatcgacaccgaccacgtggcccccatggaggacagctggctggagcacgtgctggacctggtgccccagcacctgaaggtgttcaccgacagcatcgtgaccctgagcgacgagatgagagaggactacctgctgagcgtgagaaagagcatcgtggacttcgtgctgaaggaccccagagagaagggcgacgacaagaagaccgacgagctgcccgcccacagagccgagatggagatcctgcccaagccctggagaaagagcttcctggccgccagcagctacatcagagaccacctgaacgccatgaaccccaccatgctggccgtgctggacctgtggcacaccaacttcaagaagctgagactggtggacatcaaggagttccacaactgccaggacgccctggagctgagcagcttccagaacatcatcatgagacacatggacagcgccaaggagaccctgctgaagatgtggttccccgaggtgcagaacatctactaccagggcaacaagaagaagcagctgcccaccggcgacagcagcgccaagctggagagcttcttcaactgcgccgccgccctgatgaccctgcagctgcaggacctgaccctggtgagcatgcaggacttcaccgacctgatcgcccagccccccgacagcgtgagagccttcgagcaccccggcttcatcatgagactgatcctggacaacgacaccatcaagttcgagcccgagctgagcgactacatcgacatcttcctgaacgtgtacgacgtgatgatcaaggccgtgagcttcgtgcccagagtggagaccaagctgtacagcaagtggagaaacaaggccaagcccggccacttctacttcagccacatccagagaagcgtgaccttccagcacagcgaggtgagcagcccccagaacagccacttcaagatcgtgagccccttcagcgtgctgggcttcacctggagatgccagctgtag

SEQ ID NO: 300351 - DNA, 1506 bp, Artificial Sequence
  derived and/or modified sequence
atgtcctcccggcaggacaagagtgcctccaaagaaaagtccaagaaaccagtgcggttcctgccccagctcagtatggagaagctggctagtaaagagaaatttaaagcgccagcaagggcccttcctcagctgtctatggtgtcaactaagccccactggcaacaggccgccccatccttccatctgtccgtaaaacaggacgacgaatctccagagccattctccgtgaagaacgaacagtcccacgctgagtatatggaaagatttggtaaaaaggggaaactcccccatcaggtggatgacagctatgtgggcccttctaccagtaagagtaagggcaagtcacctcataaagaacgcgagaactttcgtagcaccctagtcaacgtgatcatgcaacaggacgcggatctagactcggctgtgcccgacggctcaacaattccaaaaccaaccgcctccgcaatcgaaaaagatattctcagatactattactacatccatcacggtattgacacagaccatgtggcaccgatggaagatagttggctcgagcacgtgttagatcttgtgcctcagcatttaaaggtgtttacagatagtattgttaccctgtcagatgagatgagagaagattacctgctcagcgtgaggaagtcaatcgtggactttgtgttaaaggacccgagagaaaagggagacgataagaagacagatgagctgcccgcccatagagcagagatggagatcctgcctaaaccatggcgcaagtccttcctggccgcctccagctacataagagaccatttgaatgctatgaatcctaccatgctcgcggtgctcgacttgtggcatacaaacttcaagaagctcaggcttgtcgacatcaaagaatttcataactgtcaggacgctctggaactcagctccttccaaaacatcataatgagacacatggacagtgctaaagaaactctgctgaaaatgtggtttcctgaagtccagaacatctattaccaggggaataaaaagaaacaactcccgaccggcgattcaagcgcgaagctggagagtttctttaattgtgccgctgcgcttatgaccctccagttgcaggacctgacattagtttccatgcaggacttcaccgatctcatagctcagcctccggacagtgtcagagccttcgagcacccggggttcattatgcgcttaatactcgataatgatactataaagtttgagcctgaactctccgactacatagatatctttttaaacgtgtacgatgtgatgatcaaggcggtttctttcgttcctcgagtcgagacgaagctgtacagcaagtggagaaacaaggcaaagcccgggcatttctactttagccacatacagaggtctgtcacatttcagcacagcgaggtgagttctcctcagaactcccatttcaaaatagtgtcgcccttttccgtgctaggtttcacttggagatgtcagctttag

SEQ ID NO: 300352 - DNA, 1506 bp, Artificial Sequence
  derived and/or modified sequence
atgagcagcgaacaggacaagtcggccagcaaggagaagagtaagaaacctgtgcggttccttccccagctctcaatggagaaattagcaagcaaagaaaaattcaaggcgcctgcccgcgccctgccccagctgagcatggtgtctactaagcctcactggcagcaggcagcgccaagctttcatctgagcgtcaaacaagatgatgaatcccccgagccctttagcgtgaagaatgagcaaagtcatgcagagtatatggagagatttggaaaaaaaggcaaattgccacaccaggttgacgatagttatgttggtccctctacctctaaaagcaaaggcaagtcccctcacaaagaacgcgagaactttaggtctactctagtcaacgtgattatgcagcaagacgccgatctagacagtgccgtgccagatgggtccacaatccctaaacctaccgcttcagcgattgaaaaggacattttgcgttactactactatatacaccacggaatcgacactgatcatgtggctcccatggaggacagttggcttgagcatgtgcttgacctggtaccccagcatctgaaggtgtttactgactcaattgtcacactcagtgacgagatgcgtgaggattatcttctctcagttcgtaaatccatagttgacttcgtgctcaaagacccacgagaaaagggcgacgacaaaaagaccgacgaactaccagcacaccgcgccgagatggaaatcctcccgaaaccttggcggaagagcttcctcgctgccagctcatacatcagagatcatctgaacgccatgaatcctacaatgctcgctgtgctggatctgtggcacaccaatttcaagaaactccggcttgtagacatcaaagagttccataactgccaggatgcgctggagctgagtagcttccagaacatcatcatgagacacatggatagcgctaaggagacattgctaaaaatgtggttccccgaggttcagaacatttactaccagggcaacaaaaagaagcaactgcctactggggacagctctgccaagcttgagtcattttttaattgcgcagcagcattgatgaccctgcagttgcaagatctcacactggtctccatgcaggatttcaccgatctcatagcacagccccctgatagtgtgcgtgcctttgagcatccaggctttattatgagactgattctcgacaacgatacgattaaattcgagcccgagctgtccgattacatcgatatctttctgaatgtgtatgacgtcatgataaaggccgtaagcttcgtgcctcgtgtggaaacaaaactctacagtaaatggcggaacaaagctaaaccaggccacttttatttttcacatatccaaagatccgtcaccttccagcattctgaggtgtcgtccccacaaaatagccactttaaaatcgtctccccattcagtgttctggggttcacgtggaggtgccagctttag

SEQ ID NO: 300353 - DNA, 1506 bp, Artificial Sequence
  derived and/or modified sequence
atgagcagccggcaggacaagagcgccagcaaggagaagagcaagaagcctgtgcgcttcctgccccagctgtccatggagaagctggccagcaaggagaagttcaaggccccagcccgggccctgccccagctgtccatggtgtccaccaagccccactggcagcaggccgcccccagcttccacctgtctgtgaagcaggatgatgagagccctgagcccttctctgtgaagaatgagcagagccacgccgagtacatggagagatttgggaagaagggcaagctgccccaccaggtggatgacagctatgtgggccccagcaccagcaagagcaagggcaagagcccccacaaggagcgggagaacttccgcagcaccctggtgaatgtcatcatgcagcaggatgctgacctggacagcgctgtgcctgatggcagcaccatccccaagcccacagccagcgccatcgagaaggacatcctgcgctactactactacatccaccacggcatcgacacagaccacgtggcccccatggaggacagctggctggagcacgtgctggacctggtgccccagcacctgaaggtgttcacagacagcatcgtgaccctgagtgatgagatgagggaggactacctgctgtctgtgaggaagagcatcgtggactttgtgctgaaggacccccgggagaagggagatgacaagaagacagatgagctgcctgcccacagagctgagatggagatcctgcccaagccctggaggaagagcttcctggccgccagcagctacatccgggaccacctgaatgccatgaaccccaccatgctggccgtgctggacctgtggcacaccaacttcaagaagctgcggctggtggacatcaaggagttccacaactgccaggatgccctggagctgagcagcttccagaacatcatcatgaggcacatggacagcgccaaggagaccctgctgaagatgtggttccctgaggtgcagaacatctactaccagggcaacaagaagaagcagctgcccaccggggacagcagcgccaagctggagagcttcttcaactgtgccgccgccctgatgaccctgcagctgcaggacctgaccctggtgtccatgcaggacttcacagacctgattgcccagcccccagattctgtgcgggcctttgagcaccctggcttcatcatgaggctcatcctggacaatgacaccatcaagtttgagcctgagctgagtgactacatcgacatcttcctgaatgtgtatgatgtgatgatcaaggctgtgtcctttgtgccccgggtggagaccaagctgtacagcaagtggaggaacaaggccaagccaggccacttctacttcagccacatccagaggtctgtgaccttccagcacagcgaggtgagcagcccccagaacagccacttcaagatcgtgagccccttctctgtgctgggcttcacctggcgctgccagctgtag

SEQ ID NO: 300354 - DNA, 1506 bp, Artificial Sequence
  derived and/or modified sequence
atgagcagcgagcaggacaagagcgccagcaaggagaagagcaagaagcctgtgcgcttcctgccccagctgtccatggagaagctggccagcaaggagaagttcaaggccccagcccgggccctgccccagctgtccatggtgtccaccaagccccactggcagcaggccgcccccagcttccacctgtctgtgaagcaggatgatgagagccctgagcccttctctgtgaagaatgagcagagccacgccgagtacatggagagatttgggaagaagggcaagctgccccaccaggtggatgacagctatgtgggccccagcaccagcaagagcaagggcaagagcccccacaaggagcgggagaacttccgcagcaccctggtgaatgtcatcatgcagcaggatgctgacctggacagcgctgtgcctgatggcagcaccatccccaagcccacagccagcgccatcgagaaggacatcctgcgctactactactacatccaccacggcatcgacacagaccacgtggcccccatggaggacagctggctggagcacgtgctggacctggtgccccagcacctgaaggtgttcacagacagcatcgtgaccctgagtgatgagatgagggaggactacctgctgtctgtgaggaagagcatcgtggactttgtgctgaaggacccccgggagaagggagatgacaagaagacagatgagctgcctgcccacagagctgagatggagatcctgcccaagccctggaggaagagcttcctggccgccagcagctacatccgggaccacctgaatgccatgaaccccaccatgctggccgtgctggacctgtggcacaccaacttcaagaagctgcggctggtggacatcaaggagttccacaactgccaggatgccctggagctgagcagcttccagaacatcatcatgaggcacatggacagcgccaaggagaccctgctgaagatgtggttccctgaggtgcagaacatctactaccagggcaacaagaagaagcagctgcccaccggggacagcagcgccaagctggagagcttcttcaactgtgccgccgccctgatgaccctgcagctgcaggacctgaccctggtgtccatgcaggacttcacagacctgattgcccagcccccagattctgtgcgggcctttgagcaccctggcttcatcatgaggctcatcctggacaatgacaccatcaagtttgagcctgagctgagtgactacatcgacatcttcctgaatgtgtatgatgtgatgatcaaggctgtgtcctttgtgccccgggtggagaccaagctgtacagcaagtggaggaacaaggccaagccaggccacttctacttcagccacatccagaggtctgtgaccttccagcacagcgaggtgagcagcccccagaacagccacttcaagatcgtgagccccttctctgtgctgggcttcacctggcgctgccagctgtag

SEQ ID NO: 300355 - DNA, 1506 bp, Artificial Sequence
  derived and/or modified sequence
atgagcagccggcaggacaagagcgccagcaaggagaagagcaagaaaccagtaaggtttctgcctcaattgagcatggaaaaactagcaagcaaggaaaagtttaaagctccagctagggctctgcctcagctctcaatggtgagtaccaaaccacactggcagcaggctgcccccagttttcacctgtcagtgaaacaggatgatgagtcacccgagcctttttctgtcaaaaacgaacaatcgcacgcagagtatatggagcgcttcggaaaaaagggcaagctgccccatcaggtcgacgattcatatgtgggcccctcaacgagtaagtctaaggggaagtcaccccacaaggagcgagaaaacttccggtccactctggtcaacgttattatgcagcaggatgctgacctcgactccgccgtccccgacggcagtacaattcccaagccaactgcgtcagcaatcgagaaagacatcctccgctattactactatatccaccacggtattgacacagaccatgtcgcccctatggaggacagctggctcgaacatgtcttggatctggttccgcaacatttaaaagtcttcactgatagtatcgtcacactgagcgatgaaatgagggaggattatttactctcagtgcgcaaatctattgtcgactttgtgttaaaggatccacgggagaagggcgacgacaagaaaaccgacgagttacccgctcaccgggcagagatggagatcctcccaaaaccctggcgaaagtcctttctggccgcctcatcatatattcgcgatcaccttaacgcgatgaaccctaccatgcttgctgtgctggatctgtggcacaccaatttcaagaaactgcgtctcgtggacatcaaggagtttcacaattgccaggacgcgctcgagttgtccagttttcagaatatcattatgaggcatatggactccgcgaaagagacactcctgaagatgtggtttcccgaagttcagaacatctactaccagggaaataagaagaagcagctcccaacaggcgacagctccgctaaactcgaatcattcttcaattgcgctgcagccttaatgaccctccagctccaggaccttaccctcgtcagcatgcaagatttcacagatctgatcgcgcaacccccggattcagtgcgggcattcgaacaccctggatttatcatgaggctgattctcgacaatgacactataaaatttgaacctgaactgtctgactacatcgatattttcctgaatgtctatgacgtgatgattaaagccgtctcattcgtgccccgcgtggagactaagctctacagtaaatggagaaacaaggcaaagcccggacatttttatttctcacacattcagaggagtgtgaccttccaacattcagaagtcagcagcccccagaactcccacttcaaaatagtttctccgttctcggtgctcggatttacatggagatgtcaattatag

SEQ ID NO: 300356 - DNA, 1506 bp, Artificial Sequence
  derived and/or modified sequence
atgagcagcgagcaggacaagagcgccagcaaggagaagagcaagaaaccagtgcggttcctgcctcaactgagcatggagaaactcgcctccaaggagaagttcaaggctccagcacgtgcactccctcagctgtccatggtgtccacgaagcctcattggcagcaagcagcaccatcattccacctaagcgtgaaacaggacgacgagtcaccggagcctttttctgtgaagaacgaacagtcccatgccgagtatatggagcggtttggaaagaagggcaagctccctcatcaggtggatgacagttacgtaggaccgagcacttcaaagagtaaagggaaatccccccacaaagaacgggagaactttcgttccaccctggtcaatgtgattatgcagcaggatgctgacctggatagcgccgtaccagacggatctactattcccaagcccacagcttctgcaatcgagaaagacattcttcgttactactactatatccaccatggcatcgacaccgaccacgttgccccaatggaggattcatggttagagcatgtgctggatttggtgcctcagcatctgaaggttttcacggatagcattgtgactctgagcgacgaaatgagagaagattacttactgagcgtccgaaagtcaattgtcgactttgtgctcaaggatccaagggagaagggtgatgacaagaaaacagacgagctcccagcacatcgcgctgagatggaaatcctgcctaaaccctggagaaagtccttcctggccgcatcttcatatatccgagaccacctcaacgctatgaatccgactatgcttgcggttttggatctttggcacactaactttaagaagctccggctggtagacatcaaggaatttcataattgtcaggacgcacttgagctgtcctcttttcagaatattataatgagacatatggactcagccaaggagacactgcttaaaatgtggtttcctgaggtgcagaacatctattaccagggtaataaaaaaaagcagctgcccacaggggactcttctgccaaactggaaagtttctttaactgtgccgctgcactgatgaccctgcaattgcaagaccttactctcgttagcatgcaagacttcaccgacctgatcgctcagcctcctgattccgtccgagcattcgagcatccaggctttatcatgcgcttgatcctggataacgatactatcaaattcgaaccagaactgagcgattacatcgacatcttcctgaatgtgtacgatgtgatgataaaggccgtgtccttcgtgccgcgggttgagacaaagctatattctaagtggcggaacaaggctaaacctggccacttttattttagccacatacagcgaagcgtgacgttccagcattccgaagtgagctctccccaaaactcgcacttcaagattgtgtccccctttagcgtactaggatttacatggcggtgtcagctgtag

SEQ ID NO: 300357 - DNA, 1937 bp, Artificial Sequence
  derived and/or modified sequence
gagaccgctgcaagtcccggggccctgcctctatcgtcctaggggttccgcgggcaggagcaacccagaagcaccggtgaggccagcgcgtcctcgcagccatgagcagtgagcaggataaatcggccagcaaagaaaaatccaagaaaccagtaagatttctaccacagctgtctatggagaaattagccagcaaagaaaagttcaaggcaccagcaagagctttaccacagctgtctatggtgagtacaaagccccactggcagcaggcagctccatcattccatttgagtgtaaagcaggatgatgagagtccagaaccatttagtgttaaaaatgaacagtcccatgctgaatacatggaacgttttggaaaaaagggcaaattaccccaccaagttgatgatagttatgttggaccatctacttccaaatcaaagggcaaatctccacataaagaacgagaaaactttagaagtactcttgttaatgtcattatgcaacaagatgctgacttagactcagctgtccctgatggaagcacaattccaaaaccgaccgcttctgctatagagaaagacatcttgagatattactattatattcaccatggaattgatacagaccatgtagccccaatggaagattcttggctagaacacgtactggatttagttccacaacatctgaaagtcttcactgacagcatagttacattatctgatgaaatgagagaggattatcttcttagtgtaaggaaatccatagttgattttgttttaaaagatcctcgagagaaaggagatgataagaagacagatgaacttccagcccatcgtgctgaaatggaaattctgccaaaaccttggaggaaatcttttttagctgcaagcagttatattagggatcacttgaatgcaatgaaccccacaatgctggctgtactagatttgtggcacactaattttaaaaaattacgtttagttgatatcaaagaatttcataattgccaggatgcattagagctgtcaagttttcagaacattatcatgagacacatggactctgccaaagagactctacttaaaatgtggtttccagaagtgcagaatatttattaccaaggtaataaaaaaaagcaattgccaactggtgacagcagtgccaaattggaatcttttttcaactgtgctgctgcacttatgactttacagctgcaggacctcactttagtctccatgcaagatttcacggacttaattgcacaacccccagattctgttagagcttttgaacatccaggtttcatcatgaggctgattcttgataatgacaccattaagtttgaacctgagttgagtgactatatagatatctttctaaatgtttatgacgtcatgattaaagctgtcagttttgtgccaagagttgagacaaaattgtattccaagtggagaaacaaagcaaaaccaggacatttttacttttctcatattcaaaggtctgtcacctttcagcattctgaagtttcgtctcctcagaactctcattttaagattgtgtcacccttcagtgttcttggctttacatggagatgccaattatgacttccaactttgctcgaccttgaggctttgtttcctggcagcccctcccatgcatccaccttgccggaaactcattaaagcaaagcttagaccaccaaggatcagcagggtccccagggcagctgctcacttctgcacataatgacctttcaactcatgctttctctcattttggtcccttagacttttttttttgttgttatttccttagctatacgttataaaagataaagtcagctttattatcctggcatatttatgtgttttgaattgagtagttgttttctggatatctattcctcatactaccatgaatagaagtctctcaag

SEQ ID NO: 300358 - DNA, 1506 bp, Artificial Sequence
  derived and/or modified sequence
atgagctctcgacaggacaaaagcgcatccaaagaaaagagtaaaaagcccgtgcgctttctgccacagctgtcaatggaaaaattggcctccaaagaaaagttcaaggcacctgctagagcgctgccccaactgagcatggtgagtactaagccacactggcagcaggcagctccttcctttcatctttctgtgaaacaggacgatgagagtccagagccctttagcgtgaaaaacgaacagtcacatgcagaatatatggagcgctttgggaaaaaaggcaagttgccacatcaagtcgatgatagctacgttggcccatcaaccagcaagtcaaaaggcaaatcacctcataaagaaagggaaaatttccgctctacacttgttaacgtgattatgcagcaggatgctgacctcgattctgccgtgcctgacgggagcacaatcccaaagccaaccgcatccgcaatcgagaaagacatcctccgatactattactacatacaccatggcattgacaccgatcacgtggcccctatggaggattcttggcttgaacatgtgctagacctcgtcccgcagcacttaaaggtgttcacagatagtattgtaacactgagtgatgagatgcgagaggattacctgctgtccgtgcgaaagtcaattgtggacttcgtgctaaaggaccctcgcgagaagggcgatgacaagaagacagatgaacttcctgcacatagggcagaaatggaaattttgcccaagccctggcgtaagtcattccttgctgcctcatcgtatatcagagatcatttaaacgctatgaatcccacaatgctcgccgtcctggacctgtggcacaccaatttcaaaaaattgaggctggtcgacatcaaagagtttcacaattgccaggacgcccttgaattgtccagcttccagaatattattatgcgccatatggactctgcaaaggagaccctgctcaagatgtggttcccggaagtgcaaaatatttattaccagggcaataaaaaaaaacagcttcccaccggggatagcagcgcaaaactagaatcattctttaattgtgcagcagccttaatgaccctgcagcttcaggacctcactctggtgtccatgcaggactttactgaccttatagcccaacccccagatagcgtgagagcgttcgaacaccctggtttcatcatgagacttattctggataacgacactataaaatttgagcccgaattatctgattacatcgacatattcctgaacgtgtatgatgtgatgatcaaagcggtaagtttcgtgcccagggtggagacaaagttgtactcgaagtggagaaataaggccaagccgggacacttttatttttcgcacatccaacgttctgtgaccttccagcacagcgaagtcagttcaccccagaacagccactttaaaattgtgtcaccatttagcgtgttgggcttcacgtggcgttgccagctctag

SEQ ID NO: 300359 - DNA, 1506 bp, Artificial Sequence
  derived and/or modified sequence
atgtccagcgagcaggataagagcgcttcaaaagaaaagagcaaaaaacctgttagatttcttccccagctaagtatggagaaacttgccagcaaggagaaattcaaagcaccggcaagagcgcttcctcaactctctatggtctccacaaagccccattggcagcaggcagccccatcttttcatctgtccgtcaagcaggatgacgagagtcccgagccattttccgtcaaaaacgaacagtctcatgctgagtatatggagcgcttcggaaaaaaggggaagttgccccatcaagtcgatgactcttacgtgggccctagcacgagtaagtctaagggaaaatccccgcacaaggagcgtgaaaacttccggtccacactggtcaacgtaattatgcagcaagacgctgatctcgacagcgctgtgccagacggatctacaatccctaagccaaccgcttccgccatcgagaaagacatccttcgctattactattatatccatcatggcattgacactgaccacgtagcccctatggaggactcttggctcgaacatgtgctagacctagtaccccagcatctgaaggttttcaccgactccatcgtgaccctgtcagacgaaatgcgagaagattacctgcttagtgtcagaaagtcaatcgtggattttgtcttaaaagaccctagagagaaaggcgatgataaaaagaccgacgaattgcctgctcaccgagctgagatggaaattcttcccaagccctggcgaaaatcgttcctggcagcgagtagctacatacgggaccacctgaacgccatgaaccctacgatgcttgccgtcctggatctgtggcacacaaatttcaagaagttgcgattggttgacataaaggaattccacaactgccaggatgcgctagaactcagctcattccaaaatattataatgcggcacatggactcggccaaagagacactgttgaaaatgtggttccctgaggtccaaaacatctactaccagggaaataagaaaaaacaactgccgacaggcgactcttctgccaagctcgagagcttcttcaattgcgccgcagctctgatgacattgcaactgcaggacctgacgctggtgtctatgcaggacttcaccgatctgatcgcgcagcctcccgacagcgtgcgtgctttcgagcaccctgggtttattatgcgcctcatactggacaatgacaccattaagttcgagccagagctcagcgactacatagatattttcctcaacgtgtatgacgtgatgatcaaagctgtttcctttgtccccagggtcgagaccaaattgtattcaaaatggcgaaataaggccaaacctggacacttttactttagtcatattcagcgcagtgttacttttcaacactccgaagtgagctcgccgcaaaattcgcactttaagatcgtcagcccattctcggttttagggtttacttggagatgccagctgtag

SEQ ID NO: 300360 - DNA, 1836 bp, Artificial Sequence
  derived and/or modified sequence
atgtcttcaagacaggataaatcggccagcaaagaaaaatccaagaaaccagtaagatttctaccacagctgtctatggagaaattagccagcaaagaaaagttcaaggcaccagcaagagctttaccacagctgtctatggtgagtacaaagccccactggcagcaggcagctccatcattccatttgagtgtaaagcaggatgatgagagtccagaaccatttagtgttaaaaatgaacagtcccatgctgaatacatggaacgttttggaaaaaagggcaaattaccccaccaagttgatgatagttatgttggaccatctacttccaaatcaaagggcaaatctccacataaagaacgagaaaactttagaagtactcttgttaatgtcattatgcaacaagatgctgacttagactcagctgtccctgatggaagcacaattccaaaaccgaccgcttctgctatagagaaagacatcttgagatattactattatattcaccatggaattgatacagaccatgtagccccaatggaagattcttggctagaacacgtactggatttagttccacaacatctgaaagtcttcactgacagcatagttacattatctgatgaaatgagagaggattatcttcttagtgtaaggaaatccatagttgattttgttttaaaagatcctcgagagaaaggagatgataagaagacagatgaacttccagcccatcgtgctgaaatggaaattctgccaaaaccttggaggaaatcttttttagctgcaagcagttatattagggatcacttgaatgcaatgaaccccacaatgctggctgtactagatttgtggcacactaattttaaaaaattacgtttagttgatatcaaagaatttcataattgccaggatgcattagagctgtcaagttttcagaacattatcatgagacacatggactctgccaaagagactctacttaaaatgtggtttccagaagtgcagaatatttattaccaaggtaataaaaaaaagcaattgccaactggtgacagcagtgccaaattggaatcttttttcaactgtgctgctgcacttatgactttacagctgcaggacctcactttagtctccatgcaagatttcacggacttaattgcacaacccccagattctgttagagcttttgaacatccaggtttcatcatgaggctgattcttgataatgacaccattaagtttgaacctgagttgagtgactatatagatatctttctaaatgtttatgacgtcatgattaaagctgtcagttttgtgccaagagttgagacaaaattgtattccaagtggagaaacaaagcaaaaccaggacatttttacttttctcatattcaaaggtctgtcacctttcagcattctgaagtttcgtctcctcagaactctcattttaagattgtgtcacccttcagtgttcttggctttacatggagatgccaattatgacttccaactttgctcgaccttgaggctttgtttcctggcagcccctcccatgcatccaccttgccggaaactcattaaagcaaagcttagaccaccaaggatcagcagggtccccagggcagctgctcacttctgcacataatgacctttcaactcatgctttctctcattttggtcccttagacttttttttttgttgttatttccttagctatacgttataaaagataaagtcagctttattatcctggcatatttatgtgttttgaattgagtagttgttttctggatatctattcctcatactaccatgaatagaagtctctcaag

SEQ ID NO: 300361 - DNA, 1506 bp, Artificial Sequence
  derived and/or modified sequence
atgagcagcagacaggacaagagcgccagcaaggagaagagcaagaagcccgtgagattcctgccccagctgagcatggagaagctggccagcaaggagaagttcaaggcccccgccagagccctgccccagctgagcatggtgagcaccaagccccactggcagcaggccgcccccagcttccacctgagcgtgaagcaggacgacgagagccccgagcccttcagcgtgaagaacgagcagagccacgccgagtacatggagagattcggcaagaagggcaagctgccccaccaggtggacgacagctacgtgggccccagcaccagcaagagcaagggcaagagcccccacaaggagagagagaacttcagaagcaccctggtgaacgtgatcatgcagcaggacgccgacctggacagcgccgtgcccgacggcagcaccatccccaagcccaccgccagcgccatcgagaaggacatcctgagatactactactacatccaccacggcatcgacaccgaccacgtggcccccatggaggacagctggctggagcacgtgctggacctggtgccccagcacctgaaggtgttcaccgacagcatcgtgaccctgagcgacgagatgagagaggactacctgctgagcgtgagaaagagcatcgtggacttcgtgctgaaggaccccagagagaagggcgacgacaagaagaccgacgagctgcccgcccacagagccgagatggagatcctgcccaagccctggagaaagagcttcctggccgccagcagctacatcagagaccacctgaacgccatgaaccccaccatgctggccgtgctggacctgtggcacaccaacttcaagaagctgagactggtggacatcaaggagttccacaactgccaggacgccctggagctgagcagcttccagaacatcatcatgagacacatggacagcgccaaggagaccctgctgaagatgtggttccccgaggtgcagaacatctactaccagggcaacaagaagaagcagctgcccaccggcgacagcagcgccaagctggagagcttcttcaactgcgccgccgccctgatgaccctgcagctgcaggacctgaccctggtgagcatgcaggacttcaccgacctgatcgcccagccccccgacagcgtgagagccttcgagcaccccggcttcatcatgagactgatcctggacaacgacaccatcaagttcgagcccgagctgagcgactacatcgacatcttcctgaacgtgtacgacgtgatgatcaaggccgtgagcttcgtgcccagagtggagaccaagctgtacagcaagtggagaaacaaggccaagcccggccacttctacttcagccacatccagagaagcgtgaccttccagcacagcgaggtgagcagcccccagaacagccacttcaagatcgtgagccccttcagcgtgctgggcttcacctggagatgccagctgtag

SEQ ID NO: 300362 - DNA, 393 bp, Artificial Sequence
  derived and/or modified sequence
atgaaggtgcacatgcacaccaagttctgcctgatctgcctgctgaccttcatcttccaccactgcaaccactgccacgaggagcacgaccacggccccgaggccctgcacagacagcacagaggcatgaccgagctggagcccagcaagttcagcaagcaggccgccgagaacgagaagaagtactacatcgagaagctgttcgagagatacggcgagaacggcagactgagcttcttcggcctggagaagctgctgaccaacctgggcctgggcgagagaaaggtggtggagatcaaccacgaggacctgggccacgaccacgtgagccacctggacatcctggccgtgcaggagggcaagcacttccacagccacaaccaccagcactag

SEQ ID NO: 300363 - DNA, 381 bp, Artificial Sequence
  derived and/or modified sequence
atgaaggtgcacatgcacaccaagttctgcctgatctgcctgctgaccttcatcttccaccactgcaaccactgccacgaggagcacgaccacggccccgaggccctgcacagacagcacagaggcatgaccgagctggagcccagcaagttcagcaagcaggccgccgagaacgagaagaagtactacatcgagaagctgttcgagagatacggcgagaacggcagactgagcttcttcggcctggagaagctgctgaccaacctgggcctgggcgagagaaaggtggtggagatcaaccacgaggacctgggccacgaccacgtgagccacctggacatcctggccgtgcaggagggcaagcacttccacagccactag

SEQ ID NO: 300364 - DNA, 393 bp, Artificial Sequence
  derived and/or modified sequence
atgaaggtgcatatgcatactaaattctgtctgatttgtctcctgacctttatattccatcactgcaatcactgccatgaggagcacgaccatggtccagaagccctgcaccgacaacacagaggcatgaccgagttggagccgtctaaattttccaagcaagcagccgaaaatgagaagaaatattacatcgaaaaactttttgagcgctacggggagaatgggcgtctgtccttttttgggctagaaaagctcctgaccaatctgggccttggcgagagaaaggtggttgaaatcaatcacgaggacctaggccacgatcatgtttcccatcttgacatcttggccgtccaagaaggaaagcattttcattctcataaccaccagcactag

SEQ ID NO: 300365 - DNA, 381 bp, Artificial Sequence
  derived and/or modified sequence
atgaaagtgcacatgcatacaaaattttgtctcatatgtttactgaccttcattttccatcattgtaatcactgtcacgaagagcatgaccatggaccggaggccttgcatcgtcagcaccgcgggatgaccgagctggagccttccaagttctccaaacaagcagccgagaacgaaaaaaagtattacattgagaagctctttgagcggtacggagagaatggacggctgtccttctttggactggagaagcttttaaccaatctcgggttaggcgaacgtaaggttgtcgagattaaccacgaggatctcgggcacgaccacgttagccacctcgatatcctggcggtgcaggagggaaagcattttcactcccactag

SEQ ID NO: 300366 - DNA, 393 bp, Artificial Sequence
  derived and/or modified sequence
atgaaggtgcacatgcacaccaagttctgcctgatctgcctgctgaccttcatcttccaccactgcaaccactgccacgaggagcatgaccacggccctgaggccctgcaccggcagcaccggggcatgacagagctggagcccagcaagttcagcaagcaggccgcagaaaatgagaagaagtactacatcgagaagctgtttgaaagatatggagaaaatggccgcctgtccttcttcggcctggagaagctgctgaccaacctgggcctgggggagaggaaggtggtggagatcaaccacgaggacctgggccatgaccacgtgagccacctggacatcctggccgtgcaggagggcaagcacttccacagccacaaccaccagcactag

SEQ ID NO: 300367 - DNA, 381 bp, Artificial Sequence
  derived and/or modified sequence
atgaaggtgcacatgcacaccaagttctgcctgatctgcctgctgaccttcatcttccaccactgcaaccactgccacgaggagcatgaccacggccctgaggccctgcaccggcagcaccggggcatgacagagctggagcccagcaagttcagcaagcaggccgcagaaaatgagaagaagtactacatcgagaagctgtttgaaagatatggagaaaatggccgcctgtccttcttcggcctggagaagctgctgaccaacctgggcctgggggagaggaaggtggtggagatcaaccacgaggacctgggccatgaccacgtgagccacctggacatcctggccgtgcaggagggcaagcacttccacagccactag

SEQ ID NO: 300368 - DNA, 393 bp, Artificial Sequence
  derived and/or modified sequence
atgaaggtgcacatgcacaccaagttctgcctgatctgcctgctgacttttatatttcatcattgcaatcattgccatgaagagcacgatcacgggcccgaagcactccacagacaacacagagggatgaccgagttagaacccagcaagtttagcaagcaagccgctgagaacgagaaaaagtattatattgaaaaactcttcgagcgttatggggagaatggtaggctcagcttcttcggtctcgaaaagcttctgacaaatttggggttgggcgagcggaaggtggtggagattaatcatgaggacctcggtcatgaccacgtgtcccatctagacatcctggctgtgcaagaaggcaagcacttccatagtcataaccaccaacattag

SEQ ID NO: 300369 - DNA, 381 bp, Artificial Sequence
  derived and/or modified sequence
atgaaggtgcacatgcacaccaagttctgcctgatctgcctgctgacctttatattccatcactgcaaccactgccatgaggagcacgatcacgggcccgaggcgttgcacagacaacacaggggcatgacagagctggagcccagcaaatttagcaaacaggcggccgagaacgaaaagaaatactacattgagaaactgtttgagagatacggcgaaaacggaaggctatctttcttcggactcgaaaaacttctgacaaatcttgggctgggagagaggaaggtggtggagataaatcacgaggacctggggcacgatcacgtctcccacctggatatcctggccgtgcaagaggggaaacactttcacagccactag

SEQ ID NO: 300370 - DNA, 393 bp, Artificial Sequence
  derived and/or modified sequence
atgaaagttcatatgcacactaagttctgtctcatttgtctcctaacctttatcttccaccactgtaatcactgccatgaggaacacgatcatggcccagaagccctacacagacagcatcgtgggatgactgaacttgagccaagcaaattcagtaaacaagctgccgagaacgagaaaaaatattatatcgagaagctgttcgagcgttacggcgagaacggacgcctgtcgttcttcgggttagaaaaactgctgacaaacctggggttgggggaacggaaggttgtcgagatcaatcacgaggatttgggacatgatcacgtcagccatctggacatcctcgcagttcaggaaggcaagcactttcactctcacaaccaccaacactag

SEQ ID NO: 300371 - DNA, 381 bp, Artificial Sequence
  derived and/or modified sequence
atgaaagttcatatgcatactaagttctgtctgatctgtttgctcacatttattttccaccattgcaaccattgtcacgaggagcatgatcacggccctgaagctctgcatcgtcagcacagaggaatgacagaactcgaaccctcaaaattttcaaagcaggccgctgagaatgaaaaaaagtactacatagagaagctgtttgagcggtacggagagaacgggaggctgtcattttttgggcttgagaaattactcactaatctggggctgggagagcgcaaggtcgtggaaataaatcacgaggacctaggacacgaccacgtgtctcatctcgatatcttggccgttcaggaaggaaagcactttcattctcattag

SEQ ID NO: 300372 - DNA, 337 bp, Artificial Sequence
  derived and/or modified sequence
cttgtacgccgcaagcgtagcagggtgtcagacgcgccggtttctgcgacgcagttagcgcagtctgctttggtgaatacacgatttggtgcagccggggtttggtaccgagcggagaggagatgcacacggcactcgagtgtgagagatcctctttgtgctgtcgatggaaaagattgttaacatctactggaatgcttgggaaactctgaaaaatagaaatgaaggtacatatgcacacaaaattttgcctcatttgtttgctgacatttatttttcatcattgcaaccattgccatgaagaacatgaccatggccctgaagcgcttcacagaca

SEQ ID NO: 300373 - DNA, 563 bp, Artificial Sequence
  derived and/or modified sequence
gcagtcggcggcggccagccgaagcagagcgcgtggtgggcagagtgttgggcgccgcggctcctcgtgtgcggtctgggctgctgcgggccgcgggatcgggagccggcggcatccacttcgcgtgcggagcctcgcgcccccctcaccttcctgtggaggaaaaatagaaatgaaggtacatatgcacacaaaattttgcctcatttgtttgctgacatttatttttcatcattgcaaccattgccatgaagaacatgaccatggccctgaagcgcttcacagacagcatcgtggaatgacagaattggagccaagcaaattttcaaagcaagctgctgaaaatgaaaaaaaatactatattgaaaaactttttgagcgttatggtgaaaatggaagattatccttttttggtttggagaaacttttaacaaacttgggccttggagagagaaaagtagttgagattaatcatgaggatcttggccacgatcatgtttctcatttagatattttggcagttcaagagggaaagcattttcactcacataaccaccagcatt

SEQ ID NO: 300374 - DNA, 593 bp, Artificial Sequence
  derived and/or modified sequence
attagatggggggctgcggcttggagaacactcacagttctgagttcagctgtggacggaataatgaagggcagctgcagaaggaggtagagctgcagattcagagcccctggacctgagaggcttcaataattgttacctgagttggattgaattgaaataaagaagtaaagatcctatatcatctactgaaatctttaaagggaaaaatagaaatgaaggtacatatgcacacaaaattttgcctcatttgtttgctgacatttatttttcatcattgcaaccattgccatgaagaacatgaccatggccctgaagcgcttcacagacagcatcgtggaatgacagaattggagccaagcaaattttcaaagcaagctgctgaaaatgaaaaaaaatactatattgaaaaactttttgagcgttatggtgaaaatggaagattatccttttttggtttggagaaacttttaacaaacttgggccttggagagagaaaagtagttgagattaatcatgaggatcttggccacgatcatgtttctcatttagatattttggcagttcaagagggaaagcattttcactcacat

SEQ ID NO: 300375 - protein, 1054 aa, Artificial Sequence
  derived and/or modified sequence
MEIKDQGAQMEPLLPTRNDEEAVVDRGGTRSILKTHFEKEDLEGHRTLFIGVHVPLGGRKSHRRHRHRGHKHRKRDRERDSGLEDGRESPSFDTPSQRVQFILGTEDDDEEHIPHDLFTELDEICWREGEDAEWRETARWLKFEEDVEDGGERWSKPYVATLSLHSLFELRSCILNGTVLLDMHANTLEEIADMVLDQQVSSGQLNEDVRHRVHEALMKQHHHQNQKKLTNRIPIVRSFADIGKKQSEPNSMDKNAGQVVSPQSAPACVENKNDVSRENSTVDFSKGLGGQQKGHTSPCGMKQRHEKGPPHQQEREVDLHFMKKIPPGAEASNILVGELEFLDRTVVAFVRLSPAVLLQGLAEVPIPTRFLFILLGPLGKGQQYHEIGRSIATLMTDEVFHDVAYKAKDRNDLVSGIDEFLDQVTVLPPGEWDPSIRIEPPKNVPSQEKRKIPAVPNGTAAHGEAEPHGGHSGPELQRTGRIFGGLILDIKRKAPYFWSDFRDAFSLQCLASFLFLYCACMSPVITFGGLLGEATEGRISAIESLFGASMTGIAYSLFGGQPLTILGSTGPVLVFEKILFKFCKEYGLSYLSLRASIGLWTATLCIILVATDASSLVCYITRFTEEAFASLICIIFIYEALEKLFELSEAYPINMHNDLELLTQYSCNCVEPHNPSNGTLKEWRESNISASDIIWENLTVSECKSLHGEYVGRACGHDHPYVPDVLFWSVILFFSTVTLSATLKQFKTSRYFPTKVRSIVSDFAVFLTILCMVLIDYAIGIPSPKLQVPSVFKPTRDDRGWFVTPLGPNPWWTVIAAIIPALLCTILIFMDQQITAVIINRKEHKLKKGCGYHLDLLMVAVMLGVCSIMGLPWFVAATVLSITHVNSLKLESECSAPGEQPKFLGIREQRVTGLMIFILMGSSVFMTSILKFIPMPVLYGVFLYMGASSLKGIQFFDRIKLFWMPAKHQPDFIYLRHVPLRKVHLFTIIQMSCLGLLWIIKVSRAAIVFPMMVLALVFVRKLMDLLFTKRELSWLDDLMPESKKKKLEDAEKEH

SEQ ID NO: 300376 - DNA, 5551 bp, Artificial Sequence
  derived and/or modified sequence
gatccgaatactaagcagagcgagtgccgggctgagtgtaagacactgaagacactgcagagcaaggtgcttattccagaggcgttacaaaacatggagattaaagaccagggagcccaaatggagccgctgctgcctacgagaaatgatgaagaagcagttgtggatagaggtggaactcgttctattctcaaaacacactttgagaaagaagatttagaaggtcatcgaacactatttattggagtacatgtgcccttgggaggaagaaaaagccatcgacgtcacaggcatcgtggtcataaacacagaaagagagacagagaaagagattcaggattagaggatggaagggagtcaccttcttttgacaccccatcacagagggtacagtttattcttggaaccgaggatgatgacgaggaacacattcctcatgaccttttcacagaactggatgagatttgttggcgtgaaggtgaggacgctgagtggcgagaaacagccaggtggttgaagtttgaagaagatgtggaagatggaggagaaaggtggagcaagccttatgtggctactctttcattgcacagcttgtttgaattgagaagttgtattctgaatggaactgtgttgctggacatgcatgccaacactttagaagaaattgcagatatggttcttgaccaacaagtgagctcaggtcagctgaatgaagatgtacgccatagggtccatgaggcattgatgaaacagcatcatcatcagaatcagaaaaaactcaccaacaggattcccattgttcgttcctttgctgatattggcaagaaacagtcagaaccaaattccatggacaaaaatgcaggtcaggttgtttctcctcagtctgctccagcctgtgttgaaaataaaaatgatgttagcagagaaaacagcactgttgactttagcaagggactgggaggccaacaaaaggggcatactagtccatgtgggatgaaacaaaggcatgaaaaaggacctccacaccagcaagagagagaggttgatctgcattttatgaaaaagattcctccaggtgctgaagcatcgaacatcttagtgggagaactggagttcttggatcgaacagtagttgcgtttgtcaggttgtctccagctgtattgcttcaaggactggctgaagtcccaatcccaaccagatttttgttcattcttctgggacccctgggaaagggtcaacagtaccatgagattggcagatcaattgcaaccctaatgacagatgaggtatttcatgatgttgcctataaagctaaagatcgtaatgacttggtatcaggaattgatgagtttctggatcaggttactgttctccctcctggagaatgggatccaagcattcgaatagagcctcccaaaaatgttccttcccaggagaagaggaagattcctgctgtaccaaatggaacagcagctcatggggaagcagagccccacggaggacatagtggacctgaactccagcgaactggaaggatttttgggggacttattttagatatcaaaagaaaagctccatacttctggagtgacttcagagatgctttcagcctgcagtgcttagcatcttttctatttctctactgcgcgtgtatgtctcctgtcatcacgtttggaggactgctgggagaagcaactgaagggcgtataagtgcaattgaatctctctttggagcatccatgaccgggatagcctattctctctttggtggacagcctcttaccatattaggcagtacaggaccagttttggtgtttgaaaagattttgtttaaattttgcaaagaatatgggctgtcatacctatctttaagagctagcattggactttggactgcaactctatgtatcatacttgtggccacagatgctagttcccttgtctgctacatcactcggtttactgaagaagcttttgcttccctgatttgcatcattttcatttatgaggccctggagaagttgtttgaactcagtgaagcatatccaatcaacatgcataatgatctggaactgctgacacaatactcgtgtaactgtgtggaaccgcataatcccagcaatggcacattgaaggaatggagggaatccaatatttctgcctctgacataatttgggagaacctaactgtgtcagaatgcaaatcattgcatggagagtatgttggacgggcctgtggccatgatcacccatatgttccagatgttctattttggtctgtgatcctgttcttttccacagttactctgtcagccaccctgaagcagttcaagactagcagatattttccaaccaaggttcgatccatagtgagtgactttgctgtctttcttacaattctgtgtatggttttaattgactatgccattgggatcccatctccaaaactacaagtaccaagtgttttcaagcccactagagatgatcgtggctggtttgttacgcctttaggtccaaacccatggtggacagtaatagctgctataattccagctctgctttgtactattctaatttttatggaccaacagattacagctgtcatcatcaacaggaaagagcataagctaaagaaaggttgtgggtaccatctggacctattaatggtggctgtcatgctcggtgtatgctccatcatgggcctgccatggtttgtggctgccacagtcctctccatcactcatgtcaatagcctaaaactggaatcagaatgctcagctccaggagaacaacccaaatttctcggcattcgggagcaaagggttactgggcttatgatttttattcttatgggttcatcagtctttatgaccagtattctgaagtttattcccatgccagtgctatatggagtgtttctttatatgggtgcttcatctctaaagggaattcagttctttgataggataaagctcttctggatgccggcaaaacatcaaccagattttatatacctaaggcacgtaccgcttcgaaaagtgcatctcttcacaattattcagatgagttgccttggccttttgtggataataaaagtttcaagagctgctattgtctttcccatgatggtgttagccctggtatttgtaagaaagttgatggacttgttgttcacgaagcgggaactcagctggttggatgatttgatgcccgagagtaagaaaaagaaactggaagatgctgaaaaagaagaagaacaaagtatgctagctatggaagatgagggcacagtacaactcccattggaagggcactatagagatgatccatctgtgatcaatatatctgatgaaatgtcaaagactgccttgtggaggaaccttctgattactgccgataactcaaaagataaggagtcaagctttccttccaaaagctccccttcctaatcactctagaagctgattccccaaagcattgaaagccgaaaagagaagaaagctgactcagggaaaggtgttgacagggagacttgtctatgactcgatcttcaatttattttttacatatatatgagaagagtgtcacaattattaataaaactgctttgatcatgtattgtaaattctgtccctcaacccaaatccaccttcatactgtaagtagtgcaatacttgtttcatttctgtgtttaaacttctgagcagtgagacatccctgtgagcagatacaatagccaatgcaagaatctgtgtgttccttgctgtacgttagacatttgtaaactggattctgattgtcagttttatgagagcaatagcttccttaaagagataagtcatatttacctagtttgtattttcctactttagtgacctgaagatgcctgataatttcattcagaagaatttttgaaaggtagtcttacttctttttagtttttatagcttagcattagtgacttatttcaaaagacccaaatcaaaaagttagtttgaaagcattttttaataattgtatttatgcatttccttgatttaatatgataaatttaatacttaacaatttatatgtaactaaaacttaaagtcatttgaaaaatatatagaaacctatttacaacttgttaaggacaatcagacataatgcagagttaagtagtatttgcttaaaattcaagttgtgactaatgatcaaatactaggcttgtacgaaatgctttagaaaaactttgtaacagttttgtgggatttttcaatataaacctttatcagaaatatactaagtttgtctcccactgacaacagatgttttccaaataaacatattctatacatacttgtggaatgccacatggtgaatcattgtatatgaaattccactcctgtacagttactctgcagctaatggtcatgcactgcttaatgctggtcctgaatcatgttctcatgttagaccaacagctctccaattgtcattttttttctgcagagttttttttttccacttttaaattaaatgcatgttgtggaaaaacagtcttttaaaatgaaatttcagattccatttgagaaggttctgtagatatttcagtccatataaaataatacatctttactaaacttatataaggggagagaaagttatgaagttttggacattactaaaagtacagtatttgatttcactttcaatgaatgtgaagttaataaaactaaatctcataatgctcttggttcctaagaatgagtagtaatcatcaactttataatactccaatattccgttttataataattcagagccctgtggcttttacacaccgttaattatgtactctgttggaagtgcacatgaaaagtgaagaaaagttcctcttgtgattaaactaatgggaggaaataaatcaacaaagtctccattaagttctacattttgagaccttttaaaaattcccctcacaattctttaaggagcccccctttttatggaacatgagcctaaaaattatagaaagaagaattttaagttaataaagtttgtatttataaatgctgaaaaaatacagaaactttctgttccaaatgtgttgcctttgtgtattttataatacagatactacattgtaaacatttccattgttttatgatttagccagtgattccccaaagcagcctcttagtgttttaatatattaataactgttttgttaaaaatgatcatagtgaatttaaatcttcacatgatcacctatttgaataagcaatcatatccaatgaaattctgtatttctgagtatttttatagtcattttgttcttgtgtgaattttaaagctatccctatgttaatcctaatattttgaaatcatataaaatataataaaaatgtagtattatatatttacttctaatttcagattcctggtcaaaattactaaatatcttgaatgtaatttagtgccaagtttaaataatgtgtaaatgtgactaggatattgtgtttttcacaattaagaaatgttatgtggaaataaatatttatcctaact

SEQ ID NO: 300377 - DNA, 1841 bp, Artificial Sequence
  derived and/or modified sequence
gcaattgcctcctgcttcagagctacctgatccgaatactaagcagagcgagtgccgggctgagtgtaagacactgaagacactgcagagcaaggtgcttattccagaggcgttacaaaacatggagattaaagaccagggagcccaaatggagccgctgctgcctacgagaaatgatgaagaagcagttgtggatagaggtggaactcgttctattctcaaaacacactttgagaaagaagatttagaaggtcatcgaacactatttattggagtacatgtgcccttgggaggaagaaaaagccatcgacgtcacaggcatcgtggtcataaacacagaaagagagacagagaaagagattcaggattagaggatggaagggagtcaccttcttttgacaccccatcacagagggtacagtttattcttggaaccgaggatgatgacgaggaacacattcctcatgaccttttcacagaactggatgagatttgttggcgtgaaggtgaggacgctgagtggcgagaaacagccaggtggttgaagtttgaagaagatgtggaagatggaggagaaaggtggagcaagccttatgtggctactctttcattgcacagcttgtttgaattgagaagttgtattctgaatggaactgtgttgctggacatgcatgccaacactttagaagaaattgcagatatggttcttgaccaacaagtgagctcaggtcagctgaatgaagatgtacgccatagggtccatgaggcattgatgaaacagcatcatcatcagaatcagaaaaaactcaccaacaggattcccattgttcgttcctttgctgatattggcaagaaacagtcagaaccaaattccatggacaaaaatgcaggtcaggttgtttctcctcagtctgctccagcctgtgttgaaaataaaaatgatgttagcagagaaaacagcactgttgactttagcaagggactgggaggccaacaaaaggggcatactagtccatgtgggatgaaacaaaggcatgaaaaaggacctccacaccagcaagagagagaggttgatctgcattttatgaaaaagattcctccaggtgctgaagcatcgaacatcttagtgggagaactggagttcttggatcgaacagtagttgcgtttgtcaggttgtctccagctgtattgcttcaaggactggctgaagtcccaatcccaaccaggtatttcatgatgttgcctataaagctaaagatcgtaatgacttggtatcaggaattgatgagtttctggatcaggttactgttctccctcctggagaatgggatccaagcattcgaatagagcctcccaaaaatgttccttcccaggagaagaggaagattcctgctgtaccaaatggaacagcagctcatggggaagcagagccccacggaggacatagtggacctgaactccagcgaactggaaggtcaccaatatccggtatcttcgcttctccagagttcttccacagattctgttgctgacatgacttgaagtatccattactcatctgctctcctggagttgctggtgtacatctgggctgctcttgcactgttctctgatttttgggggacttattttagatatcaaaagaaaagctccatacttctggagtgacttcagagatgctttcagcctgcagtgcttagcatcttttctatttctctactgcgcgtgtatgtctcctgtcatcacgtttggaggactgctgggagaagcaactgaagggcgtataagtgcaattgaatctctctttggagcatccatgaccgggatagcctattctctc

SEQ ID NO: 300378 - protein, 1117 aa, Artificial Sequence
  derived and/or modified sequence
MEIKDQGAQMEPLLPTRNDEEAVVDRGGTRSILKTHFEKEDLEGHRTLFIGVHVPLGGRKSHRRHRHRGHKHRKRDRERDSGLEDGRESPSFDTPSQRVQFILGTEDDDEEHIPHDLFTELDEICWREGEDAEWRETARWLKFEEDVEDGGERWSKPYVATLSLHSLFELRSCILNGTVLLDMHANTLEEIADMVLDQQVSSGQLNEDVRHRVHEALMKQHHHQNQKKLTNRIPIVRSFADIGKKQSEPNSMDKNGQVVSPQSAPACVENKNDVSRENSTVDFSKGLGGQQKGHTSPCGMKQRHEKGPPHQQEREVDLHFMKKIPPGAEASNILVGELEFLDRTVVAFVRLSPAVLLQGLAEVPIPTRFLFILLGPLGKGQQYHEIGRSIATLMTDEVFHDVAYKAKDRNDLVSGIDEFLDQVTVLPPGEWDPSIRIEPPKNVPSQEKRKIPAVPNGTAAHGEAEPHGGHSGPELQRTGRIFGGLILDIKRKAPYFWSDFRDAFSLQCLASFLFLYCACMSPVITFGGLLGEATEGRISAIESLFGASMTGIAYSLFGGQPLTILGSTGPVLVFEKILFKFCKEYGLSYLSLRASIGLWTATLCIILVATDASSLVCYITRFTEEAFASLICIIFIYEALEKLFELSEAYPINMHNDLELLTQYSCNCVEPHNPSNGTLKEWRESNISASDIIWENLTVSECKSLHGEYVGRACGHDHPYVPDVLFWSVILFFSTVTLSATLKQFKTSRYFPTKVRSIVSDFAVFLTILCMVLIDYAIGIPSPKLQVPSVFKPTRDDRGWFVTPLGPNPWWTVIAAIIPALLCTILIFMDQQITAVIINRKEHKLKKGCGYHLDLLMVAVMLGVCSIMGLPWFVAATVLSITHVNSLKLESECSAPGEQPKFLGIREQRVTGLMIFILMGSSVFMTSILKFIPMPVLYGVFLYMGASSLKGIQFFDRIKLFWMPAKHQPDFIYLRHVPLRKVHLFTIIQMSCLGLLWIIKVSRAAIVFPMMVLALVFVRKLMDLLFTKRELSWLDDLMPESKKKKLEDAEKEEEQSMLAMEDEGTVQLPLEGHYRDDPSVINISDEMSKTALWRNLLITADNSKDKESSFPSKSSPS

SEQ ID NO: 300379 - DNA, 3354 bp, Artificial Sequence
  derived and/or modified sequence
atggagatcaaggaccagggcgcccagatggagcccctgctgcccaccagaaacgacgaggaggccgtggtggacagaggcggcaccagaagcatcctgaagacccacttcgagaaggaggacctggagggccacagaaccctgttcatcggcgtgcacgtgcccctgggcggcagaaagagccacagaagacacagacacagaggccacaagcacagaaagagagacagagagagagacagcggcctggaggacggcagagagagccccagcttcgacacccccagccagagagtgcagttcatcctgggcaccgaggacgacgacgaggagcacatcccccacgacctgttcaccgagctggacgagatctgctggagagagggcgaggacgccgagtggagagagaccgccagatggctgaagttcgaggaggacgtggaggacggcggcgagagatggagcaagccctacgtggccaccctgagcctgcacagcctgttcgagctgagaagctgcatcctgaacggcaccgtgctgctggacatgcacgccaacaccctggaggagatcgccgacatggtgctggaccagcaggtgagcagcggccagctgaacgaggacgtgagacacagagtgcacgaggccctgatgaagcagcaccaccaccagaaccagaagaagctgaccaacagaatccccatcgtgagaagcttcgccgacatcggcaagaagcagagcgagcccaacagcatggacaagaacggccaggtggtgagcccccagagcgcccccgcctgcgtggagaacaagaacgacgtgagcagagagaacagcaccgtggacttcagcaagggcctgggcggccagcagaagggccacaccagcccctgcggcatgaagcagagacacgagaagggccccccccaccagcaggagagagaggtggacctgcacttcatgaagaagatcccccccggcgccgaggccagcaacatcctggtgggcgagctggagttcctggacagaaccgtggtggccttcgtgagactgagccccgccgtgctgctgcagggcctggccgaggtgcccatccccaccagattcctgttcatcctgctgggccccctgggcaagggccagcagtaccacgagatcggcagaagcatcgccaccctgatgaccgacgaggtgttccacgacgtggcctacaaggccaaggacagaaacgacctggtgagcggcatcgacgagttcctggaccaggtgaccgtgctgccccccggcgagtgggaccccagcatcagaatcgagccccccaagaacgtgcccagccaggagaagagaaagatccccgccgtgcccaacggcaccgccgcccacggcgaggccgagccccacggcggccacagcggccccgagctgcagagaaccggcagaatcttcggcggcctgatcctggacatcaagagaaaggccccctacttctggagcgacttcagagacgccttcagcctgcagtgcctggccagcttcctgttcctgtactgcgcctgcatgagccccgtgatcaccttcggcggcctgctgggcgaggccaccgagggcagaatcagcgccatcgagagcctgttcggcgccagcatgaccggcatcgcctacagcctgttcggcggccagcccctgaccatcctgggcagcaccggccccgtgctggtgttcgagaagatcctgttcaagttctgcaaggagtacggcctgagctacctgagcctgagagccagcatcggcctgtggaccgccaccctgtgcatcatcctggtggccaccgacgccagcagcctggtgtgctacatcaccagattcaccgaggaggccttcgccagcctgatctgcatcatcttcatctacgaggccctggagaagctgttcgagctgagcgaggcctaccccatcaacatgcacaacgacctggagctgctgacccagtacagctgcaactgcgtggagccccacaaccccagcaacggcaccctgaaggagtggagagagagcaacatcagcgccagcgacatcatctgggagaacctgaccgtgagcgagtgcaagagcctgcacggcgagtacgtgggcagagcctgcggccacgaccacccctacgtgcccgacgtgctgttctggagcgtgatcctgttcttcagcaccgtgaccctgagcgccaccctgaagcagttcaagaccagcagatacttccccaccaaggtgagaagcatcgtgagcgacttcgccgtgttcctgaccatcctgtgcatggtgctgatcgactacgccatcggcatccccagccccaagctgcaggtgcccagcgtgttcaagcccaccagagacgacagaggctggttcgtgacccccctgggccccaacccctggtggaccgtgatcgccgccatcatccccgccctgctgtgcaccatcctgatcttcatggaccagcagatcaccgccgtgatcatcaacagaaaggagcacaagctgaagaagggctgcggctaccacctggacctgctgatggtggccgtgatgctgggcgtgtgcagcatcatgggcctgccctggttcgtggccgccaccgtgctgagcatcacccacgtgaacagcctgaagctggagagcgagtgcagcgcccccggcgagcagcccaagttcctgggcatcagagagcagagagtgaccggcctgatgatcttcatcctgatgggcagcagcgtgttcatgaccagcatcctgaagttcatccccatgcccgtgctgtacggcgtgttcctgtacatgggcgccagcagcctgaagggcatccagttcttcgacagaatcaagctgttctggatgcccgccaagcaccagcccgacttcatctacctgagacacgtgcccctgagaaaggtgcacctgttcaccatcatccagatgagctgcctgggcctgctgtggatcatcaaggtgagcagagccgccatcgtgttccccatgatggtgctggccctggtgttcgtgagaaagctgatggacctgctgttcaccaagagagagctgagctggctggacgacctgatgcccgagagcaagaagaagaagctggaggacgccgagaaggaggaggagcagagcatgctggccatggaggacgagggcaccgtgcagctgcccctggagggccactacagagacgaccccagcgtgatcaacatcagcgacgagatgagcaagaccgccctgtggagaaacctgctgatcaccgccgacaacagcaaggacaaggagagcagcttccccagcaagagcagccccagctag

SEQ ID NO: 300380 - DNA, 3354 bp, Artificial Sequence
  derived and/or modified sequence
atggaaatcaaagatcagggagcacagatggaacctctcttacctacccgtaacgacgaggaagcagttgtggacagaggagggaccaggtcaatcttaaagacacactttgagaaagaggaccttgagggtcataggactcttttcatcggggtgcacgtcccacttgggggtaggaaaagtcacagaaggcatcgacacaggggccataagcatcggaagcgggatagggagcgcgattccgggctcgaagacggaagggagtcaccaagctttgataccccgtcacagagagtgcagtttattctgggaacagaggatgacgacgaagagcatatccctcacgatctgttcactgaactggatgagatctgctggagagagggcgaggacgctgaatggagggagaccgctcgctggctgaagtttgaagaagacgtcgaggacgggggagagagatggagcaaaccttacgtggcgacactctcactccactccctgtttgaattgcgttcctgtatcctgaatggtactgttcttctcgacatgcacgccaacacacttgaagaaatagcggatatggttctggatcagcaagtcagctctggacagcttaatgaagatgtgaggcaccgggtgcacgaagcattaatgaagcagcaccaccatcagaaccagaaaaagctgacaaatcggatccctatcgtgcggtcttttgcagatataggaaagaaacagagtgagcctaactctatggataaaaacgggcaggtcgttagcccccagagcgcccccgcatgcgtggaaaacaagaatgatgtctcacgggagaattccactgtcgacttctctaaggggctcggcggacaacagaagggacacacctcaccttgcgggatgaaacagcggcacgagaaaggacccccacaccagcaagagcgcgaagtggaccttcactttatgaaaaagatcccccctggtgcagaagcttctaacattctggtgggggagctggaattcttggaccgcaccgtcgtggcatttgtccgcctctcccccgccgtcctgcttcagggcttggctgaagttccgatccccacccgctttctctttattttactgggacccttagggaagggtcagcagtaccatgaaattggacgatccattgccacactcatgactgatgaggtcttccacgatgtggcatacaaagccaaagaccggaacgacctggtgagcggcattgacgagttccttgatcaggtgaccgtgctcccgccaggggaatgggatccaagtattcgcatcgaaccaccaaaaaacgtacccagccaagaaaagaggaaaataccggccgtacctaacggtacagccgcccacggcgaagccgaacctcatggtggacactcagggcctgagttgcagaggaccggcagaattttcggtggtttgattctggatatcaaacgcaaagccccctacttttggtcagatttcagggatgcattcagtctgcagtgtctcgcgtcctttttgttcctgtattgtgcctgcatgagccccgtaattactttcggcgggttgctcggagaggccacagaaggaagaattagcgctattgagagcctcttcggggcctccatgacaggaattgcctacagcctttttggtggccaaccgcttactatcctgggttccaccggtccagtgctcgtcttcgaaaagattctgttcaagttctgtaaagagtatggactgtcttaccttagtctgagagcttcaattgggctttggaccgctacactctgtatcattctggttgccactgacgcaagctctctggtatgctacattactcgctttaccgaggaggccttcgcaagcctgatctgcatcatcttcatatatgaggccctggaaaaactcttcgaactcagtgaagcctacccgatcaatatgcacaatgacctggagctactcacacaatactcttgtaactgcgtggaacctcacaacccctctaatggtaccttaaaggagtggcgcgaatccaacatttctgcatctgacattatttgggagaacctcacggtgtctgaatgtaaatctcttcacggagaatatgtaggccgtgcatgtggccacgaccacccctacgtcccagacgtactcttttggtccgtcatcctgtttttctctactgtgactttgagcgccactctgaagcagttcaaaacatctcggtactttcccaccaaagtcaggtccatcgttagtgatttcgccgtgtttttgactatcttgtgtatggtcttaattgattacgccatcggcatcccttcacccaaactgcaggtgccaagtgtctttaaacccacaagggatgaccgcgggtggtttgttactccactcggtccgaacccttggtggacggtgattgccgcgatcattcccgccctactctgcacaatcctgatcttcatggatcaacagatcacagctgtcattatcaaccgtaaggagcacaaattgaagaaaggctgtggataccacttagatctcctcatggtggccgtcatgctgggggtgtgctctataatggggctgccatggtttgtcgccgcgacagtgctaagtatcacacacgtgaacagtctaaagctggagtctgagtgtagtgctccgggggagcagcccaagttcctcggaatccgggagcagcgcgtcaccggtcttatgatctttatcctcatgggatcttcagtttttatgacgtcgatcttgaaattcatccccatgccagttttgtacggggtttttctgtatatgggcgccagcagtcttaaaggcatacaattttttgaccgcataaagctgttctggatgccggccaaacaccaacctgattttatctacctcagacatgttcctcttcggaaggtgcacctgtttaccatcattcagatgtcttgcctgggccttctctggatcatcaaggtgtcccgagccgctatcgtgtttcctatgatggtgttggccctcgtgtttgtgagaaaactgatggacctgttgtttaccaaaagggaacttagttggctggatgacctgatgcccgagagtaagaaaaagaaacttgaggatgctgaaaaagaggaggaacagtcgatgctcgcaatggaggatgaaggtacggtacaattaccactggaggggcactatagagacgacccctccgtgatcaacatcagcgacgagatgagcaagacagcgctgtggaggaaccttctgataacggcggacaattccaaggataaggagagcagcttcccttctaaatcgtcaccttcttag

SEQ ID NO: 300381 - DNA, 3354 bp, Artificial Sequence
  derived and/or modified sequence
atggagatcaaggaccagggcgcccagatggagcccctgctgcccaccagaaatgatgaggaggccgtggtggacagaggaggcaccaggagcatcctgaagacccactttgagaaggaggacctggagggccacaggaccctcttcatcggcgtgcacgtgcccctgggcggcaggaagagccacagaagacaccgccaccggggccacaagcacaggaagagggaccgggagcgggacagcggcctggaggatggccgggagagccccagctttgacacccccagccagagggtgcagttcatcctgggcacagaagatgatgatgaggagcacatcccccatgacctcttcacagagctggatgagatctgctggagggagggggaggatgctgagtggagggagacagcccgctggctgaagtttgaagaagatgtggaggatggaggagagcgctggagcaagccctacgtggccaccctgagcctgcacagcctgtttgagctgcggagctgcatcctgaatggcaccgtgctgctggacatgcacgccaacaccctggaggagattgctgacatggtgctggaccagcaggtgagcagcggccagctgaatgaagatgtgcgccaccgggtgcatgaggccctgatgaagcagcaccaccaccagaaccagaagaagctgaccaaccgcatccccatcgtgcgcagctttgctgacatcggcaagaagcagagcgagcccaacagcatggacaagaatggccaggtggtgagcccccagagcgccccagcctgtgtggagaacaagaatgatgtgtcccgggagaacagcacagtggacttcagcaagggcctgggcggccagcagaagggccacaccagcccctgtggcatgaagcagagacatgagaagggccccccccaccagcaggagcgggaggtggacctgcacttcatgaagaagatccccccaggagctgaggccagcaacatcctggtgggggagctggagttcctggacagaacagtggtggcctttgtgcggctgagccctgctgtgctgctgcagggcctggccgaggtgcccatccccacccgcttcctgttcatcctgctgggccccctgggcaagggccagcagtaccacgagatcggccgcagcatcgccaccctgatgacagatgaggtgttccatgatgtggcctacaaggccaaggacagaaatgacctggtgtctggaattgatgagttcctggaccaggtgacagtgctgcccccaggagagtgggaccccagcatcagaattgagccccccaagaatgtgcccagccaggagaagaggaagatcccagctgtgcccaacggcacagctgcccatggagaggccgagccccatggaggccacagcggccctgagctgcagaggacaggccgcatctttggaggcctcatcctggacatcaagaggaaggccccctacttctggagcgacttcagagatgccttcagcctgcagtgcctggccagcttcctgttcctgtactgtgcctgcatgagccctgtgatcaccttcggcggcctgctgggggaggccacagagggccgcatcagcgccatcgagagcctgtttggagcctccatgacaggcatcgcctacagcctgtttggaggccagcccctgaccatcctgggcagcacaggccctgtgctggtgtttgagaagatcctcttcaagttctgcaaggagtatggcctgagctacctgagcctgcgggccagcatcggcctgtggacagccaccctgtgcatcatcctggtggccacagatgccagcagcctggtgtgctacatcacccgcttcacagaggaggcctttgccagcctcatctgcatcatcttcatctatgaggccctggagaagctgtttgagctgtctgaggcctaccccatcaacatgcacaatgacctggagctgctgacccagtacagctgcaactgtgtggagccccacaaccccagcaatggcaccctgaaggagtggagggagagcaacatcagcgccagtgacatcatctgggagaacctgactgtgtctgagtgcaagagcctgcacggggagtatgtgggccgggcctgtggccatgaccacccctacgtgcctgatgtgctcttctggagcgtcatcctcttcttcagcacagtgaccctgagcgccaccctgaagcagttcaagaccagccgctacttccccaccaaggtgcgcagcatcgtgtctgactttgctgtgttcctgaccatcctgtgcatggtgctgattgattatgccatcggcatccccagccccaagctgcaggtgcccagcgtcttcaagcccaccagagatgaccggggctggtttgtgacccccctgggccccaacccctggtggacagtgattgctgccatcatcccagccctgctgtgcaccatcctgatcttcatggaccagcagatcacagctgtgatcatcaacaggaaggagcacaagctgaagaagggctgcggctaccacctggacctgctgatggtggccgtgatgctgggcgtgtgcagcatcatgggcctgccctggtttgtggccgccaccgtgctgagcatcacccacgtgaacagcctgaagctggagagcgagtgcagcgcccctggagagcagcccaagttcctgggcatccgggagcagagggtgacaggcctgatgatcttcatcctgatgggcagcagcgtcttcatgaccagcatcctgaagttcatccccatgcctgtgctgtatggagtcttcctgtacatgggcgccagcagcctgaagggcatccagttctttgaccgcatcaagctgttctggatgcctgccaagcaccagcctgacttcatctacctgcggcacgtgcccctgaggaaggtgcacctgttcaccatcatccagatgagctgcctgggcctgctgtggatcatcaaggtgtcccgggccgccatcgtgttccccatgatggtgctggccctggtgtttgtgaggaagctgatggacctgctcttcaccaagcgggagctgtcctggctggatgacctgatgcctgagagcaagaagaagaagctggaggatgctgagaaggaggaggagcagagcatgctggccatggaggatgagggcaccgtgcagctgcccctggagggccactacagagatgaccccagcgtcatcaacatcagtgatgagatgagcaagacagccctgtggaggaacctgctgatcacagctgacaacagcaaggacaaggagagcagcttccccagcaagagcagccccagctag

SEQ ID NO: 300382 - DNA, 3354 bp, Artificial Sequence
  derived and/or modified sequence
atggagatcaaggaccagggcgcccagatggagcccctgctgcccactcgcaacgatgaggaggctgttgtcgatcggggcgggactcgtagtatcctgaaaacacattttgaaaaagaagatttggaaggacaccggacgttgttcatcggagtacatgttcccctcggcggtcgaaaatctcatagacggcatagacaccgaggtcacaaacacagaaagcgggacagagaaagagattcgggcctcgaggacgggagggaaagcccgtctttcgatactccttcccagagagtacagttcatcctcgggactgaagatgatgacgaggagcacatcccccatgacctattcactgaacttgacgagatctgctggcgtgagggcgaagatgcagaatggcgggagacagctcggtggctcaagttcgaagaggacgtggaggacggaggcgagagatggagcaagccttacgtagctacgctgagcctgcattcattgttcgaattgagatcctgcatcctgaacggcacagtcttattggacatgcacgctaacaccttggaagaaattgctgatatggttctggaccagcaagtcagtagtggacagctgaacgaggatgtgcgacaccgggtacatgaagccttgatgaaacagcaccaccatcagaatcagaagaagctgacaaatagaatcccaatcgttagaagcttcgccgacattggtaagaaacagtcagagcccaacagtatggacaagaacggccaggtcgtgagtccccagtcggcaccggcttgcgttgagaataaaaatgatgtgtccagagaaaactccaccgtggatttttcgaaaggtctgggggggcagcagaagggccacacttctccctgtgggatgaagcagcggcacgaaaaggggcctcctcaccagcaggagcgcgaggtggacctccatttcatgaagaaaatccctcctggggccgaagccagcaatatactcgtgggcgagctggaattcctggatagaaccgtagtggccttcgtacgcctaagccctgccgtgcttctgcaggggctggctgaggttcccattcctacccgttttctgtttattcttctcggtccactcggaaaggggcagcaataccacgaaattggacgtagtatagccaccctgatgacagatgaagtgttccacgacgttgcatacaaagccaaagaccgcaacgatctggtgagtggaattgacgagttcctggatcaggtcactgttctcccccctggtgagtgggatccctcgattagaatagaacctccaaagaatgtgccttcccaggaaaagaggaaaattcccgccgtcccaaacgggacagccgcacacggcgaagcagaacctcacggaggccattccgggccggaacttcagcggacggggaggatcttcgggggtctgattctcgacataaagcgtaaggctccttacttctggtcggattttagggatgccttcagccttcagtgcttggccagctttctgttcctgtactgcgcttgtatgagcccagtaattacgtttgggggattgctcggcgaagcaaccgagggcaggatcagcgccattgaatctttatttggcgccagcatgacaggtattgcatacagcttgtttggcggccaacctctgacaattctggggagtaccggccccgtgctcgtgtttgagaagatcttgttcaaattctgcaaggaatatgggctctcttatctctctttgcgggcctccattggattgtggacagctacactctgtatcattctggtcgcaacagacgccagtagtctcgtttgttatatcacacgtttcaccgaggaagcatttgcaagcttgatttgcatcatttttatatacgaggccctggaaaaattgttcgaattaagtgaagcctaccccattaacatgcacaacgatctggagctgctcacccagtactcatgtaattgtgtcgagccacataacccaagcaacgggactctgaaggagtggagagaatctaacatctcagcttctgatatcatttgggagaacctcacagtgagcgagtgcaagagtctgcacggcgaatatgtgggtcgggcctgcggacatgatcatccgtatgtccccgatgtgcttttttggtctgtcatattatttttttccaccgtcaccctgagcgcaaccctgaaacagtttaaaaccagccgctatttccccacaaaggtgcggagtatcgtgtcagactttgcggtattcctcacgattctctgtatggtattgatcgactacgcaattggaattccatccccgaagctccaggtgcctagcgtcttcaaacctactcgagatgaccgcggctggttcgtgacccctctgggcccgaacccctggtggacagtcatcgctgccatcatacctgccctgctgtgtaccatcttgattttcatggatcagcagataaccgccgttatcatcaatcgcaaggagcacaagctgaagaagggatgcggttaccatctggatttgctgatggtggcagtgatgctgggcgtgtgttctatcatggggctgccctggttcgttgcggccaccgtcctgagcatcactcacgttaatagcctgaagctagaatccgagtgttcagcacctggagagcagccaaagttcttggggatcagggagcagagagtgaccggcctgatgattttcatactcatgggcagcagtgtttttatgactagcattctaaagtttatcccaatgccggttctgtatggagtttttctgtacatgggcgcctcatctctgaaaggaatccagttttttgaccgaattaagctcttctggatgcctgctaaacatcagcctgacttcatttaccttcgccatgtgcccctgagaaaagtacatctgtttactattattcagatgagttgtttaggcctgttatggatcatcaaggtctcacgtgcagcaatcgttttcccaatgatggtactggccctcgtgttcgtgcggaagcttatggatctgctgttcactaagagagaactctcctggctggatgacttaatgcccgagagtaagaagaagaagttggaagacgccgagaaggaggaggagcaaagcatgctggcaatggaggacgagggtaccgttcagttgccacttgaaggccactatagggacgacccatccgtgataaatatttcagatgagatgtcgaaaaccgccctctggcgcaacttgttgatcaccgccgacaacagtaaggacaaagaaagctcctttccctccaaatcaagcccttcatag

SEQ ID NO: 300383 - DNA, 3354 bp, Artificial Sequence
  derived and/or modified sequence
atggaaattaaagaccagggcgcacagatggagcccctgctgccgaccagaaatgatgaagaggccgtcgtggatagaggaggcaccaggtcaatccttaaaactcattttgagaaagaggaccttgaaggccacaggaccctcttcattggggtgcatgttcctctgggcggtaggaagtcccaccgcaggcataggcatcggggacataagcataggaagcgcgatcgggaaagggacagcggcttggaagatgggagagaatcgccttctttcgacaccccttcacaacgggtccagttcatcctcggtacagaagatgatgacgaggagcacatcccacacgacctcttcacagaactggacgagatttgttggcgagagggagaggacgccgagtggcgagagactgccagatggctgaagttcgaagaggatgtggaggacggaggcgaacgatggtctaaaccttacgtggcgaccttaagcctgcactccctgttcgagctcaggagctgtatcctgaacgggaccgtgctgttggacatgcacgccaacacccttgaggaaattgctgatatggtcttggaccagcaggtgagctccggccaactgaacgaagatgtccggcatagggtccatgaggctctgatgaagcagcaccatcaccaaaatcagaaaaaactcacaaacaggattcctatcgtaaggtcattcgcagacatcggcaagaaacagtcagagccaaactccatggacaaaaatggacaggtggtgagcccacagtcagcacccgcatgtgtggaaaacaaaaacgacgtctcccgtgaaaactccactgttgacttctcaaagggcctcggcggacagcagaaggggcacactagcccatgtgggatgaagcagaggcacgagaaaggtcctcctcaccaacaggaaagagaggtggacttacactttatgaaaaaaatacctcctggcgctgaagcttcgaatattctagttggcgagctcgagtttcttgaccgtaccgttgtggcattcgtgagactctctcctgcagtgttgttgcaaggcttggcggaggtgcctattccaactagattcctctttatcctgttaggcccactgggcaagggccagcagtatcacgagattgggaggtctatcgccactctaatgacggatgaggttttccacgacgtggcttataaggccaaggacaggaacgaccttgtgtctggaattgacgaattcctggaccaagtgaccgtcctacccccaggcgaatgggatcctagcatacgtattgagcccccaaagaacgtcccctcgcaggagaaacgcaagatcccagctgtgcctaatgggactgccgctcacggggaggctgagccccacggtggtcattccgggcctgagttgcaacgcactggaagaattttcggcggtctcatcctggatattaaacggaaggctccctatttttggagtgacttcagagacgctttcagtttacaatgcctcgcgagctttttgtttctgtactgcgcctgcatgtctcccgtgattacatttggaggcctcttaggcgaggctaccgaaggtcgcatctccgcgatagagtctctattcggggctagcatgactgggatagcatattctctgtttggtggacagcctttaacaattctgggtagtaccggcccagtgcttgtgttcgagaagatcctgttcaaattttgcaaggagtacggtctcagctacctctcactgagggccagcattggtctgtggacggcaaccttgtgcatcatcctggtggccacggacgcaagttccttggtctgctacattacccgcttcacggaggaggcttttgcctcccttatttgtattatcttcatctacgaagctctcgagaagctgtttgagctctccgaggcctatcctattaacatgcataatgatctggagttgctgacacagtacagctgcaattgcgtcgagccacacaatccctcaaatggcacgctgaaagaatggagagagagtaatatctcggcaagcgacattatctgggagaatctcacagtgtccgaatgtaaaagcctgcacggagagtatgtcggaagggcttgcgggcatgaccacccctacgttcctgacgtgcttttttggagcgtgattctgttcttttcgaccgtgacgcttagcgcgacactgaaacagttcaaaacatctaggtattttcctacaaaagtgaggtctatagtgagcgattttgccgtctttctgaccatcctctgcatggtgctaattgattatgctattggcataccctctcccaagttgcaggtgccatcagttttcaaacctactagggatgatcgcggttggtttgttacacctctgggccctaatccctggtggactgttatcgcagcaatcattcccgcattgttgtgcactattctgatcttcatggatcagcagattaccgctgtgattataaatagaaaagagcacaaactgaaaaagggatgtggctaccatctcgacctcctaatggtggccgtgatgttgggcgtctgctcaattatgggtctaccttggtttgtagcagccacagtactgtctattacacacgttaacagcctgaagctcgaatctgaatgttccgctcctggagaacagcccaagttcttaggaattcgcgagcagagggtcacaggcctgatgatattcattctaatgggtagttctgtcttcatgacttcaattctgaagttcattccaatgccagtgctctacggagtcttcctctatatgggggcaagttcccttaaggggatacaattttttgacagaatcaaactcttctggatgccagccaaacaccagcccgacttcatctacctgaggcatgtcccactgcggaaggtgcacctgttcacaatcatacaaatgtcgtgcttgggtctgctgtggatcatcaaagtatcccgagcagccatagtgttccctatgatggtgttagctctggtatttgtgcggaagttaatggacctgctgtttactaaaagggaattgtcttggctggatgacctcatgcctgaaagtaaaaaaaaaaaacttgaggatgcggaaaaggaggaggaacagagtatgttggctatggaagacgagggcacagttcagttaccattagaggggcactaccgggacgaccctagcgttataaacatctcggatgagatgtctaagacagcactgtggcggaatctgctaatcactgccgataacagtaaagataaagaaagttccttccccagtaagagctctccttcttag

SEQ ID NO: 300384 - DNA, 3354 bp, Artificial Sequence
  derived and/or modified sequence
atggagattaaagaccagggagcccaaatggagccgctgctgcctacgagaaatgatgaagaagcagttgtggatagaggtggaactcgttctattctcaaaacacactttgagaaagaagatttagaaggtcatcgaacactatttattggagtacatgtgcccttgggaggaagaaaaagccatcgacgtcacaggcatcgtggtcataaacacagaaagagagacagagaaagagattcaggattagaggatggaagggagtcaccttcttttgacaccccatcacagagggtacagtttattcttggaaccgaggatgatgacgaggaacacattcctcatgaccttttcacagaactggatgagatttgttggcgtgaaggtgaggacgctgagtggcgagaaacagccaggtggttgaagtttgaagaagatgtggaagatggaggagaaaggtggagcaagccttatgtggctactctttcattgcacagcttgtttgaattgagaagttgtattctgaatggaactgtgttgctggacatgcatgccaacactttagaagaaattgcagatatggttcttgaccaacaagtgagctcaggtcagctgaatgaagatgtacgccatagggtccatgaggcattgatgaaacagcatcatcatcagaatcagaaaaaactcaccaacaggattcccattgttcgttcctttgctgatattggcaagaaacagtcagaaccaaattccatggacaaaaatggtcaggttgtttctcctcagtctgctccagcctgtgttgaaaataaaaatgatgttagcagagaaaacagcactgttgactttagcaagggactgggaggccaacaaaaggggcatactagtccatgtgggatgaaacaaaggcatgaaaaaggacctccacaccagcaagagagagaggttgatctgcattttatgaaaaagattcctccaggtgctgaagcatcgaacatcttagtgggagaactggagttcttggatcgaacagtagttgcgtttgtcaggttgtctccagctgtattgcttcaaggactggctgaagtcccaatcccaaccagatttttgttcattcttctgggacccctgggaaagggtcaacagtaccatgagattggcagatcaattgcaaccctaatgacagatgaggtatttcatgatgttgcctataaagctaaagatcgtaatgacttggtatcaggaattgatgagtttctggatcaggttactgttctccctcctggagaatgggatccaagcattcgaatagagcctcccaaaaatgttccttcccaggagaagaggaagattcctgctgtaccaaatggaacagcagctcatggggaagcagagccccacggaggacatagtggacctgaactccagcgaactggaaggatttttgggggacttattttagatatcaaaagaaaagctccatacttctggagtgacttcagagatgctttcagcctgcagtgcttagcatcttttctatttctctactgcgcgtgtatgtctcctgtcatcacgtttggaggactgctgggagaagcaactgaagggcgtataagtgcaattgaatctctctttggagcatccatgaccgggatagcctattctctctttggtggacagcctcttaccatattaggcagtacaggaccagttttggtgtttgaaaagattttgtttaaattttgcaaagaatatgggctgtcatacctatctttaagagctagcattggactttggactgcaactctatgtatcatacttgtggccacagatgctagttcccttgtctgctacatcactcggtttactgaagaagcttttgcttccctgatttgcatcattttcatttatgaggccctggagaagttgtttgaactcagtgaagcatatccaatcaacatgcataatgatctggaactgctgacacaatactcgtgtaactgtgtggaaccgcataatcccagcaatggcacattgaaggaatggagggaatccaatatttctgcctctgacataatttgggagaacctaactgtgtcagaatgcaaatcattgcatggagagtatgttggacgggcctgtggccatgatcacccatatgttccagatgttctattttggtctgtgatcctgttcttttccacagttactctgtcagccaccctgaagcagttcaagactagcagatattttccaaccaaggttcgatccatagtgagtgactttgctgtctttcttacaattctgtgtatggttttaattgactatgccattgggatcccatctccaaaactacaagtaccaagtgttttcaagcccactagagatgatcgtggctggtttgttacgcctttaggtccaaacccatggtggacagtaatagctgctataattccagctctgctttgtactattctaatttttatggaccaacagattacagctgtcatcatcaacaggaaagagcataagctaaagaaaggttgtgggtaccatctggacctattaatggtggctgtcatgctcggtgtatgctccatcatgggcctgccatggtttgtggctgccacagtcctctccatcactcatgtcaatagcctaaaactggaatcagaatgctcagctccaggagaacaacccaaatttctcggcattcgggagcaaagggttactgggcttatgatttttattcttatgggttcatcagtctttatgaccagtattctgaagtttattcccatgccagtgctatatggagtgtttctttatatgggtgcttcatctctaaagggaattcagttctttgataggataaagctcttctggatgccggcaaaacatcaaccagattttatatacctaaggcacgtaccgcttcgaaaagtgcatctcttcacaattattcagatgagttgccttggccttttgtggataataaaagtttcaagagctgctattgtctttcccatgatggtgttagccctggtatttgtaagaaagttgatggacttgttgttcacgaagcgggaactcagctggttggatgatttgatgcccgagagtaagaaaaagaaactggaagatgctgaaaaagaagaagaacaaagtatgctagctatggaagatgagggcacagtacaactcccattggaagggcactatagagatgatccatctgtgatcaatatatctgatgaaatgtcaaagactgccttgtggaggaaccttctgattactgccgataactcaaaagataaggagtcaagctttccttccaaaagctccccttcctaa

SEQ ID NO: 300385 - protein, 1106 aa, Artificial Sequence
  derived and/or modified sequence
MEIKDQGAQMEPLLPTRNDEEAVVDRGGTRSILKTHFEKEDLEGHRTLFIGVHVPLGGRKSHRRHRHRGHKHRKRDRERDSGLEDGRESPSFDTPSQRVQFILGTEDDDEEHIPHDLFTELDEICWREGEDAEWRETARWLKFEEDVEDGGERWSKPYVATLSLHSLFELRSCILNGTVLLDMHANTLEEIADMVLDQQVSSGQLNEDVRHRVHEALMKQHHHQNQKKLTNRIPIVRSFADIGKKQSEPNSMDKNAGQVVSPQSAPACVENKNDVSRENSTVDFSKVDLHFMKKIPPGAEASNILVGELEFLDRTVVAFVRLSPAVLLQGLAEVPIPTRFLFILLGPLGKGQQYHEIGRSIATLMTDEVFHDVAYKAKDRNDLVSGIDEFLDQVTVLPPGEWDPSIRIEPPKNVPSQEKRKIPAVPNGTAAHGEAEPHGGHSGPELQRTGRIFGGLILDIKRKAPYFWSDFRDAFSLQCLASFLFLYCACMSPVITFGGLLGEATEGRISAIESLFGASMTGIAYSLFGGQPLTILGSTGPVLVFEKILFKFCKEYGLSYLSLRASIGLWTATLCIILVATDASSLVCYITRFTEEAFASLICIIFIYEALEKLFELSEAYPINMHNDLELLTQYSCNCVEPHNPSNGTLKEWRESNISASDIIWENLTVSECKSLHGEYVGRACGHDHPYVPDVLFWSVILFFSTVTLSATLKQFKTSRYFPTKVRSIVSDFAVFLTILCMVLIDYAIGIPSPKLQVPSVFKPTRDDRGWFVTPLGPNPWWTVIAAIIPALLCTILIFMDQQITAVIINRKEHKLKKGCGYHLDLLMVAVMLGVCSIMGLPWFVAATVLSITHVNSLKLESECSAPGEQPKFLGIREQRVTGLMIFILMGSSVFMTSILKFIPMPVLYGVFLYMGASSLKGIQFFDRIKLFWMPAKHQPDFIYLRHVPLRKVHLFTIIQMSCLGLLWIIKVSRAAIVFPMMVLALVFVRKLMDLLFTKRELSWLDDLMPESKKKKLEDAEKEEEQSMLAMEDEGTVQLPLEGHYRDDPSVINISDEMSKTALWRNLLITADNSKDKESSFPSKSIESRKEKKADSGKGVDRETCL

SEQ ID NO: 300386 - DNA, 3321 bp, Artificial Sequence
  derived and/or modified sequence
atggagatcaaggaccagggcgcccagatggagcccctgctgcccaccagaaacgacgaggaggccgtggtggacagaggcggcaccagaagcatcctgaagacccacttcgagaaggaggacctggagggccacagaaccctgttcatcggcgtgcacgtgcccctgggcggcagaaagagccacagaagacacagacacagaggccacaagcacagaaagagagacagagagagagacagcggcctggaggacggcagagagagccccagcttcgacacccccagccagagagtgcagttcatcctgggcaccgaggacgacgacgaggagcacatcccccacgacctgttcaccgagctggacgagatctgctggagagagggcgaggacgccgagtggagagagaccgccagatggctgaagttcgaggaggacgtggaggacggcggcgagagatggagcaagccctacgtggccaccctgagcctgcacagcctgttcgagctgagaagctgcatcctgaacggcaccgtgctgctggacatgcacgccaacaccctggaggagatcgccgacatggtgctggaccagcaggtgagcagcggccagctgaacgaggacgtgagacacagagtgcacgaggccctgatgaagcagcaccaccaccagaaccagaagaagctgaccaacagaatccccatcgtgagaagcttcgccgacatcggcaagaagcagagcgagcccaacagcatggacaagaacgccggccaggtggtgagcccccagagcgcccccgcctgcgtggagaacaagaacgacgtgagcagagagaacagcaccgtggacttcagcaaggtggacctgcacttcatgaagaagatcccccccggcgccgaggccagcaacatcctggtgggcgagctggagttcctggacagaaccgtggtggccttcgtgagactgagccccgccgtgctgctgcagggcctggccgaggtgcccatccccaccagattcctgttcatcctgctgggccccctgggcaagggccagcagtaccacgagatcggcagaagcatcgccaccctgatgaccgacgaggtgttccacgacgtggcctacaaggccaaggacagaaacgacctggtgagcggcatcgacgagttcctggaccaggtgaccgtgctgccccccggcgagtgggaccccagcatcagaatcgagccccccaagaacgtgcccagccaggagaagagaaagatccccgccgtgcccaacggcaccgccgcccacggcgaggccgagccccacggcggccacagcggccccgagctgcagagaaccggcagaatcttcggcggcctgatcctggacatcaagagaaaggccccctacttctggagcgacttcagagacgccttcagcctgcagtgcctggccagcttcctgttcctgtactgcgcctgcatgagccccgtgatcaccttcggcggcctgctgggcgaggccaccgagggcagaatcagcgccatcgagagcctgttcggcgccagcatgaccggcatcgcctacagcctgttcggcggccagcccctgaccatcctgggcagcaccggccccgtgctggtgttcgagaagatcctgttcaagttctgcaaggagtacggcctgagctacctgagcctgagagccagcatcggcctgtggaccgccaccctgtgcatcatcctggtggccaccgacgccagcagcctggtgtgctacatcaccagattcaccgaggaggccttcgccagcctgatctgcatcatcttcatctacgaggccctggagaagctgttcgagctgagcgaggcctaccccatcaacatgcacaacgacctggagctgctgacccagtacagctgcaactgcgtggagccccacaaccccagcaacggcaccctgaaggagtggagagagagcaacatcagcgccagcgacatcatctgggagaacctgaccgtgagcgagtgcaagagcctgcacggcgagtacgtgggcagagcctgcggccacgaccacccctacgtgcccgacgtgctgttctggagcgtgatcctgttcttcagcaccgtgaccctgagcgccaccctgaagcagttcaagaccagcagatacttccccaccaaggtgagaagcatcgtgagcgacttcgccgtgttcctgaccatcctgtgcatggtgctgatcgactacgccatcggcatccccagccccaagctgcaggtgcccagcgtgttcaagcccaccagagacgacagaggctggttcgtgacccccctgggccccaacccctggtggaccgtgatcgccgccatcatccccgccctgctgtgcaccatcctgatcttcatggaccagcagatcaccgccgtgatcatcaacagaaaggagcacaagctgaagaagggctgcggctaccacctggacctgctgatggtggccgtgatgctgggcgtgtgcagcatcatgggcctgccctggttcgtggccgccaccgtgctgagcatcacccacgtgaacagcctgaagctggagagcgagtgcagcgcccccggcgagcagcccaagttcctgggcatcagagagcagagagtgaccggcctgatgatcttcatcctgatgggcagcagcgtgttcatgaccagcatcctgaagttcatccccatgcccgtgctgtacggcgtgttcctgtacatgggcgccagcagcctgaagggcatccagttcttcgacagaatcaagctgttctggatgcccgccaagcaccagcccgacttcatctacctgagacacgtgcccctgagaaaggtgcacctgttcaccatcatccagatgagctgcctgggcctgctgtggatcatcaaggtgagcagagccgccatcgtgttccccatgatggtgctggccctggtgttcgtgagaaagctgatggacctgctgttcaccaagagagagctgagctggctggacgacctgatgcccgagagcaagaagaagaagctggaggacgccgagaaggaggaggagcagagcatgctggccatggaggacgagggcaccgtgcagctgcccctggagggccactacagagacgaccccagcgtgatcaacatcagcgacgagatgagcaagaccgccctgtggagaaacctgctgatcaccgccgacaacagcaaggacaaggagagcagcttccccagcaagagcatcgagagcagaaaggagaagaaggccgacagcggcaagggcgtggacagagagacctgcctgtag

SEQ ID NO: 300387 - DNA, 3321 bp, Artificial Sequence
  derived and/or modified sequence
atggagataaaggaccagggtgctcagatggagcctctgctcccgacaaggaacgatgaagaggctgtggtggaccgtggtggaaccagatcgattcttaaaacccattttgaaaaagaggacctggagggccataggaccctttttatcggagtccacgttcctctgggcggcaggaagagccacaggagacaccggcaccgaggccataaacaccggaagcgagatcgcgagcgagattctggcctggaagacgggcgggaatcaccgtcttttgacacgccgagtcagcgagtacagttcatccttgggaccgaagatgacgatgaggagcacattccccacgatctcttcacagaactagatgagatttgctggcgcgagggtgaagatgccgaatggcgtgagaccgctcgctggctcaagtttgaagaggacgtcgaagatggtggtgaacggtggtccaagccatatgtcgccacgctcagtctgcactctctatttgagttgcgctcttgcatccttaatgggactgtcctcctggacatgcatgctaatacactggaggagattgccgatatggttttggatcagcaggtgtccagcggccaattgaatgaggatgtccgccacagagttcatgaagccctcatgaaacagcaccaccaccagaaccagaagaaactgaccaatagaatccccatagtcaggagctttgcagacataggcaaaaagcaatctgaaccgaattcgatggataagaatgccggacaagtggtctcccctcagtctgcacctgcatgcgtggaaaacaagaatgatgtgtcccgggagaacagcaccgtcgacttttctaaagtcgacctccacttcatgaagaaaatcccacccggagccgaagctagcaatatcctcgttggtgaactggagtttctcgatcgcacagtcgtggcattcgtccgactgtcccccgctgtcctgctgcagggactcgcggaagtgcctatccctacccgcttcctcttcatcctattgggtcctcttggcaaagggcaacagtatcatgaaattggcaggtccattgctaccttaatgaccgacgaggtcttccacgacgtggcatataaggccaaggataggaacgatctcgtgtctggaatcgatgagtttctggaccaggtgaccgttctgccccctggtgaatgggatccctctatacggattgagccacctaagaatgtacccagtcaggagaagcgtaagatccccgcggtgccgaatggaacagcggcacatggcgaggcagagccccatggtggacactcaggccctgagcttcagcgcacgggcaggatctttggcggcctgatcctagatatcaagcgtaaggctccttacttctggagcgattttcgagacgcgttttctctgcagtgtcttgccagttttctatttctgtattgtgcatgcatgagtccagttattacctttggaggtctgctgggcgaggctacggaagggaggattagtgctatcgagtcgcttttcggtgcatctatgactgggatcgcttactcattatttggcggccagcctctcaccatcctggggtccaccggccccgtcctggtgttcgaaaagattttgttcaaattctgtaaagaatacggtctgagttacctctctctgcgagcgtcaattgggttatggactgcaacgttatgcatcatactggtcgctacggacgcatcaagcttggtgtgttacataacgcgattcaccgaagaagcgtttgcatctttgatttgtatcattttcatctacgaagccctagagaagctattcgagctgtcggaggcgtatcccatcaacatgcataatgacttagaactcctgacacagtacagttgtaattgtgtagagcctcacaatccctcgaacggcacactgaaggagtggagagagtccaacatcagcgcctctgacatcatttgggagaacctgacggtgtcggagtgcaagagtctccatggggagtacgtgggccgagcttgcgggcacgatcatccctatgtgcccgatgttttgttttggtctgtgattttattcttctctaccgttaccctgtctgcgacactgaagcaattcaaaacttcccggtatttcccaactaaagtacgtagtatcgtgtctgacttcgctgtgtttctgactatcctgtgcatggtgctgattgactacgccatcggcattcccagtccaaagcttcaggtaccttcagtcttcaaacccacaagagatgacagggggtggtttgtgactcctctgggacctaacccatggtggactgtgatcgccgctatcatacctgcactcctctgtacaattttgatttttatggatcaacaaatcactgcggtaataataaaccggaaggagcacaaattgaaaaagggctgcgggtaccacctggacctgttaatggtggcggttatgctgggagtgtgctcgattatgggcctcccctggtttgtggcagcgactgtcctgtccattacccacgtgaacagtttgaagctcgagagcgagtgtagcgcacccggtgaacagcccaaatttctaggtattcgtgagcagcgagtcacaggactgatgatcttcatcctgatgggttccagcgtattcatgacttctatcctaaagttcatccctatgcctgtactgtacggggtgtttctgtacatgggcgcatcaagcctgaaaggcatccaatttttcgatcggatcaaattattttggatgccagcaaaacaccagccggacttcatctacctgaggcatgtgccccttcggaaagtccatctgtttaccattatacaaatgtcctgcttaggtctgctttggatcatcaaggtgtccagagcagctatcgtgtttcctatgatggtccttgccttagtctttgttcggaagctgatggacctcctcttcactaaacgcgaactctcctggctagatgatttgatgccagaatccaagaagaagaagctcgaggacgccgagaaagaggaggagcaaagtatgctcgccatggaagacgagggaaccgtgcagctaccactggaggggcactatagagatgatccatccgtcattaatatcagtgacgagatgagtaagaccgccctttggagaaacctgcttattaccgccgacaactcaaaagacaaggagtcctccttcccctctaaatccatcgaatcacgtaaggaaaagaaggctgattccggaaagggagtagacagagaaacatgcctctag

SEQ ID NO: 300388 - DNA, 3321 bp, Artificial Sequence
  derived and/or modified sequence
atggagatcaaggaccagggcgcccagatggagcccctgctgcccaccagaaatgatgaggaggccgtggtggacagaggaggcaccaggagcatcctgaagacccactttgagaaggaggacctggagggccacaggaccctcttcatcggcgtgcacgtgcccctgggcggcaggaagagccacagaagacaccgccaccggggccacaagcacaggaagagggaccgggagcgggacagcggcctggaggatggccgggagagccccagctttgacacccccagccagagggtgcagttcatcctgggcacagaagatgatgatgaggagcacatcccccatgacctcttcacagagctggatgagatctgctggagggagggggaggatgctgagtggagggagacagcccgctggctgaagtttgaagaagatgtggaggatggaggagagcgctggagcaagccctacgtggccaccctgagcctgcacagcctgtttgagctgcggagctgcatcctgaatggcaccgtgctgctggacatgcacgccaacaccctggaggagattgctgacatggtgctggaccagcaggtgagcagcggccagctgaatgaagatgtgcgccaccgggtgcatgaggccctgatgaagcagcaccaccaccagaaccagaagaagctgaccaaccgcatccccatcgtgcgcagctttgctgacatcggcaagaagcagagcgagcccaacagcatggacaagaatgccggccaggtggtgagcccccagagcgccccagcctgtgtggagaacaagaatgatgtgtcccgggagaacagcacagtggacttcagcaaggtggacctgcacttcatgaagaagatccccccaggagctgaggccagcaacatcctggtgggggagctggagttcctggacagaacagtggtggcctttgtgcggctgagccctgctgtgctgctgcagggcctggccgaggtgcccatccccacccgcttcctgttcatcctgctgggccccctgggcaagggccagcagtaccatgaaattggccgcagcatcgccaccctgatgacagatgaggtgttccatgatgtggcctacaaggccaaggacagaaatgacctggtgtctggaattgatgagttcctggaccaggtgacagtgctgcccccaggagagtgggaccccagcatccgcatcgagccccccaagaatgtgcccagccaggagaagaggaagatcccagctgtgcccaatggaacagctgcccacggggaggccgagccccacggcggccacagcggccctgagctgcagaggacaggccgcatctttggaggcctcatcctggacatcaagaggaaggccccctacttctggagcgacttcagagatgccttcagcctgcagtgcctggccagcttcctgttcctgtactgtgcctgcatgagccctgtgatcacctttggaggcctgctgggggaggccacagagggccgcatcagcgccatcgagagcctgtttggagcctccatgactggaattgcctacagcctgtttggaggccagcccctgaccatcctgggcagcactggacctgtgctggtgtttgagaagatcctcttcaagttctgcaaggagtatggcctgagctacctgagcctgcgggccagcatcggcctgtggacagccaccctgtgcatcatcctggtggccacagatgccagcagcctggtgtgctacatcacccgcttcacagaggaggcctttgccagcctcatctgcatcatcttcatctatgaggccctggagaagctgtttgagctgtctgaggcctaccccatcaacatgcacaatgacctggagctgctgacccagtacagctgcaactgtgtggagccccacaaccccagcaatggcaccctgaaggagtggagggagagcaacatcagcgccagtgacatcatctgggagaacctgactgtgtctgagtgcaagagcctgcatggagaatatgtgggccgggcctgtggccatgaccacccctacgtgcctgatgtgctcttctggagcgtcatcctcttcttcagcacagtgaccctgagcgccaccctgaagcagttcaagaccagccgctacttccccaccaaggtgcgcagcatcgtgtctgactttgctgtgttcctgaccatcctgtgcatggtgctgattgattatgccatcggcatccccagccccaagctgcaggtgcccagcgtcttcaagcccaccagagatgaccggggctggtttgtgacccccctgggccccaacccctggtggacagtgattgctgccatcatcccagccctgctgtgcaccatcctgatcttcatggaccagcagatcacagctgtgatcatcaacaggaaggagcacaagctgaagaagggctgcggctaccacctggacctgctgatggtggccgtgatgctgggcgtgtgcagcatcatgggcctgccctggtttgtggccgccaccgtgctgagcatcacccacgtgaacagcctgaagctggagagtgaatgttctgcccctggagagcagcccaagttcctgggcatccgggagcagagggtgacaggcctgatgatcttcatcctgatgggcagctctgtgttcatgaccagcatcctgaagttcatccccatgcctgtgctgtatggagtcttcctgtacatgggcgccagcagcctgaagggcatccagttctttgaccgcatcaagctgttctggatgcctgccaagcaccagcctgacttcatctacctgcggcacgtgcccctgaggaaggtgcacctgttcaccatcatccagatgagctgcctgggcctgctgtggatcatcaaggtgtccagagctgccatcgtgttccccatgatggtgctggccctggtgtttgtgaggaagctgatggacctgctcttcaccaagcgggagctgtcctggctggatgacctgatgcctgagagcaagaagaagaagctggaggatgctgagaaggaggaggagcagagcatgctggccatggaggatgagggcaccgtgcagctgcccctggagggccactacagagatgaccccagcgtcatcaacatcagtgatgagatgagcaagacagccctgtggaggaacctgctgatcacagctgacaacagcaaggacaaggagagcagcttccccagcaagagcattgagagcaggaaggagaagaaggctgacagcggcaagggcgtggaccgggagacctgcctgtag

SEQ ID NO: 300389 - DNA, 3321 bp, Artificial Sequence
  derived and/or modified sequence
atggagatcaaggaccagggcgcccagatggagcccctgctgcccacacggaatgatgaagaggcagtggtggaccgcgggggtaccagaagcattctcaagactcacttcgaaaaggaagatctggaaggccaccggactctctttattggtgtccacgtgcctttgggcggccggaagagccaccgaaggcaccggcatcgcggccataagcacaggaagagggaccgggagagggactcaggcttggaggacggacgtgagtccccaagctttgatactccaagccaacgggtgcagttcattctaggcaccgaggacgatgatgaggaacacattccccacgatctttttacagaactggatgaaatttgttggagagagggcgaggatgccgagtggcgggagaccgcacggtggctgaagttcgaggaggatgtcgaagacggcggcgagcgttggagtaagccatatgtcgcaaccctgtcactgcacagcttattcgagctaaggtcatgtatcctaaacgggacagtcctgctagatatgcacgctaacactcttgaggaaatcgccgatatggtgctagaccagcaagtctcctccgggcagctcaatgaggatgtaaggcaccgcgtacacgaggccctaatgaagcagcaccaccaccagaaccagaagaaactgactaaccggatcccgatagtgcgctcttttgccgacattggaaagaaacagtccgagccgaacagtatggacaaaaacgcgggccaggtggtgtctcctcagtctgcccccgcctgcgttgagaataagaatgacgtgtctcgagaaaattctactgtcgacttctcaaaggtggacctccattttatgaagaagatcccacccggggctgaagcctctaatatcctggtcggtgagctagagtttctcgatcgcaccgttgtcgcctttgtccgcttgtctccagctgtgctcctgcaggggctggccgaagtgcccatccccacccgctttctttttatcctgctgggtccattaggaaagggtcaacagtaccacgagataggacggagcatagctaccctgatgaccgatgaagtttttcacgatgtggcttataaggctaaggaccgtaacgatctagtgagcggtatagacgaattcctcgatcaggttacagtcctgccaccaggggagtgggatcccagtattagaatagagccacctaaaaatgtgccatcgcaagagaaaaggaaaatcccagctgttcccaatggtaccgccgcacacggagaggccgagccccatggcggacattccggaccagagcttcagagaacaggaagaatttttggggggttaattctggacattaagagaaaggccccctatttctggagcgactttcgcgatgctttttcccttcagtgtctggccagcttcctgtttctctactgtgcttgtatgtcacccgttattacgtttggagggcttctgggggaagcaactgaaggcaggatcagtgccattgaatcactgttcggagctagcatgactggcatagcttacagtctgttcggtggccaacccctcacaattctcggcagtacgggtcctgtgctggtttttgagaagattctgtttaaattctgtaaggaatatggactgtcgtatctgtccttacgggccagcattggactatggactgctaccttgtgcatcatcctcgtcgccactgacgcatcttcactcgtatgctacattaccaggttcacggaagaggccttcgcatctctcatttgcattattttcatatacgaagctttggagaagctgtttgagctgtccgaggcatatcccataaacatgcacaatgatttggagctgctcactcagtacagttgcaattgcgtcgaaccccacaacccctccaacggcaccctcaaagaatggcgcgagagtaacattagcgcaagtgacattatttgggagaatttaaccgtaagcgagtgcaagtcactgcatggcgagtacgtgggccgtgcgtgcggccatgaccacccctacgtgccagacgtgttgttctggagtgttatcctcttcttttcaactgtgacgctgtcagccaccctcaagcaatttaagacctcacgatattttccaactaaagtccgttctattgtatctgatttcgccgtgtttcttaccattctgtgcatggtgctcatcgactacgcaattggcatcccttcccctaaattgcaagtaccatcggtgttcaaaccgactcgtgatgaccgtgggtggttcgtcacgccgttgggccctaatccttggtggacagttatcgcagcaataattcccgcactgctgtgcaccatcctcatcttcatggatcaacagatcacagctgtcatcatcaacaggaaggagcataagttgaagaaggggtgtggctaccacctagaccttctcatggtggccgtgatgctgggcgtgtgctcaattatgggacttccctggtttgtggctgccaccgttctgagcatcacgcacgtaaactcacttaaattagagtctgagtgttcagcaccgggcgagcagccaaaattccttgggatcagagaacaaagggttacaggtcttatgatctttatcctgatgggttcttcagtgttcatgacatccatactgaagttcatccccatgcccgtgctttacggcgtcttcctgtacatgggcgccagtagtctgaaaggtatccaattcttcgaccgcatcaaattgttttggatgcctgctaaacaccaacccgacttcatttaccttcggcacgtccccctgaggaaggtgcatctgttcaccatcattcagatgtcttgcctgggactgctgtggatcattaaggtgtctagagccgccatcgtgttccctatgatggttctggccctggtgtttgtgcgcaagttaatggatcttctgttcacaaagagggagctgagctggctcgatgacctcatgcctgagagtaaaaaaaagaaactggaggatgctgaaaaagaggaggaacagagtatgctggcgatggaggatgaaggtactgttcagctgccactcgaggggcattatcgggatgacccttcagttatcaatatttctgacgagatgagcaaaacagcgctctggagaaaccttctcataactgcagacaatagcaaagataaagagtcttccttcccttccaagtccattgagagtcggaaggagaagaaggctgattctggtaaaggggttgatagagaaacatgtctgtag

SEQ ID NO: 300390 - DNA, 3321 bp, Artificial Sequence
  derived and/or modified sequence
atggagataaaagatcagggggctcagatggaaccactcctgcctacgcgcaatgacgaggaagccgtggtggatcggggaggcacccgcagcatactcaaaacacactttgagaaagaagatcttgaagggcataggacgctgtttataggcgtccacgtgcctttaggcggaaggaagtcgcatcggcgtcatagacatcgcggacataaacatcgcaagcgggacagggaacgggactctggactcgaggatggcagggagtctccttcgttcgataccccctctcagagagttcaatttatcctgggaaccgaggacgacgatgaagaacacatacctcacgatctgttcaccgaattggacgaaatctgctggagagagggggaagacgcggagtggagggagactgcccgatggttgaagtttgaagaagacgtggaggacgggggagagcggtggagcaagccctacgttgcaaccctttccctgcattcactctttgaacttagaagttgcattttaaacggcacagtcctgttggacatgcatgcaaatacattggaggaaatagccgacatggtgctggatcagcaggtctccagcggccagcttaacgaagatgtccggcacagggtgcacgaagcactcatgaaacagcatcatcaccaaaaccagaaaaaattgacgaatcgaattcctattgtccgcagctttgccgacatcggtaagaaacagagtgaaccaaacagcatggacaagaacgcaggacaagtcgtatctccccagtctgcccctgcgtgtgtggagaacaaaaatgatgtctcccgggaaaactcaaccgttgacttcagtaaggtggatctacatttcatgaaaaaaatcccacccggagctgaagcctccaatatacttgtgggcgagctcgagtttctcgatcgtacagtggtggcgtttgtccggctgtcacccgctgtcctgctgcaaggacttgcggaagttcccataccaaccaggttcctcttcattttactcggaccacttgggaagggccaacaataccacgagatcggcagatctatcgccacactcatgacggacgaagtgtttcacgacgtggcctacaaagcaaaagaccggaatgacctggtttctggaattgacgagtttctggatcaggttacggtgttacctcctggggagtgggatcctagcattaggattgaacctcctaagaacgtcccatcacaggagaagcgtaaaatcccagccgtgcctaacggtacggccgcacatggcgaagctgaaccacatggtgggcatagcggtcccgagctccaacggaccggcaggatatttgggggacttatcctggacataaaaaggaaagccccatatttttggtcagatttcagggatgcatttagcttacagtgtttagcatcgtttctgttcctttattgcgcttgtatgtctccggtgatcacgtttggtggccttctcggtgaggcaacggaggggcgaatctcagcaatcgagtccttattcggcgcttcaatgaccgggatcgcatatagcctgttcggcggtcaacccttaacaatactgggtagtaccggccctgtgttagtgttcgagaagattctcttcaagttttgtaaggagtacggcctgtcctacctatccttgcgggcatccattggcctttggacagcgaccctgtgcattatcttggtggcgaccgatgcttcttcactcgtgtgctacatcaccaggtttaccgaagaggcctttgcaagcctgatttgcattatcttcatatacgaagccctcgaaaaactgtttgaattgagtgaagcttatccgatcaacatgcataatgatctcgaattattgacccagtacagctgtaactgtgttgaacctcataatcccagcaatggcacactgaaggagtggagggaaagcaatatttctgcttccgatatcatctgggagaatttgactgtgtcagagtgtaagagtttacacggagagtacgtcgggagagcctgcggacacgaccacccttatgtacccgatgtgctcttctggtcagtcatactatttttctcaaccgtgacattgtccgccacattaaagcagtttaagacatcccgctactttccgaccaaagttagaagcatcgtgtctgacttcgccgtcttcttaaccattctgtgcatggtgctgatcgattatgccatcgggattcctagtcccaagcttcaggtcccaagtgtgtttaagccaaccagggatgatagaggatggtttgtgacacctctcggccctaatccctggtggactgtgattgcggcaatcatacctgccctcctttgtaccattttaattttcatggaccaacagatcacagccgttattatcaaccgcaaagaacacaagttaaagaaaggctgcggttatcatctcgatctcctgatggttgctgtcatgctgggcgtctgctcaatcatgggacttccctggtttgtagccgctactgttctctccattacccatgtgaacagtttgaaactggaaagcgagtgcagcgcccctggggaacagcccaaatttctaggaattcgagagcagagagtgaccgggctcatgatcttcattttgatgggaagctccgtctttatgacgtctattctgaaattcattcctatgccagtgctttacggcgtgtttctgtacatgggagcttcttctctcaagggcatccaattcttcgataggataaaactgttctggatgccagccaaacaccagcctgacttcatctatctgcggcacgtccccctgcgcaaagtccatctattcaccataatccagatgagctgtttggggctcttatggataattaaagtctcacgggctgctatagttttcccaatgatggtcctcgctttagtctttgtgcggaaactgatggatcttctcttcacaaaacgagagctttcctggctggacgacttaatgcctgaatccaaaaagaaaaaactggaggatgctgaaaaggaggaggaacagtcaatgcttgccatggaggacgagggcaccgtgcaacttccgctagaggggcactatcgagacgacccaagcgtgatcaacatcagtgatgaaatgtcaaaaaccgcattgtggcggaatctattaatcaccgcggataactcgaaggacaaggaaagctcctttccttcaaagagcattgaaagtagaaaggaaaaaaaggctgacagtggaaagggagtggacagggagacatgcctgtag

SEQ ID NO: 300391 - DNA, 3414 bp, Artificial Sequence
  derived and/or modified sequence
gatccgaatactaagcagagcgagtgccgggctgagtgtaagacactgaagacactgcagagcaaggtgcttattccagaggcgttacaaaacatggagattaaagaccagggagcccaaatggagccgctgctgcctacgagaaatgatgaagaagcagttgtggatagaggtggaactcgttctattctcaaaacacactttgagaaagaagatttagaaggtcatcgaacactatttattggagtacatgtgcccttgggaggaagaaaaagccatcgacgtcacaggcatcgtggtcataaacacagaaagagagacagagaaagagattcaggattagaggatggaagggagtcaccttcttttgacaccccatcacagagggtacagtttattcttggaaccgaggatgatgacgaggaacacattcctcatgaccttttcacagaactggatgagatttgttggcgtgaaggtgaggacgctgagtggcgagaaacagccaggtggttgaagtttgaagaagatgtggaagatggaggagaaaggtggagcaagccttatgtggctactctttcattgcacagcttgtttgaattgagaagttgtattctgaatggaactgtgttgctggacatgcatgccaacactttagaagaaattgcagatatggttcttgaccaacaagtgagctcaggtcagctgaatgaagatgtacgccatagggtccatgaggcattgatgaaacagcatcatcatcagaatcagaaaaaactcaccaacaggattcccattgttcgttcctttgctgatattggcaagaaacagtcagaaccaaattccatggacaaaaatgcaggtcaggttgtttctcctcagtctgctccagcctgtgttgaaaataaaaatgatgttagcagagaaaacagcactgttgactttagcaaggttgatctgcattttatgaaaaagattcctccaggtgctgaagcatcgaacatcttagtgggagaactggagttcttggatcgaacagtagttgcgtttgtcaggttgtctccagctgtattgcttcaaggactggctgaagtcccaatcccaaccagatttttgttcattcttctgggacccctgggaaagggtcaacagtaccatgagattggcagatcaattgcaaccctaatgacagatgaggtatttcatgatgttgcctataaagctaaagatcgtaatgacttggtatcaggaattgatgagtttctggatcaggttactgttctccctcctggagaatgggatccaagcattcgaatagagcctcccaaaaatgttccttcccaggagaagaggaagattcctgctgtaccaaatggaacagcagctcatggggaagcagagccccacggaggacatagtggacctgaactccagcgaactggaaggatttttgggggacttattttagatatcaaaagaaaagctccatacttctggagtgacttcagagatgctttcagcctgcagtgcttagcatcttttctatttctctactgcgcgtgtatgtctcctgtcatcacgtttggaggactgctgggagaagcaactgaagggcgtataagtgcaattgaatctctctttggagcatccatgaccgggatagcctattctctctttggtggacagcctcttaccatattaggcagtacaggaccagttttggtgtttgaaaagattttgtttaaattttgcaaagaatatgggctgtcatacctatctttaagagctagcattggactttggactgcaactctatgtatcatacttgtggccacagatgctagttcccttgtctgctacatcactcggtttactgaagaagcttttgcttccctgatttgcatcattttcatttatgaggccctggagaagttgtttgaactcagtgaagcatatccaatcaacatgcataatgatctggaactgctgacacaatactcgtgtaactgtgtggaaccgcataatcccagcaatggcacattgaaggaatggagggaatccaatatttctgcctctgacataatttgggagaacctaactgtgtcagaatgcaaatcattgcatggagagtatgttggacgggcctgtggccatgatcacccatatgttccagatgttctattttggtctgtgatcctgttcttttccacagttactctgtcagccaccctgaagcagttcaagactagcagatattttccaaccaaggttcgatccatagtgagtgactttgctgtctttcttacaattctgtgtatggttttaattgactatgccattgggatcccatctccaaaactacaagtaccaagtgttttcaagcccactagagatgatcgtggctggtttgttacgcctttaggtccaaacccatggtggacagtaatagctgctataattccagctctgctttgtactattctaatttttatggaccaacagattacagctgtcatcatcaacaggaaagagcataagctaaagaaaggttgtgggtaccatctggacctattaatggtggctgtcatgctcggtgtatgctccatcatgggcctgccatggtttgtggctgccacagtcctctccatcactcatgtcaatagcctaaaactggaatcagaatgctcagctccaggagaacaacccaaatttctcggcattcgggagcaaagggttactgggcttatgatttttattcttatgggttcatcagtctttatgaccagtattctgaagtttattcccatgccagtgctatatggagtgtttctttatatgggtgcttcatctctaaagggaattcagttctttgataggataaagctcttctggatgccggcaaaacatcaaccagattttatatacctaaggcacgtaccgcttcgaaaagtgcatctcttcacaattattcagatgagttgccttggccttttgtggataataaaagtttcaagagctgctattgtctttcccatgatggtgttagccctggtatttgtaagaaagttgatggacttgttgttcacgaagcgggaactcagctggttggatgatttgatgcccgagagtaagaaaaagaaactggaagatgctgaaaaagaagaagaacaaagtatgctagctatggaagatgagggcacagtacaactcccattggaagggcactatagagatgatccatctgtgatcaatatatctgatgaaatgtcaaagactgccttgtggaggaaccttctgattactgccgataactcaaaagataaggagtcaagctttccttccaaaagcattgaaagccgaaaagagaagaaagctgactcagggaaaggtgttgacagggagacttgtctatga

SEQ ID NO: 300392 - DNA, 5578 bp, Artificial Sequence
  derived and/or modified sequence
caaaacctggccagcagcccgagtgagtaggagccatgtgactctggtgagttggagtgtgcaattgcctcctgcttcagagctacctgatccgaatactaagcagagcgagtgccgggctgagtgtaagacactgaagacactgcagagcaaggtgcttattccagaggcgttacaaaacatggagattaaagaccagggagcccaaatggagccgctgctgcctacgagaaatgatgaagaagcagttgtggatagaggtggaactcgttctattctcaaaacacactttgagaaagaagatttagaaggtcatcgaacactatttattggagtacatgtgcccttgggaggaagaaaaagccatcgacgtcacaggcatcgtggtcataaacacagaaagagagacagagaaagagattcaggattagaggatggaagggagtcaccttcttttgacaccccatcacagagggtacagtttattcttggaaccgaggatgatgacgaggaacacattcctcatgaccttttcacagaactggatgagatttgttggcgtgaaggtgaggacgctgagtggcgagaaacagccaggtggttgaagtttgaagaagatgtggaagatggaggagaaaggtggagcaagccttatgtggctactctttcattgcacagcttgtttgaattgagaagttgtattctgaatggaactgtgttgctggacatgcatgccaacactttagaagaaattgcagatatggttcttgaccaacaagtgagctcaggtcagctgaatgaagatgtacgccatagggtccatgaggcattgatgaaacagcatcatcatcagaatcagaaaaaactcaccaacaggattcccattgttcgttcctttgctgatattggcaagaaacagtcagaaccaaattccatggacaaaaatgcaggtcaggttgtttctcctcagtctgctccagcctgtgttgaaaataaaaatgatgttagcagagaaaacagcactgttgactttagcaaggttgatctgcattttatgaaaaagattcctccaggtgctgaagcatcgaacatcttagtgggagaactggagttcttggatcgaacagtagttgcgtttgtcaggttgtctccagctgtattgcttcaaggactggctgaagtcccaatcccaaccagatttttgttcattcttctgggacccctgggaaagggtcaacagtaccatgagattggcagatcaattgcaaccctaatgacagatgaggtatttcatgatgttgcctataaagctaaagatcgtaatgacttggtatcaggaattgatgagtttctggatcaggttactgttctccctcctggagaatgggatccaagcattcgaatagagcctcccaaaaatgttccttcccaggagaagaggaagattcctgctgtaccaaatggaacagcagctcatggggaagcagagccccacggaggacatagtggacctgaactccagcgaactggaaggatttttgggggacttattttagatatcaaaagaaaagctccatacttctggagtgacttcagagatgctttcagcctgcagtgcttagcatcttttctatttctctactgcgcgtgtatgtctcctgtcatcacgtttggaggactgctgggagaagcaactgaagggcgtataagtgcaattgaatctctctttggagcatccatgaccgggatagcctattctctctttggtggacagcctcttaccatattaggcagtacaggaccagttttggtgtttgaaaagattttgtttaaattttgcaaagaatatgggctgtcatacctatctttaagagctagcattggactttggactgcaactctatgtatcatacttgtggccacagatgctagttcccttgtctgctacatcactcggtttactgaagaagcttttgcttccctgatttgcatcattttcatttatgaggccctggagaagttgtttgaactcagtgaagcatatccaatcaacatgcataatgatctggaactgctgacacaatactcgtgtaactgtgtggaaccgcataatcccagcaatggcacattgaaggaatggagggaatccaatatttctgcctctgacataatttgggagaacctaactgtgtcagaatgcaaatcattgcatggagagtatgttggacgggcctgtggccatgatcacccatatgttccagatgttctattttggtctgtgatcctgttcttttccacagttactctgtcagccaccctgaagcagttcaagactagcagatattttccaaccaaggttcgatccatagtgagtgactttgctgtctttcttacaattctgtgtatggttttaattgactatgccattgggatcccatctccaaaactacaagtaccaagtgttttcaagcccactagagatgatcgtggctggtttgttacgcctttaggtccaaacccatggtggacagtaatagctgctataattccagctctgctttgtactattctaatttttatggaccaacagattacagctgtcatcatcaacaggaaagagcataagctaaagaaaggttgtgggtaccatctggacctattaatggtggctgtcatgctcggtgtatgctccatcatgggcctgccatggtttgtggctgccacagtcctctccatcactcatgtcaatagcctaaaactggaatcagaatgctcagctccaggagaacaacccaaatttctcggcattcgggagcaaagggttactgggcttatgatttttattcttatgggttcatcagtctttatgaccagtattctgaagtttattcccatgccagtgctatatggagtgtttctttatatgggtgcttcatctctaaagggaattcagttctttgataggataaagctcttctggatgccggcaaaacatcaaccagattttatatacctaaggcacgtaccgcttcgaaaagtgcatctcttcacaattattcagatgagttgccttggccttttgtggataataaaagtttcaagagctgctattgtctttcccatgatggtgttagccctggtatttgtaagaaagttgatggacttgttgttcacgaagcgggaactcagctggttggatgatttgatgcccgagagtaagaaaaagaaactggaagatgctgaaaaagaagaagaacaaagtatgctagctatggaagatgagggcacagtacaactcccattggaagggcactatagagatgatccatctgtgatcaatatatctgatgaaatgtcaaagactgccttgtggaggaaccttctgattactgccgataactcaaaagataaggagtcaagctttccttccaaaagctccccttcctaatcactctagaagctgattccccaaagcattgaaagccgaaaagagaagaaagctgactcagggaaaggtgttgacagggagacttgtctatgactcgatcttcaatttattttttacatatatatgagaagagtgtcacaattattaataaaactgctttgatcatgtattgtaaattctgtccctcaacccaaatccaccttcatactgtaagtagtgcaatacttgtttcatttctgtgtttaaacttctgagcagtgagacatccctgtgagcagatacaatagccaatgcaagaatctgtgtgttccttgctgtacgttagacatttgtaaactggattctgattgtcagttttatgagagcaatagcttccttaaagagataagtcatatttacctagtttgtattttcctactttagtgacctgaagatgcctgataatttcattcagaagaatttttgaaaggtagtcttacttctttttagtttttatagcttagcattagtgacttatttcaaaagacccaaatcaaaaagttagtttgaaagcattttttaataattgtatttatgcatttccttgatttaatatgataaatttaatacttaacaatttatatgtaactaaaacttaaagtcatttgaaaaatatatagaaacctatttacaacttgttaaggacaatcagacataatgcagagttaagtagtatttgcttaaaattcaagttgtgactaatgatcaaatactaggcttgtacgaaatgctttagaaaaactttgtaacagttttgtgggatttttcaatataaacctttatcagaaatatactaagtttgtctcccactgacaacagatgttttccaaataaacatattctatacatacttgtggaatgccacatggtgaatcattgtatatgaaattccactcctgtacagttactctgcagctaatggtcatgcactgcttaatgctggtcctgaatcatgttctcatgttagaccaacagctctccaattgtcattttttttctgcagagttttttttttccacttttaaattaaatgcatgttgtggaaaaacagtcttttaaaatgaaatttcagattccatttgagaaggttctgtagatatttcagtccatataaaataatacatctttactaaacttatataaggggagagaaagttatgaagttttggacattactaaaagtacagtatttgatttcactttcaatgaatgtgaagttaataaaactaaatctcataatgctcttggttcctaagaatgagtagtaatcatcaactttataatactccaatattccgttttataataattcagagccctgtggcttttacacaccgttaattatgtactctgttggaagtgcacatgaaaagtgaagaaaagttcctcttgtgattaaactaatgggaggaaataaatcaacaaagtctccattaagttctacattttgagaccttttaaaaattcccctcacaattctttaaggagcccccctttttatggaacatgagcctaaaaattatagaaagaagaattttaagttaataaagtttgtatttataaatgctgaaaaaatacagaaactttctgttccaaatgtgttgcctttgtgtattttataatacagatactacattgtaaacatttccattgttttatgatttagccagtgattccccaaagcagcctcttagtgttttaatatattaataactgttttgttaaaaatgatcatagtgaatttaaatcttcacatgatcacctatttgaataagcaatcatatccaatgaaattctgtatttctgagtatttttatagtcattttgttcttgtgtgaattttaaagctatccctatgttaatcctaatattttgaaatcatataaaatataataaaaatgtagtattatatatttacttctaatttcagattcctggtcaaaattactaaatatcttgaatgtaatttagtgccaagtttaaataatgtgtaaatgtgactaggatattgtgtttttcacaattaagaaatgttatgtggaaataaatatttatcctaacttccttgcacattttaaattgtgatacaaa

SEQ ID NO: 300393 - protein, 1105 aa, Artificial Sequence
  derived and/or modified sequence
MEIKDQGAQMEPLLPTRNDEEAVVDRGGTRSILKTHFEKEDLEGHRTLFIGVHVPLGGRKSHRRHRHRGHKHRKRDRERDSGLEDGRESPSFDTPSQRVQFILGTEDDDEEHIPHDLFTELDEICWREGEDAEWRETARWLKFEEDVEDGGERWSKPYVATLSLHSLFELRSCILNGTVLLDMHANTLEEIADMVLDQQVSSGQLNEDVRHRVHEALMKQHHHQNQKKLTNRIPIVRSFADIGKKQSEPNSMDKNGQVVSPQSAPACVENKNDVSRENSTVDFSKVDLHFMKKIPPGAEASNILVGELEFLDRTVVAFVRLSPAVLLQGLAEVPIPTRFLFILLGPLGKGQQYHEIGRSIATLMTDEVFHDVAYKAKDRNDLVSGIDEFLDQVTVLPPGEWDPSIRIEPPKNVPSQEKRKIPAVPNGTAAHGEAEPHGGHSGPELQRTGRIFGGLILDIKRKAPYFWSDFRDAFSLQCLASFLFLYCACMSPVITFGGLLGEATEGRISAIESLFGASMTGIAYSLFGGQPLTILGSTGPVLVFEKILFKFCKEYGLSYLSLRASIGLWTATLCIILVATDASSLVCYITRFTEEAFASLICIIFIYEALEKLFELSEAYPINMHNDLELLTQYSCNCVEPHNPSNGTLKEWRESNISASDIIWENLTVSECKSLHGEYVGRACGHDHPYVPDVLFWSVILFFSTVTLSATLKQFKTSRYFPTKVRSIVSDFAVFLTILCMVLIDYAIGIPSPKLQVPSVFKPTRDDRGWFVTPLGPNPWWTVIAAIIPALLCTILIFMDQQITAVIINRKEHKLKKGCGYHLDLLMVAVMLGVCSIMGLPWFVAATVLSITHVNSLKLESECSAPGEQPKFLGIREQRVTGLMIFILMGSSVFMTSILKFIPMPVLYGVFLYMGASSLKGIQFFDRIKLFWMPAKHQPDFIYLRHVPLRKVHLFTIIQMSCLGLLWIIKVSRAAIVFPMMVLALVFVRKLMDLLFTKRELSWLDDLMPESKKKKLEDAEKEEEQSMLAMEDEGTVQLPLEGHYRDDPSVINISDEMSKTALWRNLLITADNSKDKESSFPSKSIESRKEKKADSGKGVDRETCL

SEQ ID NO: 300394 - DNA, 3318 bp, Artificial Sequence
  derived and/or modified sequence
atggagatcaaggaccagggcgcccagatggagcccctgctgcccaccagaaacgacgaggaggccgtggtggacagaggcggcaccagaagcatcctgaagacccacttcgagaaggaggacctggagggccacagaaccctgttcatcggcgtgcacgtgcccctgggcggcagaaagagccacagaagacacagacacagaggccacaagcacagaaagagagacagagagagagacagcggcctggaggacggcagagagagccccagcttcgacacccccagccagagagtgcagttcatcctgggcaccgaggacgacgacgaggagcacatcccccacgacctgttcaccgagctggacgagatctgctggagagagggcgaggacgccgagtggagagagaccgccagatggctgaagttcgaggaggacgtggaggacggcggcgagagatggagcaagccctacgtggccaccctgagcctgcacagcctgttcgagctgagaagctgcatcctgaacggcaccgtgctgctggacatgcacgccaacaccctggaggagatcgccgacatggtgctggaccagcaggtgagcagcggccagctgaacgaggacgtgagacacagagtgcacgaggccctgatgaagcagcaccaccaccagaaccagaagaagctgaccaacagaatccccatcgtgagaagcttcgccgacatcggcaagaagcagagcgagcccaacagcatggacaagaacggccaggtggtgagcccccagagcgcccccgcctgcgtggagaacaagaacgacgtgagcagagagaacagcaccgtggacttcagcaaggtggacctgcacttcatgaagaagatcccccccggcgccgaggccagcaacatcctggtgggcgagctggagttcctggacagaaccgtggtggccttcgtgagactgagccccgccgtgctgctgcagggcctggccgaggtgcccatccccaccagattcctgttcatcctgctgggccccctgggcaagggccagcagtaccacgagatcggcagaagcatcgccaccctgatgaccgacgaggtgttccacgacgtggcctacaaggccaaggacagaaacgacctggtgagcggcatcgacgagttcctggaccaggtgaccgtgctgccccccggcgagtgggaccccagcatcagaatcgagccccccaagaacgtgcccagccaggagaagagaaagatccccgccgtgcccaacggcaccgccgcccacggcgaggccgagccccacggcggccacagcggccccgagctgcagagaaccggcagaatcttcggcggcctgatcctggacatcaagagaaaggccccctacttctggagcgacttcagagacgccttcagcctgcagtgcctggccagcttcctgttcctgtactgcgcctgcatgagccccgtgatcaccttcggcggcctgctgggcgaggccaccgagggcagaatcagcgccatcgagagcctgttcggcgccagcatgaccggcatcgcctacagcctgttcggcggccagcccctgaccatcctgggcagcaccggccccgtgctggtgttcgagaagatcctgttcaagttctgcaaggagtacggcctgagctacctgagcctgagagccagcatcggcctgtggaccgccaccctgtgcatcatcctggtggccaccgacgccagcagcctggtgtgctacatcaccagattcaccgaggaggccttcgccagcctgatctgcatcatcttcatctacgaggccctggagaagctgttcgagctgagcgaggcctaccccatcaacatgcacaacgacctggagctgctgacccagtacagctgcaactgcgtggagccccacaaccccagcaacggcaccctgaaggagtggagagagagcaacatcagcgccagcgacatcatctgggagaacctgaccgtgagcgagtgcaagagcctgcacggcgagtacgtgggcagagcctgcggccacgaccacccctacgtgcccgacgtgctgttctggagcgtgatcctgttcttcagcaccgtgaccctgagcgccaccctgaagcagttcaagaccagcagatacttccccaccaaggtgagaagcatcgtgagcgacttcgccgtgttcctgaccatcctgtgcatggtgctgatcgactacgccatcggcatccccagccccaagctgcaggtgcccagcgtgttcaagcccaccagagacgacagaggctggttcgtgacccccctgggccccaacccctggtggaccgtgatcgccgccatcatccccgccctgctgtgcaccatcctgatcttcatggaccagcagatcaccgccgtgatcatcaacagaaaggagcacaagctgaagaagggctgcggctaccacctggacctgctgatggtggccgtgatgctgggcgtgtgcagcatcatgggcctgccctggttcgtggccgccaccgtgctgagcatcacccacgtgaacagcctgaagctggagagcgagtgcagcgcccccggcgagcagcccaagttcctgggcatcagagagcagagagtgaccggcctgatgatcttcatcctgatgggcagcagcgtgttcatgaccagcatcctgaagttcatccccatgcccgtgctgtacggcgtgttcctgtacatgggcgccagcagcctgaagggcatccagttcttcgacagaatcaagctgttctggatgcccgccaagcaccagcccgacttcatctacctgagacacgtgcccctgagaaaggtgcacctgttcaccatcatccagatgagctgcctgggcctgctgtggatcatcaaggtgagcagagccgccatcgtgttccccatgatggtgctggccctggtgttcgtgagaaagctgatggacctgctgttcaccaagagagagctgagctggctggacgacctgatgcccgagagcaagaagaagaagctggaggacgccgagaaggaggaggagcagagcatgctggccatggaggacgagggcaccgtgcagctgcccctggagggccactacagagacgaccccagcgtgatcaacatcagcgacgagatgagcaagaccgccctgtggagaaacctgctgatcaccgccgacaacagcaaggacaaggagagcagcttccccagcaagagcatcgagagcagaaaggagaagaaggccgacagcggcaagggcgtggacagagagacctgcctgtag

SEQ ID NO: 300395 - DNA, 3318 bp, Artificial Sequence
  derived and/or modified sequence
atggagattaaggatcaaggtgcgcagatggagccgctacttccaactagaaatgatgaagaggcggttgttgacagaggcggtactaggagcattttgaaaacccactttgagaaggaggatctcgaggggcacaggactttatttattggcgttcacgttcctttgggcggcaggaagagccaccggaggcatcggcaccgcgggcataaacaccgcaaaagagaccgcgagagggacagcggattggaggatggcagagagagcccctccttcgatacgccatctcagagggtgcagtttattctgggtactgaagatgacgacgaggaacacatcccgcatgatctgttcacagaactcgacgaaatctgctggcgcgaaggggaggacgctgaatggcgcgagacagcgcggtggctcaagtttgaggaagatgttgaggacgggggagagcggtggtcaaagccatacgtggcaactctgagtctgcacagtctcttcgagcttcgatcttgcatcttgaacgggacagtcctgctagacatgcatgccaacaccttggaagaaattgcggatatggtgctggaccagcaggtctctagtgggcaactgaacgaggacgtgaggcatcgagtgcatgaagctctcatgaaacagcatcaccatcaaaaccagaagaagttgaccaaccgtattccaatcgtaagatcatttgctgacattgggaagaaacaaagcgagcctaactccatggacaaaaatggtcaagtcgtaagtccccagagcgctcccgcatgcgtggagaacaagaacgatgtgagcagggagaactcaacagttgacttttccaaggtcgacctgcacttcatgaagaagattccacccggcgccgaggcatccaatatactggttggcgagttggaatttttggatcgcaccgtggttgctttcgtgagactttcacccgccgtgttactccagggcttagcagaggtgccgattccaactaggttcttgtttatcctcctggggccactgggtaaaggacaacagtaccatgagatcgggagaagtatcgccacactgatgacggacgaagtcttccacgacgttgcatacaaggcgaaggatcgcaacgatctggtctccggaatcgacgaatttctcgatcaagtaactgtcctgccgcccggcgagtgggacccctccataagaattgaaccccctaaaaatgtgccgagtcaggagaagcggaagatccccgccgtccccaacgggactgccgcccatggggaagccgaaccacacggcggccacagcggtccagagctacagagaactggacggatcttcggcggtctgattctcgatatcaaacgcaaagctccctatttttggagcgatttccgtgacgcgtttagtctccagtgtctcgctagtttcctgtttctttactgcgcctgcatgtcccccgtgattaccttcggggggttgcttggggaggcaaccgagggacgaatctcagcaattgaaagcctgttcggcgcctccatgacaggaatagcatacagtctgtttggagggcagccactgacaatactcggctcaacaggacccgtgctagtgtttgagaaaattctgtttaagttctgtaaggaatatggtctatcatacctaagcctgcgagcaagcatcgggctgtggaccgctacactgtgtattatcttggtggcaactgacgcttcatctctagtctgttacatcacccgctttaccgaagaggccttcgcgtctctgatttgcattatcttcatctacgaagcattggaaaagctgtttgagctgtctgaggcataccccattaacatgcataacgacctggagcttctcactcagtatagctgtaattgcgtggaacctcataatccatccaatggtactctcaaggaatggagagaatccaacatctccgcaagcgatatcatatgggaaaatttgacagtctcagagtgtaagagccttcatggggaatacgttgggagggcctgtgggcatgaccacccttacgtcccagacgtcctgttctggagtgtgatcttgttcttctctactgtgactttgagtgctaccctaaagcagttcaaaacttcccggtattttcccaccaaggtcaggtctatcgtgtccgattttgctgttttccttaccatcctctgtatggtgctcatagattatgccatcgggattccgagcccaaagctgcaggtgccctccgtctttaaacccacgcgcgatgatcggggttggtttgtgaccccattggggcctaacccctggtggaccgtcatcgccgcaattatccccgcccttctttgcactatattaatctttatggatcaacagatcacggccgtgataatcaaccgaaaggaacacaagctaaaaaagggctgtggctaccacctcgacctgctgatggtggcggtgatgttaggcgtgtgcagtatcatgggcctgccttggttcgtagccgccaccgtgctctctattactcacgtgaatagcttaaaactcgaatctgagtgcagcgcccccggagaacaaccgaagttcctgggcattagagaacagagggttaccggcttgatgattttcattttaatgggcagtagtgtcttcatgacttctattctcaagttcattcctatgcctgtcttgtacggcgtcttcttgtatatgggggcatccagtctcaaaggtatacagttctttgataggattaagttgttttggatgccagccaaacatcagcccgactttatctacctacggcatgtgcccctgcgaaaagtgcacctattcactattatccagatgtcgtgtcttggactgctgtggattattaaggtgtctcgggccgctattgtctttcctatgatggttctggctcttgtctttgtacgcaagctgatggatttgctgttcacgaaaagggagttaagttggcttgacgatctaatgccggagtccaagaagaaaaagctcgaggacgcggagaaagaagaggagcagtctatgctcgctatggaggacgaaggcaccgttcagctgcccctggaagggcactatcgtgacgatccgagcgttattaacatcagcgatgaaatgagtaaaacagcactgtggcgcaatctactcatcacagctgacaattcaaaggataaggaatctagcttccctagtaaaagtatcgagtcacgaaaggagaaaaaggctgattcaggcaagggcgtcgacagagagacttgcctctag

SEQ ID NO: 300396 - DNA, 3318 bp, Artificial Sequence
  derived and/or modified sequence
atggagatcaaggaccagggcgcccagatggagcccctgctgcccaccagaaatgatgaggaggccgtggtggacagaggaggcaccaggagcatcctgaagacccactttgagaaggaggacctggagggccacaggaccctcttcatcggcgtgcacgtgcccctgggcggcaggaagagccacagaagacaccgccaccggggccacaagcacaggaagagggaccgggagcgggacagcggcctggaggatggccgggagagccccagctttgacacccccagccagagggtgcagttcatcctgggcacagaagatgatgatgaggagcacatcccccatgacctcttcacagagctggatgagatctgctggagggagggggaggatgctgagtggagggagacagcccgctggctgaagtttgaagaagatgtggaggatggaggagagcgctggagcaagccctacgtggccaccctgagcctgcacagcctgtttgagctgcggagctgcatcctgaatggcaccgtgctgctggacatgcacgccaacaccctggaggagattgctgacatggtgctggaccagcaggtgagcagcggccagctgaatgaagatgtgcgccaccgggtgcatgaggccctgatgaagcagcaccaccaccagaaccagaagaagctgaccaaccgcatccccatcgtgcgcagctttgctgacatcggcaagaagcagagcgagcccaacagcatggacaagaatggccaggtggtgagcccccagagcgccccagcctgtgtggagaacaagaatgatgtgtcccgggagaacagcacagtggacttcagcaaggtggacctgcacttcatgaagaagatccccccaggagctgaggccagcaacatcctggtgggggagctggagttcctggacagaacagtggtggcctttgtgcggctgagccctgctgtgctgctgcagggcctggccgaggtgcccatccccacccgcttcctgttcatcctgctgggccccctgggcaagggccagcagtaccacgagatcggccgcagcatcgccaccctgatgacagatgaggtgttccatgatgtggcctacaaggccaaggacagaaatgacctggtgtctggaattgatgagttcctggaccaggtgacagtgctgcccccaggagagtgggaccccagcatcagaattgagccccccaagaatgtgcccagccaggagaagaggaagatcccagctgtgcccaacggcacagctgcccatggagaggccgagccccatggaggccacagcggccctgagctgcagaggacaggccgcatctttggaggcctcatcctggacatcaagaggaaggccccctacttctggagcgacttcagagatgccttcagcctgcagtgcctggccagcttcctgttcctgtactgtgcctgcatgagccctgtgatcaccttcggcggcctgctgggggaggccacagagggccgcatcagcgccatcgagagcctgtttggagcctccatgacaggcatcgcctacagcctgtttggaggccagcccctgaccatcctgggcagcacaggccctgtgctggtgtttgagaagatcctcttcaagttctgcaaggagtatggcctgagctacctgagcctgcgggccagcatcggcctgtggacagccaccctgtgcatcatcctggtggccacagatgccagcagcctggtgtgctacatcacccgcttcacagaggaggcctttgccagcctcatctgcatcatcttcatctatgaggccctggagaagctgtttgagctgtctgaggcctaccccatcaacatgcacaatgacctggagctgctgacccagtacagctgcaactgtgtggagccccacaaccccagcaatggcaccctgaaggagtggagggagagcaacatcagcgccagtgacatcatctgggagaacctgactgtgtctgagtgcaagagcctgcacggggagtatgtgggccgggcctgtggccatgaccacccctacgtgcctgatgtgctcttctggagcgtcatcctcttcttcagcacagtgaccctgagcgccaccctgaagcagttcaagaccagccgctacttccccaccaaggtgcgcagcatcgtgtctgactttgctgtgttcctgaccatcctgtgcatggtgctgattgattatgccatcggcatccccagccccaagctgcaggtgcccagcgtcttcaagcccaccagagatgaccggggctggtttgtgacccccctgggccccaacccctggtggacagtgattgctgccatcatcccagccctgctgtgcaccatcctgatcttcatggaccagcagatcacagctgtgatcatcaacaggaaggagcacaagctgaagaagggctgcggctaccacctggacctgctgatggtggccgtgatgctgggcgtgtgcagcatcatgggcctgccctggtttgtggccgccaccgtgctgagcatcacccacgtgaacagcctgaagctggagagcgagtgcagcgcccctggagagcagcccaagttcctgggcatccgggagcagagggtgacaggcctgatgatcttcatcctgatgggcagcagcgtcttcatgaccagcatcctgaagttcatccccatgcctgtgctgtatggagtcttcctgtacatgggcgccagcagcctgaagggcatccagttctttgaccgcatcaagctgttctggatgcctgccaagcaccagcctgacttcatctacctgcggcacgtgcccctgaggaaggtgcacctgttcaccatcatccagatgagctgcctgggcctgctgtggatcatcaaggtgtcccgggccgccatcgtgttccccatgatggtgctggccctggtgtttgtgaggaagctgatggacctgctcttcaccaagcgggagctgtcctggctggatgacctgatgcctgagagcaagaagaagaagctggaggatgctgagaaggaggaggagcagagcatgctggccatggaggatgagggcaccgtgcagctgcccctggagggccactacagagatgaccccagcgtcatcaacatcagtgatgagatgagcaagacagccctgtggaggaacctgctgatcacagctgacaacagcaaggacaaggagagcagcttccccagcaagagcattgagagcaggaaggagaagaaggctgacagcgggaaaggagtggaccgggagacctgcctgtag

SEQ ID NO: 300397 - DNA, 3318 bp, Artificial Sequence
  derived and/or modified sequence
atggagatcaaggaccagggcgcccagatggagcccctgctgcccacacggaacgacgaggaagctgtggtcgacagaggaggtacccgttctattctgaaaactcacttcgagaaagaggacctcgaaggccacagaactctgttcattggtgtccacgtgccactgggtgggaggaagtcccacaggagacacaggcaccgcggtcacaagcacaggaagcgagacagagagagagactcgggactcgaggatgggagagagagtccctcttttgacactccttctcagcgcgtgcaatttattctcggaaccgaggatgacgatgaggagcatatacctcatgacttattcacagagcttgatgagatatgttggcgcgaaggggaggacgcggaatggcgagagactgcccgctggctgaaattcgaggaagacgtggaggatgggggcgaaagatggtctaagccatacgtggcgaccttatctttacactcactctttgagttaaggtcatgcatcctgaacggtaccgtcttattagatatgcacgcaaatacactggaggagatcgccgacatggtcctcgaccagcaggtctcctccggacagctgaacgaagatgtgcgacaccgtgtacacgaagccctcatgaagcagcaccatcatcagaatcagaaaaaactgaccaacagaattcccattgtgcgatcgtttgcagacattgggaaaaagcagtccgaaccaaacagcatggataagaatggccaggtggtgtcccctcaaagcgctcctgcatgtgtggagaataaaaacgatgtctccagagagaatagtactgtcgacttttctaaggttgatttacattttatgaagaagataccgcccggagcggaagcaagcaacatactggtgggagaactagaattcctcgaccgtacggtcgtggcgttcgtgagattgagcccggcggttctgttgcaaggactggcggaagttcccatacccacccgctttttgttcattctgcttggtccactaggcaaaggccaacagtaccacgaaatcggccgaagcattgctaccctcatgacagacgaagtgtttcacgacgtggcctacaaggcaaaagatagaaatgacctagtgtctgggatcgacgaattcctcgaccaggtgacagtgcttccgcctggggagtgggacccctccatccggatcgagccccctaaaaatgtgcccagccaggagaaacggaagattccagctgttcccaacgggaccgccgctcatggggaggcagaacctcacggcgggcactctggccccgagttgcagagaactggcagaatttttggagggctgatcctcgatatcaagcgtaaagcaccctatttctggtcagatttcagggacgcgttctctttgcagtgcctcgctagttttctgttcctgtactgtgcctgcatgagccccgtgatcacgtttggaggcctgctaggcgaggccacagagggccgaatcagcgcgatcgaatcgcttttcggtgcaagcatgacgggcatcgcgtacagtctgtttggagggcaaccgttgactatcctcgggagtacaggaccagtgttggttttcgagaaaatcctgtttaagttctgcaaggaatacgggctatcttacctctcactcagggcttccattgggctgtggacagccacactctgcatcattctggtcgccacagatgcatcatctctcgtgtgttatatcaccagatttacggaagaagcatttgcatcgcttatttgcatcatcttcatatacgaggcccttgagaaactgtttgaacttagtgaggcttatcccattaatatgcataacgatcttgagctactgacccagtattcgtgcaattgtgtggagccacacaatccatctaacgggactcttaaagagtggagagaatcaaatattagtgcttctgatataatctgggagaacctgactgtttcagagtgtaaatcactgcacggcgaatacgtgggccgcgcctgcgggcatgatcacccctatgtccctgacgtcctgttttggtccgtaatacttttcttctctaccgtcaccctgtcggcaaccctgaagcagtttaagactagcagatacttccctactaaagtacgcagcattgtaagtgattttgcagtgtttttaaccatcttgtgtatggtgttgattgactacgcgatcggaatccccagcccaaagctgcaagtgccgtccgtcttcaagccgacaagagatgaccgcggctggtttgtgacgccgcttgggcctaacccatggtggacggtgatcgcagctatcatacccgctctcctttgcactatccttatctttatggaccagcagatcaccgcggtcattatcaataggaaagaacataagttgaaaaagggttgtggctatcacttagatcttcttatggtggccgtgatgctgggagtctgcagcattatgggattaccttggttcgtcgccgctaccgtcttgagcataacccatgtgaactcgttgaagctggaatctgagtgcagcgcaccaggcgaacaacctaagtttctgggaattcgagagcagcgcgtgacaggtttaatgattttcatactgatgggtagcagtgtattcatgacatcgattctgaagtttatccccatgcccgtcctctatggcgttttcttgtacatgggggcgagctccctgaagggaatacagttttttgatcgaattaaacttttttggatgccggcgaagcatcagcccgacttcatttacctgcgacatgtgcccctgcgcaaggtgcacctcttcacaatcattcagatgagttgtttgggcctgttgtggataataaaagttagtagagcagccatcgtcttcccaatgatggtgctagccctggtctttgtcaggaaacttatggacttactgttcaccaaaagggagctatcatggttggacgacctcatgcctgaaagcaaaaaaaaaaaactcgaggacgctgagaaagaagaggagcaatctatgttagctatggaagatgaggggaccgtccaattgccattggaaggacactaccgagacgatccgagcgtgataaatatatcggacgagatgagcaaaaccgctctttggagaaacctcctcataacagcagataattcgaaagacaaggagtcttcctttccttcaaaatcaattgagtcgcgtaaggaaaaaaaagccgactcggggaagggcgtggatcgagagacctgtttatag

SEQ ID NO: 300398 - DNA, 3318 bp, Artificial Sequence
  derived and/or modified sequence
atggagatcaaggaccagggagctcagatggaaccactcctgcctactcgaaacgatgaggaggccgtggtggacaggggaggtacccgttcaatccttaaaacacattttgagaaagaggatctcgagggtcatcggaccctgttcattggggtccacgtgccgcttgggggaagaaaaagccacagacgacaccggcacagaggtcacaagcatagaaagagagatcgcgagcgcgactcagggttagaggacggccgagagtccccctcctttgacactccctcacagagagtgcagttcattctgggcacagaggacgacgatgaagagcacataccccacgatttgtttacagagttggacgaaatctgctggagggaaggggaagacgcggaatggcgggaaactgcccgatggctcaaatttgaagaggatgtggaagacggaggcgaaaggtggtcgaagccatatgtagctactctttctctgcactccctgttcgaattgcgaagttgcatactgaacggaaccgttctgctcgacatgcacgcgaacaccttggaggaaattgcagatatggtcctcgaccagcaggtgagtagcggacagctcaatgaggacgtgcggcaccgagtgcacgaggccctgatgaaacaacaccatcaccaaaaccagaagaagctgactaatcgcattccaatcgtgaggtcctttgcagacatcggaaagaagcagtccgaacccaactctatggacaaaaatggacaggtcgtcagtcctcagagtgcccctgcctgcgtggagaataagaatgacgtgagtagggaaaatagtactgtggatttctctaaagtcgacctgcactttatgaaaaagatcccaccgggagcagaggcttccaatatactagtcggggagttagagtttcttgatcgcacagttgtcgctttcgtacggctttctcctgcagtcttattacagggactggcggaagtccccataccaactcgattcttgttcatcctgctgggaccattggggaaggggcagcagtatcacgaaataggaagaagcatcgctactctgatgaccgacgaggtctttcatgacgtcgcctataaagcaaaagatcggaacgatctggtgtccggcattgatgaattcctggaccaagtaaccgtgctgccccctggggagtgggacccatcaatcaggatcgagcccccaaagaacgtcccatctcaggagaagcgaaagattccagccgttcccaatggcactgccgcacacggtgaagccgaacctcacggtggtcattccggcccagagctgcagcggacgggacggatctttggcggactgatcttggacattaagcggaaagccccatacttttggtccgactttagagacgcatttagcctccaatgtctagcatctttcctctttctgtattgcgcctgcatgagccccgtcatcaccttcgggggacttctcggggaggctaccgagggtcggatctcagccattgagtcactctttggtgcctcaatgacggggatcgcctattcactgtttggaggacagcccctgaccattctcgggagcacaggccctgtcttggtcttcgagaaaattctgtttaaattttgtaaagaatacggcttaagttacttgtctctccgtgcctctattggactatggaccgcgacactgtgtatcatccttgtcgcaactgacgcttccagtctagtgtgctacattacaaggtttactgaggaagcttttgcctcactgatttgcatcatcttcatctacgaggccctagaaaagttatttgagctgtccgaagcctaccccatcaatatgcacaacgacctggagctactgacacagtacagctgtaactgcgtggaaccacacaacccctctaatggcaccctaaaagagtggagggaatccaatatcagcgcatctgacatcatctgggagaatttgacagtcagcgaatgcaagtctctgcacggcgaatacgtcggtagggcttgtggacacgaccacccttacgttccggatgtgctgttctggtcggtgattttattcttctctacggtcacattgagcgctacattaaagcagttcaaaaccagcaggtatttcccaacaaaggttagaagtatcgtctccgatttcgccgtctttttgaccattctgtgcatggtgttaatcgactacgcaattgggatcccttcacctaagctccaagttccctccgtgttcaagcctactcgggatgacagagggtggtttgtcacccctttaggccctaacccatggtggactgttattgccgcaatcatacctgcgcttctgtgcacaatccttatcttcatggaccagcagattaccgccgtgatcatcaaccgtaaagagcacaaactgaagaaggggtgcggctaccatttggatcttctgatggtggctgtgatgctgggtgtttgttccatcatgggtctgccctggttcgtagcagccacagtgttgagcataacgcacgtcaacagtttaaagctggaaagcgagtgttcagctcccggtgagcaacctaaattcttggggattcgcgagcagcgcgtgacaggcctaatgatattcatactgatgggaagttccgtgtttatgaccagcatcctgaaattcattccaatgccagtcctgtatggggtgtttctgtacatgggggcatcctcactgaaaggaatccagttctttgacagaatcaagctcttctggatgcctgccaagcatcaaccagattttatttacctgcggcacgtccccttgaggaaggtccatctgtttaccatcatccagatgagttgtttaggcctgttatggatcattaaggtatcgcgcgctgcaatcgtattcccaatgatggttctggcccttgtgtttgtgcgcaaacttatggaccttttatttacaaagcgggagctgtcctggcttgatgacctgatgcctgaatctaagaaaaagaaactggaggacgcggagaaggaagaagagcagtctatgctggccatggaggatgaaggcacagtgcaattgccactggagggacactaccgggatgacccttcagttatcaacatcagcgatgagatgagtaagactgccctgtggagaaacctccttataaccgccgacaacagtaaggacaaagagagtagctttcctagcaagtccatcgaatctcgcaaagaaaagaaggcggactctggcaaaggtgtggatcgagagacctgcctgtag

SEQ ID NO: 300399 - DNA, 3411 bp, Artificial Sequence
  derived and/or modified sequence
gatccgaatactaagcagagcgagtgccgggctgagtgtaagacactgaagacactgcagagcaaggtgcttattccagaggcgttacaaaacatggagattaaagaccagggagcccaaatggagccgctgctgcctacgagaaatgatgaagaagcagttgtggatagaggtggaactcgttctattctcaaaacacactttgagaaagaagatttagaaggtcatcgaacactatttattggagtacatgtgcccttgggaggaagaaaaagccatcgacgtcacaggcatcgtggtcataaacacagaaagagagacagagaaagagattcaggattagaggatggaagggagtcaccttcttttgacaccccatcacagagggtacagtttattcttggaaccgaggatgatgacgaggaacacattcctcatgaccttttcacagaactggatgagatttgttggcgtgaaggtgaggacgctgagtggcgagaaacagccaggtggttgaagtttgaagaagatgtggaagatggaggagaaaggtggagcaagccttatgtggctactctttcattgcacagcttgtttgaattgagaagttgtattctgaatggaactgtgttgctggacatgcatgccaacactttagaagaaattgcagatatggttcttgaccaacaagtgagctcaggtcagctgaatgaagatgtacgccatagggtccatgaggcattgatgaaacagcatcatcatcagaatcagaaaaaactcaccaacaggattcccattgttcgttcctttgctgatattggcaagaaacagtcagaaccaaattccatggacaaaaatggtcaggttgtttctcctcagtctgctccagcctgtgttgaaaataaaaatgatgttagcagagaaaacagcactgttgactttagcaaggttgatctgcattttatgaaaaagattcctccaggtgctgaagcatcgaacatcttagtgggagaactggagttcttggatcgaacagtagttgcgtttgtcaggttgtctccagctgtattgcttcaaggactggctgaagtcccaatcccaaccagatttttgttcattcttctgggacccctgggaaagggtcaacagtaccatgagattggcagatcaattgcaaccctaatgacagatgaggtatttcatgatgttgcctataaagctaaagatcgtaatgacttggtatcaggaattgatgagtttctggatcaggttactgttctccctcctggagaatgggatccaagcattcgaatagagcctcccaaaaatgttccttcccaggagaagaggaagattcctgctgtaccaaatggaacagcagctcatggggaagcagagccccacggaggacatagtggacctgaactccagcgaactggaaggatttttgggggacttattttagatatcaaaagaaaagctccatacttctggagtgacttcagagatgctttcagcctgcagtgcttagcatcttttctatttctctactgcgcgtgtatgtctcctgtcatcacgtttggaggactgctgggagaagcaactgaagggcgtataagtgcaattgaatctctctttggagcatccatgaccgggatagcctattctctctttggtggacagcctcttaccatattaggcagtacaggaccagttttggtgtttgaaaagattttgtttaaattttgcaaagaatatgggctgtcatacctatctttaagagctagcattggactttggactgcaactctatgtatcatacttgtggccacagatgctagttcccttgtctgctacatcactcggtttactgaagaagcttttgcttccctgatttgcatcattttcatttatgaggccctggagaagttgtttgaactcagtgaagcatatccaatcaacatgcataatgatctggaactgctgacacaatactcgtgtaactgtgtggaaccgcataatcccagcaatggcacattgaaggaatggagggaatccaatatttctgcctctgacataatttgggagaacctaactgtgtcagaatgcaaatcattgcatggagagtatgttggacgggcctgtggccatgatcacccatatgttccagatgttctattttggtctgtgatcctgttcttttccacagttactctgtcagccaccctgaagcagttcaagactagcagatattttccaaccaaggttcgatccatagtgagtgactttgctgtctttcttacaattctgtgtatggttttaattgactatgccattgggatcccatctccaaaactacaagtaccaagtgttttcaagcccactagagatgatcgtggctggtttgttacgcctttaggtccaaacccatggtggacagtaatagctgctataattccagctctgctttgtactattctaatttttatggaccaacagattacagctgtcatcatcaacaggaaagagcataagctaaagaaaggttgtgggtaccatctggacctattaatggtggctgtcatgctcggtgtatgctccatcatgggcctgccatggtttgtggctgccacagtcctctccatcactcatgtcaatagcctaaaactggaatcagaatgctcagctccaggagaacaacccaaatttctcggcattcgggagcaaagggttactgggcttatgatttttattcttatgggttcatcagtctttatgaccagtattctgaagtttattcccatgccagtgctatatggagtgtttctttatatgggtgcttcatctctaaagggaattcagttctttgataggataaagctcttctggatgccggcaaaacatcaaccagattttatatacctaaggcacgtaccgcttcgaaaagtgcatctcttcacaattattcagatgagttgccttggccttttgtggataataaaagtttcaagagctgctattgtctttcccatgatggtgttagccctggtatttgtaagaaagttgatggacttgttgttcacgaagcgggaactcagctggttggatgatttgatgcccgagagtaagaaaaagaaactggaagatgctgaaaaagaagaagaacaaagtatgctagctatggaagatgagggcacagtacaactcccattggaagggcactatagagatgatccatctgtgatcaatatatctgatgaaatgtcaaagactgccttgtggaggaaccttctgattactgccgataactcaaaagataaggagtcaagctttccttccaaaagcattgaaagccgaaaagagaagaaagctgactcagggaaaggtgttgacagggagacttgtctatga

SEQ ID NO: 300400 - DNA, 1227 bp, Artificial Sequence
  derived and/or modified sequence
atggagatcaaggaccagggcgcccagatggagcccctgctgcccaccagaaacgacgaggaggccgtggtggacagaggcggcaccagaagcatcctgaagacccacttcgagaaggaggacctggagggccacagaaccctgttcatcggcgtgcacgtgcccctgggcggcagaaagagccacagaagacacagacacagaggccacaagcacagaaagagagacagagagagagacagcggcctggaggacggcagagagagccccagcttcgacacccccagccagagagtgcagttcatcctgggcaccgaggacgacgacgaggagcacatcccccacgacctgttcaccgagctggacgagatctgctggagagagggcgaggacgccgagtggagagagaccgccagatggctgaagttcgaggaggacgtggaggacggcggcgagagatggagcaagccctacgtggccaccctgagcctgcacagcctgttcgagctgagaagctgcatcctgaacggcaccgtgctgctggacatgcacgccaacaccctggaggagatcgccgacatggtgctggaccagcaggtgagcagcggccagctgaacgaggacgtgagacacagagtgcacgaggccctgatgaagcagcaccaccaccagaaccagaagaagctgaccaacagaatccccatcgtgagaagcttcgccgacatcggcaagaagcagagcgagcccaacagcatggacaagaacgccggccaggtggtgagcccccagagcgcccccgcctgcgtggagaacaagaacgacgtgagcagagagaacagcaccgtggacttcagcaagggcctgggcggccagcagaagggccacaccagcccctgcggcatgaagcagagacacgagaagggccccccccaccagcaggagagagaggtggacctgcacttcatgaagaagatcccccccggcgccgaggccagcaacatcctggtgggcgagctggagttcctggacagaaccgtggtggccttcgtgagactgagccccgccgtgctgctgcagggcctggccgaggtgcccatccccaccagatacttcatgatgctgcccatcaagctgaagatcgtgatgacctggtaccaggagctgatgagcttctggatcagactgctgttcagcctgctggagaacggcatccaggccttcgagtag

SEQ ID NO: 300401 - DNA, 1227 bp, Artificial Sequence
  derived and/or modified sequence
atggagatcaaggatcagggggcccagatggaacccctactacctactagaaacgacgaagaggcagtcgtggacagaggcggcactaggtcaatcttgaagacgcacttcgagaaggaggacttggagggccacaggaccctgttcattggagttcacgttccgctggggggccgcaaatctcacagacgacaccgccaccggggccataagcaccggaaacgggatagggagagggattctggcctcgaggacgggagggagagtccaagcttcgacactccgtcccagcgtgtgcaattcatcctcgggacagaagacgatgacgaggaacacatcccacacgatctctttacagaattagacgagatttgctggcgggagggggaggacgctgaatggagagagaccgcccgctggttaaaattcgaggaagacgttgaggatggtggcgaacgttggtcaaagccgtatgtcgctaccctaagtttacacagtctattcgagttgcgttcatgcattctcaatggtaccgttctgctggatatgcacgccaacactctggaagagattgctgatatggtcctcgaccagcaggtgagctccggccagctgaatgaagacgtccgtcaccgtgtgcacgaagcccttatgaaacagcatcaccaccagaaccagaagaaactgactaataggattccaatagtgaggtcattcgccgatattgggaagaagcagtccgaaccaaatagcatggataaaaatgccgggcaggttgtgtctccgcagagtgctcccgcctgcgtcgaaaataaaaatgacgtcagccgtgagaattcaactgtagattttagcaaggggcttggcgggcagcagaagggccacaccagcccatgcggcatgaaacagaggcacgagaagggtccaccccaccagcaggaacgggaagtggacctgcattttatgaagaagattcccccaggggccgaggcatcaaacatcctggtgggagagctggaatttctagaccgaacagttgttgccttcgtccgcttaagcccagctgtactgctccagggcctcgcagaggtccctatccccacaagatattttatgatgctgccaatcaaattgaaaattgtgatgacatggtaccaggagttgatgagtttttggatccgtctgctgttctctctccttgagaacgggatccaggctttcgaatag

SEQ ID NO: 300402 - DNA, 1227 bp, Artificial Sequence
  derived and/or modified sequence
atggagatcaaggaccagggcgcccagatggagcccctgctgcccaccagaaatgatgaggaggccgtggtggacagaggaggcaccaggagcatcctgaagacccactttgagaaggaggacctggagggccacaggaccctcttcatcggcgtgcacgtgcccctgggcggcaggaagagccacagaagacaccgccaccggggccacaagcacaggaagagggaccgggagcgggacagcggcctggaggatggccgggagagccccagctttgacacccccagccagagggtgcagttcatcctgggcacagaagatgatgatgaggagcacatcccccatgacctcttcacagagctggatgagatctgctggagggagggggaggatgctgagtggagggagacagcccgctggctgaagtttgaagaagatgtggaggatggaggagagcgctggagcaagccctacgtggccaccctgagcctgcacagcctgtttgagctgcggagctgcatcctgaatggcaccgtgctgctggacatgcacgccaacaccctggaggagattgctgacatggtgctggaccagcaggtgagcagcggccagctgaatgaagatgtgcgccaccgggtgcatgaggccctgatgaagcagcaccaccaccagaaccagaagaagctgaccaaccgcatccccatcgtgcgcagctttgctgacatcggcaagaagcagagcgagcccaacagcatggacaagaatgccggccaggtggtgagcccccagagcgccccagcctgtgtggagaacaagaatgatgtgtcccgggagaacagcacagtggacttcagcaagggcctgggcggccagcagaagggccacaccagcccctgtggcatgaagcagagacatgagaagggccccccccaccagcaggagcgggaggtggacctgcacttcatgaagaagatccccccaggagctgaggccagcaacatcctggtgggggagctggagttcctggacagaacagtggtggcctttgtgcggctgagccctgctgtgctgctgcagggcctggccgaggtgcccatccccacccgctacttcatgatgctgcccatcaagctgaagatcgtgatgacctggtaccaggagctgatgtccttctggatccggctgctcttcagcctgctggagaatggcatccaggcctttgaatag

SEQ ID NO: 300403 - DNA, 1227 bp, Artificial Sequence
  derived and/or modified sequence
atggagatcaaggaccagggcgcccagatggagcccctgctgcccaccagaaacgatgaagaggcagttgttgaccgcggaggaacgcgatcgatactgaagacccactttgagaaggaggacctcgagggtcacagaacactgttcattggagtgcatgtccctctgggcggccgaaagtcacatcggaggcacaggcaccgcggtcataaacacagaaagagggaccgcgagagggactccggtctcgaggatggccgtgagagcccttctttcgacaccccttcccagcgggtgcagttcattcttggcacagaggatgatgacgaggagcacataccacatgatctctttacggagctggatgagatctgctggagggagggtgaggatgcagaatggcgagaaaccgctaggtggttaaaatttgaagaggacgtcgaagatggaggcgaacgatggtccaaaccttacgtggcaactctgtctctgcattccctttttgaactccgatcatgtatcctcaacggcacagttcttctggacatgcatgctaacacattagaggagattgccgatatggtcctggaccaacaggtgtcctccggacaactcaacgaagacgtcagacaccgagtgcacgaagctctgatgaagcagcatcaccaccagaatcagaaaaagctgacgaataggataccaatcgtgagaagctttgccgatattgggaagaagcagagtgagccaaactccatggacaaaaacgccggccaggttgtgtctccccagtcggctccggcatgcgtggagaataaaaatgacgtatcaagagagaatagcacagtcgatttctctaaggggcttggcggccaacagaagggccacacaagcccctgtggaatgaaacagcgtcatgagaaaggtccccctcaccagcaggagcgggaggtggacctgcactttatgaagaaaatccctcccggtgcggaggcttctaacatccttgtgggggaattggagttccttgaccgaaccgtggtcgctttcgtccggctcagccctgcagtgctcttacaagggctggctgaagttccaatcccaacaaggtactttatgatgctgcccattaagctgaagattgtcatgacctggtatcaggagctgatgagtttctggatccggctgttgttcagccttctcgaaaacggtatccaggcattcgaatag

SEQ ID NO: 300404 - DNA, 1227 bp, Artificial Sequence
  derived and/or modified sequence
atggagattaaggaccagggggcacaaatggagcctctgctccccactaggaatgatgaggaagctgtcgtcgacagaggaggaacacgctctatcctgaagacgcactttgagaaggaggacttagagggacataggaccttgttcatcggtgtgcacgtgcctctcggaggccgtaagtctcatcgtaggcataggcacaggggccataaacatcggaaaagggaccgcgagcgcgactccggcctggaggacgggagggagtctccctcatttgacacaccttctcagcgggtgcagttcattttgggtaccgaggacgacgacgaggaacacattccacacgatctgttcactgaattggatgaaatatgctggagggagggcgaggacgccgagtggagggagaccgcccgatggctgaaatttgaagaagatgttgaagacgggggagagaggtggagcaagccttatgtggccactctctctctacattctctgttcgaattgaggtcttgcattctgaacggaacagttctgctggacatgcacgccaataccctggaggagattgccgacatggtcctggaccagcaggtgtctagtgggcagctcaatgaggatgtccgtcacagggttcacgaggccttaatgaagcagcaccatcatcagaaccagaagaaactaaccaataggatcccgatcgtgcgatcgtttgcagatatcggtaaaaaacagtcagaacccaatagtatggataagaacgctggtcaagtggtcagcccccaaagcgccccagcgtgcgttgaaaacaagaacgatgtgtcgcgagagaatagcaccgtggacttcagcaaggggctggggggacagcaaaagggccacaccagtccatgcggcatgaagcagagacatgagaaaggacctccccaccagcaggaacgtgaggttgatttacacttcatgaagaagatcccacctggggcagaggcgtcaaatattctggtgggcgagctggagtttctcgatcgcaccgtggttgcgtttgttcgattgtctccagccgttctcttgcagggcctggcagaagtgccgatacccacgagatactttatgatgctgcctattaagttgaaaattgtcatgacttggtatcaggaactgatgagtttctggatacgactgcttttctcacttctcgaaaatgggatacaagcttttgaatag

SEQ ID NO: 300405 - protein, 135 aa, Artificial Sequence
  derived and/or modified sequence
MQTFGPAGVAAVGRRVESPADRRATRACHCKLCLPAGSLQGLKGEEGSVEEAENGRDAPANGNANEENGEQEADNEVDEEEEEGGEEEEEEEEGDGEEEDGDEDEEAESATGKRAAEDDEDDDVDTKKQKTDEDD

SEQ ID NO: 300406 - DNA, 408 bp, Artificial Sequence
  derived and/or modified sequence
atgcagacatttggacccgcaggtgtggcagcagtcggacgtcgggtggagtcgccggctgacaggcgggccactcgcgcctgccactgtaagctctgccttccagccggaagtctacaagggcttaagggagaagagggtagcgttgaggaggcagaaaatgggcgtgatgcacccgctaatgggaacgcaaatgaggagaacggtgagcaggaggccgataacgaggttgatgaggaagaagaagaaggaggagaagaggaagaggaagaagaggaaggcgatggggaggaggaagacggggatgaagatgaggaggctgaatcagctacgggcaagagggctgccgaggatgacgaggacgacgacgtggacactaaaaaacaaaagaccgacgaggacgattag

SEQ ID NO: 300407 - DNA, 408 bp, Artificial Sequence
  derived and/or modified sequence
atgcagaccttcggccctgctggggtggccgctgtgggccggcgggtggagagccctgctgaccggcgggccacccgggcctgccactgcaagctgtgcctgcctgctggcagcctgcagggcctgaagggggaggagggctctgtggaggaggctgaaaatggaagagatgccccagccaatggaaatgccaatgaagaaaatggagagcaggaggccgacaatgaggtggatgaggaggaggaggagggcggggaggaggaggaggaggaggaggagggagatggagaggaggaggatggagatgaagatgaggaggccgagagcgccaccgggaagagagctgctgaagatgatgaagatgatgatgtggacaccaagaagcagaagacagatgaagatgactag

SEQ ID NO: 300408 - DNA, 408 bp, Artificial Sequence
  derived and/or modified sequence
atgcagaccttcggccccgccggcgtggccgccgtgggccggcgggtagagtcgccagccgatcgaagggcgacgagggcttgccactgcaagctgtgcctgcctgcaggctcactgcaaggcctaaagggagaagaaggaagtgtcgaggaggctgagaatgggcgtgacgcgcctgccaatggtaacgccaatgaagaaaatggtgagcaggaggcagacaatgaggtggatgaagaagaagaggaagggggtgaggaagaggaagaagaggaagaaggcgacggtgaagaagaggatggggatgaggatgaagaggctgagagtgccactggtaaaagggccgccgaggacgatgaggacgatgacgtggatacaaagaagcagaagaccgatgaagatgactag

SEQ ID NO: 300409 - DNA, 408 bp, Artificial Sequence
  derived and/or modified sequence
atgcagacgttcggtccagccggagtggccgcagttgggagacgggtggagtccccagcagatagaagggccacacgtgcatgtcactgcaaattgtgtctcccagcaggaagtctccagggcctcaagggcgaagagggcagtgtcgaagaggcagaaaatgggagagatgccccagccaacggaaacgccaatgaggagaatggagaacaggaggcagataacgaggtcgatgaagaggaagaagaagggggagaggaggaagaggaagaagaagaaggtgacggcgaggaagaagacggggacgaagacgaagaggctgagagcgccactggcaaacgcgctgccgaggatgatgaggacgatgatgtagacacaaaaaagcagaaaacagatgaagacgactag

SEQ ID NO: 300410 - DNA, 408 bp, Artificial Sequence
  derived and/or modified sequence
atgcagaccttcggccccgccggcgtggccgccgtgggcagaagagtggagagccccgccgacagaagagccaccagagcctgccactgcaagctgtgcctgcccgccggcagcctgcagggcctgaagggcgaggagggcagcgtggaggaggccgagaacggcagagacgcccccgccaacggcaacgccaacgaggagaacggcgagcaggaggccgacaacgaggtggacgaggaggaggaggagggcggcgaggaggaggaggaggaggaggagggcgacggcgaggaggaggacggcgacgaggacgaggaggccgagagcgccaccggcaagagagccgccgaggacgacgaggacgacgacgtggacaccaagaagcagaagaccgacgaggacgactag

SEQ ID NO: 300411 - DNA, 378 bp, Artificial Sequence
  derived and/or modified sequence
atgcagcccgtgatcagcgccctgaacatccagacccagaccgtgcagacccaccccgcccccagaaacaccagcgagcactgcaccctgcccgcctgcgacgcccaggaggagcacagagacaccgtggacggcagcatcgccagaaccgagagcgccagcggcgagatctggagacagacccacatggacggcgagcaccacgtgaacaccaaggccgagatcagcgtgatgagcgccaaccagggcgcccccagaatcaccagcaagccccccgaggccagaagagaggccagagacagaagcctgcccagcgccttcagcctgagaggcctgaccgacaccctgatcctgggcttctgcccccccgagctgtag

SEQ ID NO: 300412 - DNA, 1212 bp, Artificial Sequence
  derived and/or modified sequence
cgcgtgagtcccccactggctgctctgaaaagccatctttgcattgttcctcatccgcctccttgctcgccgcagccgcctccgccgcgcgcctcctccgccgccgcggactccggcagctttatcgccagagtccctgaactctcgctttctttttaatcccctgcatcggatcaccggcgtgccccaccatgtcagacgcagccgtagacaccagctccgaaatcaccaccaaggacttaaaggagaagaaggaagttgtggaagaggcagaaaatggaagagacgcccctgctaacgggaatgctgagaatgaggaaaatggggagcaggaggctgacaatgaggtagacgaagaagaggaagaaggtggggaggaagaggaggaggaagaagaaggtgatggtgaggaagaggatggagatgaagatgaggaagctgagtcagctacgggcaagcgggcagctgaagatgatgaggatgacgatgtcgataccaagaagcagaagaccgacgaggatgactagacagcaaaaaaggaaaagttaaactaaaaaaaaaaaggccgccgtgacctattcaccctccacttcccgtctcagaatctaaacgtggtcaccttcgagtagagaggcccgcccgcccaccgtgggcagtgccacccgcagatgacacgcgctctccaccacccaacccaaaccatgagaatttgcaacaggggaggaaaaaagaaccaaaacttccaaggccctgctttttttcttaaaagtactttaaaaaggaaatttgtttgtattttttatttacattttatatttttgtacatattgttagggtcagccatttttaatgatctcggatgaccaaaccagccttcggagcgttctctgtcctacttctgactttacttgtggtgtgaccatgttcattataatctcaaaggagaaaaaaaaccttgtaaaaaaagcaaaaatgacaacagaaaaacaatcttattccgagcattccagtaacttttttgtgtatgtacttagctgtactataagtagttggtttgtatgagatggttaaaaaggccaaagataaaaggtttctttttttttccttttttgtctatgaagttgctgtttattttttttggcctgtttgatgtatgtgtgaaacaatgttgtccaacaataaacaggaattttattttgctgagttgttcta

SEQ ID NO: 300413 - DNA, 811 bp, Artificial Sequence
  derived and/or modified sequence
agactgactggctctttcttaatatttcggccctcgtccgcgcccgtcgtgcccctgcagggattggcgcgagtcaccttggcgtctccttaacccttgtgtccctggcgtcatctctgactctcccaggggcgacttcttggcagagcggagctcggggcccggatctccacaggggctctcagtgaccccttctggactcagtccgggaatgagtttgtggggtgagaacaccgtccccagtgcggggcctggctgttcgattttctccgaagcaccaaaaggtgacttcccgcgagggcgatgagtagtagcccgagaggcgcatccccgacagtctcggacctacgcagcccggtggactttggggcgacctcccgtgggacttggcccgccgaatgcagacattcgggcctgccggggtggcggcagtggggcgtcgagtcgagagcccggccgaccgacgcgcgacccgcgcgtgccactgcaagctctgcctgccggccgggagtctccaaggacttaaaggagaagaaggaagtgtggaagaggcagaaaatggaagagacgcccctgctaacgggaatgctaatgaggaaaatggggagcaggaggctgacaatgaggtagacgaagaagaggaagaaggtggggaggaagaggaggaggaagaagaaggtgatggtgaggaagaggatggagatgaagatgaggaagctgagtcagctacgggcaagcgggcagctgaagatgatgaggatgacgatgtcgataccaagaagcagaagaccgacgaggatgactagacagc

SEQ ID NO: 300414 - DNA, 1221 bp, Artificial Sequence
  derived and/or modified sequence
ctggcgccgcgtgagtcccccactggctgctctgaaaagccatctttgcattgttcctcatccgcctccttgctcgccgcagccgcctccgccgcgcgcctcctccgccgccgcggactccggcagctttatcgccagagtccctgaactctcgctttctttttaatcccctgcatcggatcaccggcgtgccccaccatgtcagacgcagccgtagacaccagctccgaaatcaccaccaaggacttaaaggagaagaaggaagttgtggaagaggcagaaaatggaagagacgcccctgctaacgggaatgctaatgaggaaaatggggagcaggaggctgacaatgaggtagacgaagaagaggaagaaggtggggaggaagaggaggaggaagaagaaggtgatggtgaggaagaggatggagatgaagatgaggaagctgagtcagctacgggcaagcgggcagctgaagatgatgaggatgacgatgtcgataccaagaagcagaagaccgacgaggatgactagacagcaaaaaaggaaaagttaaactaaaaaaaaaaaggccgccgtgacctattcaccctccacttcccgtctcagaatctaaacgtggtcaccttcgagtagagaggcccgcccgcccaccgtgggcagtgccacccgcagatgacacgcgctctccaccacccaacccaaaccatgagaatttgcaacaggggaggaaaaaagaaccaaaacttccaaggccctgctttttttcttaaaagtactttaaaaaggaaatttgtttgtattttttatttacattttatatttttgtacatattgttagggtcagccatttttaatgatctcggatgaccaaaccagccttcggagcgttctctgtcctacttctgactttacttgtggtgtgaccatgttcattataatctcaaaggagaaaaaaaaccttgtaaaaaaagcaaaaatgacaacagaaaaacaatcttattccgagcattccagtaacttttttgtgtatgtacttagctgtactataagtagttggtttgtatgagatggttaaaaaggccaaagataaaaggtttctttttttttccttttttgtctatgaagttgctgtttattttttttggcctgtttgatgtatgtgtgaaacaatgttgtccaacaataaacaggaattttattttgctgagttgttctaacaaa

SEQ ID NO: 300415 - protein, 789 aa, Artificial Sequence
  derived and/or modified sequence
MRKVESRGEGGREELGSNSPPQRNWKGIAIALLVILVVCSLITMSVILLTPDELTNSSETRLSLEDLFRKDFVLHDPEARWINDTDVVYKSENGHVIKLNIETNATTLLLENTTFVTFKASRHSVSPDLKYVLLAYDVKQIFHYSYTASYVIYNIHTREVWELNPPEVEDSVLQYAAWGVQGQQLIYIFENNIYYQPDIKSSSLRLTSSGKEEIIFNGIADWLYEEELLHSHIAHWWSPDGERLAFLMINDSLVPTMVIPRFTGALYPKGKQYPYPKAGQVNPTIKLYVVNLYGPTHTLELMPPDSFKSREYYITMVKWVSNTKTVVRWLNRAQNISILTVCETTTGACSKKYEMTSDTWLSQQNEEPVFSRDGSKFFMTVPVKQGGRGEFHHVAMFLIQSKSEQITVRHLTSGNWEVIKILAYDETTQKIYFLSTESSPRGRQLYSASTEGLLNRQCISCNFMKEQCTYFDASFSPMNQHFLLFCEGPRVPVVSLHSTDNPAKYFILESNSMLKEAILKKKIGKPEIKILHIDDYELPLQLSLPKDFMDRNQYALLLIMDEEPGGQLVTDKFHIDWDSVLIDMDNVIVARFDGRGSGFQGLKILQEIHRRLGSVEVKDQITAVKFLLKLPYIDSKRLSIFGKGYGGYIASMILKSDEKLFKCGSVVAPITDLKLYASAFSERYLGMPSKEESTYQAASVLHNVHGLKEENILIIHGTADTKVHFQHSAELIKHLIKAGVNYTMQVYPDEGHNVSEKSKYHLYSTILKFFSDCLKEEISVLPQEPEEDE

SEQ ID NO: 300416 - DNA, 2370 bp, Artificial Sequence
  derived and/or modified sequence
atgcgaaaagtagaaagtaggggggaaggggggcgtgaggaactaggaagtaactcccctcctcaaaggaactggaaaggaatcgccatcgccctgctcgtaattttggtggtgtgcagcttgattactatgagtgtgattctcctgacccctgatgagctaaccaacagttctgagacacgcctgagtctcgaggacctcttcagaaaggacttcgtgttacacgatccagaggccagatggattaacgataccgatgtcgtgtacaaaagcgagaacggccacgttatcaagcttaacatcgaaaccaatgccactacccttcttttggagaacaccaccttcgtcacatttaaagctagtcgtcattctgtcagccctgacctgaagtatgttctacttgcttatgatgtaaaacagatttttcattacagctacacggcatcctatgttatttataacattcacactcgagaggtgtgggaactcaatcccccagaggtggaagattccgtgctgcagtatgccgcatggggagtccagggccaacagttgatctacatatttgagaataatatttactaccagcctgacattaagtccagctctctaagactgacgtcttccggaaaggaagagatcatttttaacgggattgcagactggctctacgaggaggaacttctccacagtcatatcgctcactggtggtctcctgatggggagcggctagcattccttatgattaacgactcgctggtgcctactatggtaatcccccggttcaccggcgccctgtatccaaagggcaagcaatacccttatccaaaagctgggcaagtaaaccctaccattaagctttatgtggttaacctgtacggccccacccacacgttagagcttatgccccccgactctttcaagtccagggaatactacataactatggttaagtgggtgagtaacactaagacagttgttagatggctgaatagggcccagaacatatccattctgacagtgtgcgagacaacaaccggagcttgctccaagaagtatgagatgacgtccgacacttggcttagccagcagaacgaggaacctgtgttttctcgagatgggtcaaaattctttatgaccgttcctgttaaacagggtgggaggggcgagttccatcacgtcgccatgtttcttatccagtccaagagcgagcagattactgtgcggcacctcacgtccggaaattgggaggtgattaagatcttggcatatgatgagacaacccagaaaatttattttttgagtacagaatcttcaccccgcggccggcagctgtattccgctagcaccgagggtctcctgaaccgccagtgtatcagctgcaactttatgaaggagcagtgtacctattttgatgcatcgttcagtccaatgaatcagcacttcctgctgttctgtgaggggccaagggtcccagtagtgagtttacattcgacagataatccggccaagtatttcatattggagagtaacagcatgcttaaagaggcaattctgaagaagaagattggcaaacctgagatcaagatcctgcacatagatgattatgagctgcctctgcagctgagcttgccgaaggactttatggaccggaaccagtatgctctgctgcttatcatggatgaggagcctggtggacagctggtaaccgataaatttcacattgactgggatagtgtcctgatcgacatggataacgttattgtcgcaagatttgacggacgggggtccggctttcaggggctgaaaattctgcaagaaattcatcgccgcttgggctcagtggaggtgaaagatcaaattaccgctgtgaaatttttgctcaagctaccctacatcgattcaaagaggctttctatattcgggaaaggatacgggggatatatcgcctcaatgattctgaaatctgatgagaagctgttcaagtgtggatctgttgtcgcgcccataaccgacctcaagctgtacgcctctgcttttagcgaacgttacctgggaatgccaagtaaggaagagtctacctaccaggctgctagcgtgctgcacaatgtccatgggctcaaagaggagaatatcctgattatccacgggactgcagacacaaaggtgcacttccagcattccgcagagctgataaagcatctgatcaaagcaggcgttaattataccatgcaagtgtaccctgacgaagggcataatgtgtccgaaaaaagtaagtaccacttatattctaccatcctgaagttttttagcgattgtctgaaggaggagatatctgtgctaccccaggagcctgaagaagacgaatag

SEQ ID NO: 300417 - DNA, 2370 bp, Artificial Sequence
  derived and/or modified sequence
atgaggaaggtggagagcagaggagagggcggccgggaggagctgggcagcaacagccccccccagaggaactggaagggcatcgccatcgccctgctggtgatcctggtggtgtgcagcctcatcaccatgtctgtcatcctgctgaccccagatgagctgaccaacagcagcgagacccggctgagcctggaggacctcttcaggaaggactttgtgctgcatgaccctgaggcccgctggatcaatgacacagatgtggtgtacaagtcagaaaatggacatgtgatcaagctgaacatcgagaccaatgccaccaccctgctgctggagaacaccacctttgtgaccttcaaggccagccgccacagcgtgtccccagacctgaagtatgtgctgctggcctatgatgtgaagcagatcttccactacagctacacagccagctatgtgatctacaacatccacacccgggaggtgtgggagctgaaccccccagaggtggaggacagcgtgctgcagtatgctgcctggggcgtgcagggccagcagctgatctacatctttgagaacaacatctactaccagcctgacatcaagagcagcagcctgcggctgaccagcagcggcaaggaggagatcatcttcaatggaattgctgactggctgtatgaggaggagctgctgcacagccacatcgcccactggtggagcccagatggagagcggctggccttcctgatgatcaatgacagcctggtgcccaccatggtgatcccccgcttcaccggggccctgtaccccaagggcaagcagtacccctaccccaaggccggccaggtgaaccccaccatcaagctgtatgtggtgaacctgtatggccccacccacaccctggagctgatgcccccagacagcttcaagagccgggagtactacatcaccatggtgaagtgggtgagcaacaccaagacagtggtgcgctggctgaacagagcccagaacatcagcatcctgactgtgtgtgagaccaccaccggggcctgcagcaagaagtatgagatgaccagtgacacctggctgagccagcagaatgaggagcccgtcttcagcagagatggcagcaagttcttcatgacagtgcctgtgaagcagggcggccgcggggagttccaccacgtggccatgttcctgatccagagcaagtctgagcagatcaccgtgcgccacctgaccagcggcaactgggaggtgatcaagatcctggcctatgatgagaccacccagaagatctacttcctgagcacagagagcagcccccggggccggcagctgtacagcgccagcacagagggcctgctgaaccggcagtgcatcagctgcaacttcatgaaggagcagtgcacctactttgatgccagcttcagccccatgaaccagcacttcctgctcttctgtgagggcccccgggtgcctgtggtgtccctgcacagcacagacaacccagccaagtacttcatcctggagagcaacagcatgctgaaggaggccatcctgaagaagaagattggcaagccagagatcaagatcctgcacattgatgattatgagctgcccctgcagctgagcctgcccaaggacttcatggacaggaaccagtatgccctgctgctgatcatggatgaggagcccggcggccagctggtgacagacaagttccacatcgactgggacagcgtgctgattgacatggacaacgtcatcgtggccaggtttgatggccggggcagcggcttccagggcctgaagatcctgcaggagatccaccggcggctgggctctgtggaggtgaaggaccagatcacagctgtgaagttcctgctgaagctgccctacatcgacagcaagaggctgagcatctttgggaagggctatggaggctacatcgcctccatgatcctgaagagtgatgagaagctgttcaagtgtggctctgtggtggcccccatcacagacctgaagctgtatgccagcgccttcagcgagcgctacctgggcatgcccagcaaggaggagagcacctaccaggccgcctctgtgctgcacaacgtgcacggcctgaaggaggagaacatcctgatcatccacggcacagctgacaccaaggtgcacttccagcacagcgctgagctgatcaagcacctgatcaaggccggcgtgaactacaccatgcaggtgtacccagatgagggccacaacgtgtctgagaagagcaagtaccacctgtacagcaccatcctgaagttcttcagtgactgcctgaaggaggagatctctgtgctgccccaggagccagaagaagatgaatag

SEQ ID NO: 300418 - DNA, 2370 bp, Artificial Sequence
  derived and/or modified sequence
atgcggaaggtggagagccggggcgagggcggccgggaggagctggggtcgaacagtcccccgcagagaaattggaaaggaatagctatcgcattactcgtgatcttggtagtttgtagtctcatcaccatgtctgtcatacttttgacacctgacgaactcacaaacagctcagagacacgactttccctcgaagatctgtttaggaaggacttcgtcctacacgatccggaggcacgatggattaatgatacagacgtcgtatacaagtcggagaacggacatgtgatcaaactgaatatcgaaacgaacgctaccaccctgttgctggaaaacactacttttgtgacctttaaagcttcccgacacagtgtgtcaccagatttaaaatatgtgcttctcgcctacgacgtaaaacagatattccactacagctacacagcttcttacgtcatttacaacattcatacccgggaagtgtgggagctgaacccgcctgaagtcgaagattctgttctccaatacgccgcttggggtgtgcaaggtcagcagctgatctacatattcgaaaataatatctactatcagccagatatcaagagctcctcactccggctaacaagttcagggaaagaagaaatcatcttcaacggcatagcagactggctgtatgaggaagagttgctgcattcccacatcgctcactggtggtctcctgacggtgagagacttgcatttctgatgatcaatgattccctggtccccacaatggtgatcccccgattcactggagccctttatccaaaaggtaagcagtatccgtatccaaaagccggacaggtcaaccccacaatcaaactctatgtggttaatctgtatggaccaacccacactctcgagctcatgccaccagactcgtttaagtctagagaatactacataaccatggtcaaatgggtgagcaacaccaaaacagtggtccggtggttaaacagagcacagaacatcagtatactgactgtgtgtgaaacaacaacaggcgcctgttccaaaaagtatgagatgacttcagatacctggctttctcagcagaatgaggagccggtgttcagtcgggatgggagcaaattcttcatgaccgtgcctgtgaaacagggggggcgcggtgagtttcatcatgttgccatgtttctgattcagtccaaatctgaacagattacagtacgccatctcacgtctggcaactgggaagtgataaagatcttggcatatgacgagacgacacaaaaaatatatttcttatcaaccgagagctcaccccgcggacggcagttgtattctgcatcaactgaaggactgctgaatcgtcaatgcatatcatgtaatttcatgaaggaacagtgcacttactttgatgcatccttcagccccatgaaccagcactttctgctattctgtgaggggcctcgtgtgccagtggtctccctccatagtacagataaccccgccaaatacttcattctggagtccaactcaatgctgaaagaggctatcctgaagaagaaaataggcaaacctgaaatcaaaatcttgcacatcgacgattatgagctgcccctacagttgagtctgcctaaggacttcatggacaggaatcaatacgccctcttgcttatcatggacgaagagcccggcggacagcttgtgaccgacaagttccacattgattgggactccgtactgatcgatatggataatgtgatagtcgctaggtttgacggtaggggttctggtttccagggcttgaagatcctgcaggagattcaccgtcggctgggttccgtggaggtgaaagatcaaatcacggctgtcaaatttttgctcaagcttccttacatagatagtaaaaggctgtccatttttggcaaaggttacggcgggtacatcgccagtatgattctgaaatctgatgagaaattatttaagtgtggaagtgttgtggcacctatcacagaccttaaactctatgcatccgcttttagtgaacgttacctgggcatgccaagtaaggaagagagtacataccaggccgccagcgtcctgcacaatgttcacggcctgaaagaagaaaacatactgatcattcacggcaccgcggacaccaaagtacactttcaacatagcgcggaactaatcaagcatctcattaaagctggagttaattataccatgcaggtttatcccgatgagggacacaatgtctctgagaaatcaaaatatcatctgtatagcactatcttaaaattctttagtgattgtctaaaggaggagatttccgtgcttccacaggaacctgaagaagacgagtag

SEQ ID NO: 300419 - DNA, 2370 bp, Artificial Sequence
  derived and/or modified sequence
atgaggaaagtggagagtaggggagaaggcggacgagaggagctgggctcaaatagtcctcctcagcgcaattggaagggtatcgccattgctctgctcgtcatactggtcgtctgcagcctgattacaatgagtgtgatactgttgactcctgacgagctgaccaattcatccgagacacgtctgtcacttgaggacctgtttaggaaggactttgtgttgcacgaccctgaggccaggtggatcaacgatactgacgtggtatacaagtccgagaatggacatgtgataaagctaaacatagaaacaaatgctactaccctgctgcttgagaacactactttcgtcacattcaaggcaagccgtcattctgtgtctccagacctgaaatacgttctgttggcatatgatgtgaaacaaatattccactattcatatacagccagctatgtgatctacaatatacatacacgagaggtatgggagctcaaccctcctgaagttgaggactccgtgctccagtatgcagcatggggtgtccaaggtcagcaattgatctacattttcgaaaataacatctactaccagcctgatatcaagagctcctcccttcggctgacatcaagcggtaaggaagagatcatctttaacgggatcgccgattggttgtacgaggaggaactgctgcacagccacatcgcgcactggtggagccccgacggcgagcgcctggcatttctcatgatcaacgactctttagtgccgacgatggtaatccccagatttaccggagctctttacccaaagggtaaacagtatccttaccctaaggccggacaggtgaatcctaccatcaagctgtacgtcgtcaacctctatggacccacccacacacttgagctcatgcctcccgactccttcaaaagccgcgaatactacattactatggtgaaatgggtcagtaatacaaaaacagtggtccgttggttgaatcgggcacagaacatttctattctgacagtttgtgaaacaacaaccggggcatgttctaaaaagtacgaaatgactagtgacacctggttaagccagcagaatgaggaacccgtttttagccgagatgggagtaaattcttcatgacagtccctgtgaagcagggcggaaggggcgagttccaccacgtggctatgtttttgattcagagcaagtcagagcagatcactgtccggcatttgaccagcgggaattgggaggttatcaaaatcttggcttacgacgagacgactcagaaaatatatttcctgtctacagagagctccccaaggggcaggcagttgtacagcgcgagtacagagggcttgctcaaccgccagtgcatcagttgtaattttatgaaggaacagtgcacctacttcgatgcaagcttctccccaatgaaccagcatttcctgctcttctgtgagggacccagagtgcctgtcgtgagcctgcacagcactgataatcccgctaagtacttcatactcgagtcaaacagcatgttaaaggaagccatccttaagaagaaaattgggaagcccgagatcaaaatcctccacatcgatgattacgaactccccctgcagttgagtctgccgaaggatttcatggatagaaatcagtatgccctgttactcatcatggatgaagaacctggcggtcaactggtgacagataagtttcacatcgattgggattccgtcctgatcgatatggacaatgtaatcgttgcacggtttgatggccgtggttccgggtttcaaggactgaagattttacaggaaatacatcgccgactggggagtgtcgaagtgaaagaccagatcactgcggtaaagttcctgttgaagcttccatacatagattcaaaaagactcagtatctttggtaaggggtatgggggatacattgcgagcatgattttgaagagtgatgaaaaattgtttaagtgtgggagcgttgtggccccaatcactgatcttaaactctatgctagtgccttttctgagcgatatctgggcatgcctagcaaggaggaatcaacataccaggctgctagtgtgttacacaatgtccatgggttgaaagaagagaatatcctaatcatccacggcacggcggacaccaaggtgcacttccagcactcagctgaacttatcaagcacctcataaaggccggagtcaattataccatgcaggtgtatcctgacgaagggcacaacgtgtccgagaagagtaagtatcatttgtattcaacaatccttaagtttttctctgactgtttgaaggaggagatttctgttctgcctcaggagccggaggaagatgagtag

SEQ ID NO: 300420 - DNA, 2370 bp, Artificial Sequence
  derived and/or modified sequence
atgagaaaggtggagagcagaggcgagggcggcagagaggagctgggcagcaacagccccccccagagaaactggaagggcatcgccatcgccctgctggtgatcctggtggtgtgcagcctgatcaccatgagcgtgatcctgctgacccccgacgagctgaccaacagcagcgagaccagactgagcctggaggacctgttcagaaaggacttcgtgctgcacgaccccgaggccagatggatcaacgacaccgacgtggtgtacaagagcgagaacggccacgtgatcaagctgaacatcgagaccaacgccaccaccctgctgctggagaacaccaccttcgtgaccttcaaggccagcagacacagcgtgagccccgacctgaagtacgtgctgctggcctacgacgtgaagcagatcttccactacagctacaccgccagctacgtgatctacaacatccacaccagagaggtgtgggagctgaacccccccgaggtggaggacagcgtgctgcagtacgccgcctggggcgtgcagggccagcagctgatctacatcttcgagaacaacatctactaccagcccgacatcaagagcagcagcctgagactgaccagcagcggcaaggaggagatcatcttcaacggcatcgccgactggctgtacgaggaggagctgctgcacagccacatcgcccactggtggagccccgacggcgagagactggccttcctgatgatcaacgacagcctggtgcccaccatggtgatccccagattcaccggcgccctgtaccccaagggcaagcagtacccctaccccaaggccggccaggtgaaccccaccatcaagctgtacgtggtgaacctgtacggccccacccacaccctggagctgatgccccccgacagcttcaagagcagagagtactacatcaccatggtgaagtgggtgagcaacaccaagaccgtggtgagatggctgaacagagcccagaacatcagcatcctgaccgtgtgcgagaccaccaccggcgcctgcagcaagaagtacgagatgaccagcgacacctggctgagccagcagaacgaggagcccgtgttcagcagagacggcagcaagttcttcatgaccgtgcccgtgaagcagggcggcagaggcgagttccaccacgtggccatgttcctgatccagagcaagagcgagcagatcaccgtgagacacctgaccagcggcaactgggaggtgatcaagatcctggcctacgacgagaccacccagaagatctacttcctgagcaccgagagcagccccagaggcagacagctgtacagcgccagcaccgagggcctgctgaacagacagtgcatcagctgcaacttcatgaaggagcagtgcacctacttcgacgccagcttcagccccatgaaccagcacttcctgctgttctgcgagggccccagagtgcccgtggtgagcctgcacagcaccgacaaccccgccaagtacttcatcctggagagcaacagcatgctgaaggaggccatcctgaagaagaagatcggcaagcccgagatcaagatcctgcacatcgacgactacgagctgcccctgcagctgagcctgcccaaggacttcatggacagaaaccagtacgccctgctgctgatcatggacgaggagcccggcggccagctggtgaccgacaagttccacatcgactgggacagcgtgctgatcgacatggacaacgtgatcgtggccagattcgacggcagaggcagcggcttccagggcctgaagatcctgcaggagatccacagaagactgggcagcgtggaggtgaaggaccagatcaccgccgtgaagttcctgctgaagctgccctacatcgacagcaagagactgagcatcttcggcaagggctacggcggctacatcgccagcatgatcctgaagagcgacgagaagctgttcaagtgcggcagcgtggtggcccccatcaccgacctgaagctgtacgccagcgccttcagcgagagatacctgggcatgcccagcaaggaggagagcacctaccaggccgccagcgtgctgcacaacgtgcacggcctgaaggaggagaacatcctgatcatccacggcaccgccgacaccaaggtgcacttccagcacagcgccgagctgatcaagcacctgatcaaggccggcgtgaactacaccatgcaggtgtaccccgacgagggccacaacgtgagcgagaagagcaagtaccacctgtacagcaccatcctgaagttcttcagcgactgcctgaaggaggagatcagcgtgctgccccaggagcccgaggaggacgagtag

SEQ ID NO: 300421 - DNA, 3052 bp, Artificial Sequence
  derived and/or modified sequence
ggctgggctcccgcgcctccctcttctcaccctcccccgccccgccccagttccaggctctcctgcttctccacggactctgcgggaagttagagcctctgcgtgcgctccggggcccggcgagaggatgcgcaaggtggagagccgcggggaagggggcagagaggaactgggaagtaacagccctccacagagaaactggaagggaattgctattgctctgctggtgattttagttgtatgctcactcatcactatgtcagtcatcctcttaaccccagatgaactcacaaattcgtcagaaaccagattgtctttggaagacctctttaggaaagactttgtgcttcacgatccagaggctcggtggatcaatgatacagatgtggtgtataaaagcgagaatggacatgtcattaaactgaatatagaaacaaatgctaccacattattattggaaaacacaacttttgtaaccttcaaagcatcaagacattcagtttcaccagatttaaaatatgtccttctggcatatgatgtcaaacagatttttcattattcgtatactgcttcatatgtgatttacaacatacacactagggaagtttgggagttaaatcctccagaagtagaggactccgtcttgcagtacgcggcctggggtgtccaagggcagcagctgatttatatttttgaaaataatatctactatcaacctgatataaagagcagttcattgcgactgacatcttctggaaaagaagaaataatttttaatgggattgctgactggttatatgaagaggaactcctgcattctcacatcgcccactggtggtcaccagatggagaaagacttgccttcctgatgataaatgactctttggtacccaccatggttatccctcggtttactggagcgttgtatcccaaaggaaagcagtatccgtatcctaaggcaggtcaagtgaacccaacaataaaattatatgttgtaaacctgtatggaccaactcacactttggagctcatgccacctgacagctttaaatcaagagaatactatatcactatggttaaatgggtaagcaataccaagactgtggtaagatggttaaaccgagctcagaacatctccatcctcacagtctgtgagaccactacaggtgcttgtagtaaaaaatatgagatgacatcagatacgtggctctctcagcagaatgaggagcccgtgttttctagagacggcagcaaattctttatgacagtgcctgttaagcaagggggacgtggagaatttcaccacgtagctatgttcctcatccagagtaaaagtgagcaaattaccgtgcggcatctgacatcaggaaactgggaagtgataaagatcttggcatacgatgaaactactcaaaaaatttactttctgagcactgaatcttctcccagaggaaggcagctgtacagtgcttctactgaaggattattgaatcgccaatgcatttcatgtaatttcatgaaagaacaatgtacatattttgatgccagttttagtcccatgaatcaacatttcttattattctgtgaaggtccaagggtcccagtggtcagcctacatagtacggacaacccagcaaaatattttatattggaaagcaattctatgctgaaggaagctatcctgaagaagaagataggaaagccagaaattaaaatccttcatattgacgactatgaacttcctttacagttgtcccttcccaaagattttatggaccgaaaccagtatgctcttctgttaataatggatgaagaaccaggaggccagctggttacagataagttccatattgactgggattccgtactcattgacatggataatgtcattgtagcaagatttgatggcagaggaagtggattccagggtctgaaaattttgcaggagattcatcgaagattaggttcagtagaagtaaaggaccaaataacagctgtgaaatttttgctgaaactgccttacattgactccaaaagattaagcatttttggaaagggttatggtggctatattgcatcaatgatcttaaaatcagatgaaaagctttttaaatgtggatccgtggttgcacctatcacagacttgaaattgtatgcctcagctttctctgaaagataccttgggatgccatctaaggaagaaagcacttaccaggcagccagtgtgctacataatgttcatggcttgaaagaagaaaatatattaataattcatggaactgctgacacaaaagttcatttccaacactcagcagaattaatcaagcacctaataaaagctggagtgaattatactatgcaggtctacccagatgaaggtcataacgtatctgagaagagcaagtatcatctctacagcacaatcctcaaattcttcagtgattgtttgaaggaagaaatatctgtgctaccacaggaaccagaagaagatgaataatggactgtatttatacagaactgaagggaatattgaggctcaatgaaacctgacaaagagactgtaatattgtagttgctccagaatgtcaagggcagcttacggagatgtcactggagcagcacgctcagagacagtgaactagcatttgaatacacaagtccaagtctactgtgttgctaggggtgcagaacccgtttctttgtatgagagaggtcaaagggttggtttcctgggagaaattagttttgcattaaagtaggagtagtgcatgttttcttctgttatccccctgtttgttctgtaactagttgctctcattttaatttcactggccaccatcatctttgcatataatgcacaatctatcatctgtcctacagtccctgatctttcatggctgagctgcaatctaacactttactgtacctttataataagtgcaattctttcattgtctattattatgcttaagaaaatattcagttaataaaaaacagagtattttatgtaatttctgtttttaaaaagacattattaaatgggtcaaaggac

SEQ ID NO: 300422 - DNA, 3883 bp, Artificial Sequence
  derived and/or modified sequence
aagacctagaaggctttaagaaagacagggtaatattttgctggtgtagagggcctgctcttcggagacaaatacttgcttttcattttgatcagccgtctgcacttaaaagcctcctagccagggacatgttaattaaacagtctggggctcagtgctgccatccgtaaattggaggattagagaaataatatacacaagtacctggtacataccaaatatgatagaagatatcttcaacctttagctataagaagaatggaaaatgaaaaagagacaggtggagagagggagggagatgagagctgcgtggagctggtatgctggttaggaggtaggaaataatgaggcctcgaccatctaagatacagaagtctccctgctgaatcgaaaggaagtgctacaatattctttcaaattcatcgcagttgagagaaaactggagcagagtgtgatatcaagaaagggcttcaccaggatgatcaatgcaaatggatatggagctttcttggaatgaaacattatcccgtaacaccaggtatacatacatgaagagtggcttcaggactggaactgggaagtaacagccctccacagagaaactggaagggaattgctattgctctgctggtgattttagttgtatgctcactcatcactatgtcagtcatcctcttaaccccagatgaactcacaaattcgtcagaaaccagattgtctttggaagacctctttaggaaagactttgtgcttcacgatccagaggctcggtggatcaatgatacagatgtggtgtataaaagcgagaatggacatgtcattaaactgaatatagaaacaaatgctaccacattattattggaaaacacaacttttgtaaccttcaaagcatcaagacattcagtttcaccagatttaaaatatgtccttctggcatatgatgtcaaacagatttttcattattcgtatactgcttcatatgtgatttacaacatacacactagggaagtttgggagttaaatcctccagaagtagaggactccgtcttgcagtacgcggcctggggtgtccaagggcagcagctgatttatatttttgaaaataatatctactatcaacctgatataaagagcagttcattgcgactgacatcttctggaaaagaagaaataatttttaatgggattgctgactggttatatgaagaggaactcctgcattctcacatcgcccactggtggtcaccagatggagaaagacttgccttcctgatgataaatgactctttggtacccaccatggttatccctcggtttactggagcgttgtatcccaaaggaaagcagtatccgtatcctaaggcaggtcaagtgaacccaacaataaaattatatgttgtaaacctgtatggaccaactcacactttggagctcatgccacctgacagctttaaatcaagagaatactatatcactatggttaaatgggtaagcaataccaagactgtggtaagatggttaaaccgagctcagaacatctccatcctcacagtctgtgagaccactacaggtgcttgtagtaaaaaatatgagatgacatcagatacgtggctctctcagcagaatgaggagcccgtgttttctagagacggcagcaaattctttatgacagtgcctgttaagcaagggggacgtggagaatttcaccacgtagctatgttcctcatccagagtaaaagtgagcaaattaccgtgcggcatctgacatcaggaaactgggaagtgataaagatcttggcatacgatgaaactactcaaaaaatttactttctgagcactgaatcttctcccagaggaaggcagctgtacagtgcttctactgaaggattattgaatcgccaatgcatttcatgtaatttcatgaaagaacaatgtacatattttgatgccagttttagtcccatgaatcaacatttcttattattctgtgaaggtccaagggtcccagtggtcagcctacatagtacggacaacccagcaaaatattttatattggaaagcaattctatgctgaaggaagctatcctgaagaagaagataggaaagccagaaattaaaatccttcatattgacgactatgaacttcctttacagttgtcccttcccaaagattttatggaccgaaaccagtatgctcttctgttaataatggatgaagaaccaggaggccagctggttacagataagttccatattgactgggattccgtactcattgacatggataatgtcattgtagcaagatttgatggcagaggaagtggattccagggtctgaaaattttgcaggagattcatcgaagattaggttcagtagaagtaaaggaccaaataacagctgtgaaatttttgctgaaactgccttacattgactccaaaagattaagcatttttggaaagggttatggtggctatattgcatcaatgatcttaaaatcagatgaaaagctttttaaatgtggatccgtggttgcacctatcacagacttgaaattgtatgcctcagctttctctgaaagataccttgggatgccatctaaggaagaaagcacttaccaggcagccagtgtgctacataatgttcatggcttgaaagaagaaaatatattaataattcatggaactgctgacacaaaagttcatttccaacactcagcagaattaatcaagcacctaataaaagctggagtgaattatactatgcaggtctacccagatgaaggtcataacgtatctgagaagagcaagtatcatctctacagcacaatcctcaaattcttcagtgattgtttgaaggaagaaatatctgtgctaccacaggaaccagaagaagatgaataatggactgtatttatacagaactgaagggaatattgaggctcaatgaaacctgacaaagagactgtaatattgtagttgctccagaatgtcaagggcagcttacggagatgtcactggagcagcacgctcagagacagtgaactagcatttgaatacacaagtccaagtctactgtgttgctaggggtgcagaacccgtttctttgtatgagagaggtcaaagggttggtttcctgggagaaattagttttgcattaaagtaggagtagtgcatgttttcttctgttatccccctgtttgttctgtaactagttgctctcattttaatttcactggccaccatcatctttgcatataatgcacaatctatcatctgtcctacagtccctgatctttcatggctgagctgcaatctaacactttactgtacctttataataagtgcaattctttcattgtctattattatgcttaagaaaatattcagttaataaaaaacagagtattttatgtaatttctgtttttaaaaagacattattaaatgggtcaaaggacatatagaaatgtggatttcagcaccttccaaagttcagccagttatcagtagatacaatatctttaaatgaacacacgagtgtatgtctcacaatatatatacacaagtgtgcatatacagttaatgaaactatctttaaatgttattcatgctataaagagtaaacgtttgatgaattagaagagatgctcttttccaagctataatggatgctttgtttaatgagccaaatatgatgaaacattttttccaattcaaattctagctattgctttcctataaatgtttgggttgtgtttggtattgtttttagtggttaatagttttccagttgcatttaattttttgaatatgataccttgtcacatgtaaattagatacttaaatattaaattatagtttctgataaagaaattttgttaacaa

SEQ ID NO: 300423 - DNA, 1803 bp, Artificial Sequence
  derived and/or modified sequence
ctcagtattctgatcttgaccagtaacgagttgacaaattcttccgagacgcgcctttccttggaggatctgtttagaaaggatttcgtgctgcacgatccagaagcgagatggataaatgataccgacgtagtatataaaagcgagaacggccatgtgattaaactcaacatcgagaccaacgccactactctgctactcgaaaataccacttttgtcaccttcaaggcatctaggcactctgtatcgccagacttaaaatacgtcttgcttgcgtatgatgtgaagcagatcttccactacagctatacagcatcgtacgtcatttacaatattcatacgagagaagtgtgggaactcaaccccccggaagttgaggacagcgtactgcagtacgccgcctggggcgtgcaggggcaacagctcatctatatcttcgagaataatatttattatcagcccgacatcaagtcctcaagtcttaggcttacaagttccggaaaagaagaaatcatcttcaatggcatcgccgactggctgtacgaagaggagctgttgcatagtcatatcgcacattggtggagcccagatggggaaaggctcgcctttctcatgataaacgacagcctggttccgactatggtgattccccgtttcactggcgccctttatccgaagggaaagcagtatccttaccctaaagcaggtcaggtcaaccctaccatcaagctgtatgtcgtcaacctgtatggcccaacacacaccctggagctcatgcctcccgactcctttaaatctcgggagtactacataaccatggtgaagtgggtatcaaatacaaaaactgtagtgcgctggttgaacagagcccagaacatctccatccttacagtctgcgagacaacaactggagcttgtagcaagaagtacgagatgacatccgatacttggcttagtcagcaaaacgaggaaccggtttttagccgcgacggctctaaattcttcatgacagtacctgtgaagcaagggggaaggggagaattccaccacgtagcaatgtttcttatacagagcaaaagcgaacagattacggtgagacacctgacctccggaaactgggaagtgatcaagatactggcctatgacgagacaactcaaaaaatctacttcctctccactgagagtagtccccgcggcagacagctgtactccgcttccactgaaggactcctgaacaggcagtgtatctcttgcaattttatgaaggagcagtgtacctatttcgatgctagcttctctcccatgaaccagcattttctcctattctgtgagggacccagggtgcctgtggtatccctccactccacagataacccagccaagtattttattctcgaatcaaactcaatgctgaaggaagctatactgaagaaaaaaattggcaaacctgagatcaagattctgcatatcgacgactatgagctgccacttcaactcagtcttccaaaggactttatggaccgcaatcaatatgctttgctgctgattatggatgaagaacccgggggccagctggtgactgataagtttcacattgactgggactcggtattgatcgatatggataatgtgattgtagcccggtttgacggtaggggctccggcttccagggactgaaaatcttacaggagattcaccgacgtttggggagcgttgaagtaaaggaccagattacggccgtgaaatttctgctgaaactgccttatatcgattctaaaagactgtcaattttcggaaagtag

SEQ ID NO: 300424 - DNA, 2241 bp, Artificial Sequence
  derived and/or modified sequence
atgtctgttatcctgctgactccagacgaactgacaaacagctccgagactcggctgagtttagaggacctgtttcggaaagactttgttctgcatgatcccgaggcaagatggattaatgatactgacgtcgtttacaaaagcgaaaatgggcacgtgatcaagctgaacatagagacaaatgctaccaccttgttactcgaaaatactacattcgtcacattcaaggcttcaaggcactctgtttcccctgatctgaagtacgttcttctcgcctacgacgttaagcagatatttcactattcttacaccgcctcatatgtaatatacaatatccacactcgcgaagtgtgggaactcaatcctcctgaggtcgaagatagtgttctgcaatacgcagcctggggcgtccaaggtcagcagctgatttatatttttgagaacaacatctactaccagcccgatatcaagtccagcagtctacggcttactagtagcggaaaggaagagatcatattcaatggcatcgcagactggctttatgaagaggaactactgcactctcatatcgcacactggtggagtccagacggcgaaagactggccttcttgatgatcaatgactcactcgttccaactatggtcattccaagattcacgggagcgctgtatcctaaggggaaacagtacccctacccgaaagcgggacaggttaatccaacaattaagctgtacgtagtgaacctttatggtcccacacatacactggaactgatgccgcctgattcattcaagtcaagggaatactatataacaatggtgaaatgggtttccaacacaaaaaccgtcgttaggtggttaaatagagcacaaaacatttccattctgaccgtgtgtgagaccacaaccggagcttgttctaagaaatatgagatgaccagtgacacgtggctgtcccagcagaacgaagaacccgtgttcagccgtgacgggtctaagttctttatgactgttcccgtgaagcaggggggcaggggtgagttccaccacgtggcaatgttcttaatccaatcaaaaagtgaacagataacagttaggcatctcacctccggcaactgggaagtgattaaaattttggcctatgacgagaccacccagaagatttacttcctctcaaccgagagttccccccgtggtcgtcagctttactctgctagcacggagggattactgaatcgccagtgcatctcatgcaatttcatgaaggagcagtgtacttactttgatgcctctttttccccaatgaatcagcattttctgctcttctgtgagggcccccgtgttcctgttgtttctctccattctaccgacaaccccgctaaatactttatcctggaatctaacagcatgctgaaagaagcgattctgaaaaagaaaattggcaagcctgaaatcaagatcctgcacattgacgattatgagctgcctctacagctgtccctgccaaaggacttcatggaccggaaccagtacgcactgctactgatcatggatgaggagcccggcgggcagcttgtgactgataagttccacattgactgggactccgtgctgatcgacatggacaatgtgatagttgcccgttttgatggccggggctcaggctttcaaggactgaaaatccttcaggagattcaccgccgcctcggttccgtggaagtgaaagaccagatcacagccgtcaaattcctcctgaaactcccatatatcgacagcaagcggttatccattttcggtaaaggttatggaggttacatcgcttctatgatccttaagtctgatgagaaactgttcaagtgtggttcggtggtcgctccaattaccgacctgaaactctatgcctcagcgttttccgaacggtatctgggcatgccttctaaagaggagtctacctatcaggcagcatcagttctacataacgtccacggcttgaaggaggagaatatcctaattatacacggcaccgctgataccaaggtgcatttccagcactcagctgaactaatcaagcaccttattaaggccggggtgaattacaccatgcaggtgtatcctgatgaggggcataacgtaagcgagaagagtaagtaccacctctactcgaccatcctcaaattctttagcgactgcctgaaagaggagatcagtgtgctgccccaggaacctgaagaagatgaatag

SEQ ID NO: 300425 - DNA, 1803 bp, Artificial Sequence
  derived and/or modified sequence
ctgagcatcctgatcctgaccagcaatgagctgaccaacagcagcgagacccggctgagcctggaggacctcttcaggaaggactttgtgctgcatgaccctgaggcccgctggatcaatgacacagatgtggtgtacaagtcagaaaatggccacgtgatcaagctgaacatcgagaccaatgccaccaccctgctgctggagaacaccacctttgtgaccttcaaggccagccgccacagcgtgtccccagacctgaagtatgtgctgctggcctatgatgtgaagcagatcttccactacagctacacagccagctatgtgatctacaacatccacacccgggaggtgtgggagctgaaccccccagaggtggaggacagcgtgctgcagtatgctgcctggggcgtgcagggccagcagctgatctacatctttgagaacaacatctactaccagcctgacatcaagagcagcagcctgcggctgaccagcagcggcaaggaggagatcatcttcaacggcattgctgactggctgtatgaggaggagctgctgcacagccacatcgcccactggtggagcccagatggagagcggctggccttcctgatgatcaatgacagcctggtgcccaccatggtgatcccccgcttcaccggggccctgtaccccaagggcaagcagtacccctaccccaaggccggccaggtgaaccccaccatcaagctgtatgtggtgaacctgtatggccccacccacaccctggagctgatgcccccagacagcttcaagagccgggagtactacatcaccatggtgaagtgggtgagcaacaccaagacagtggtgcgctggctgaacagagcccagaacatcagcatcctgactgtgtgtgagaccaccactggagcctgcagcaagaagtatgagatgaccagtgacacctggctgagccagcagaatgaggagcctgtgttcagcagagatggcagcaagttcttcatgacagtgcctgtgaagcagggcggccgcggggagttccaccacgtggccatgttcctgatccagagcaagtctgagcagatcaccgtgcgccacctgaccagcggcaactgggaggtgatcaagatcctggcctatgatgagaccacccagaagatctacttcctgagcacagagagcagcccccggggccggcagctgtacagcgccagcacagagggcctgctgaaccggcagtgcatcagctgcaacttcatgaaggagcagtgcacctactttgatgccagcttcagccccatgaaccagcacttcctgctcttctgtgagggcccccgggtgcctgtggtgtccctgcacagcacagacaacccagccaagtacttcatcctggagagcaacagcatgctgaaggaggccatcctgaagaagaagattggcaagccagagatcaagatcctgcacattgatgattatgagctgcccctgcagctgagcctgcccaaggacttcatggacaggaaccagtatgccctgctgctgatcatggatgaggagcccggcggccagctggtgacagacaagttccacatcgactgggacagcgtgctgattgacatggacaacgtgattgtggccaggtttgatggccggggcagcggcttccagggcctgaagatcctgcaggagatccaccggcggctgggctctgtggaggtgaaggaccagatcacagctgtgaagttcctgctgaagctgccctacatcgacagcaagaggctgagcatctttgggaagtag

SEQ ID NO: 300426 - DNA, 2241 bp, Artificial Sequence
  derived and/or modified sequence
atgtctgtcatcctgctgaccccagatgagctgaccaacagcagcgagacccggctgagcctggaggacctcttcaggaaggactttgtgctgcatgaccctgaggcccgctggatcaatgacacagatgtggtgtacaagtcagaaaatggccacgtgatcaagctgaacatcgagaccaatgccaccaccctgctgctggagaacaccacctttgtgaccttcaaggccagccgccacagcgtgtccccagacctgaagtatgtgctgctggcctatgatgtgaagcagatcttccactacagctacacagccagctatgtgatctacaacatccacacccgggaggtgtgggagctgaaccccccagaggtggaggacagcgtgctgcagtatgctgcctggggcgtgcagggccagcagctgatctacatctttgagaacaacatctactaccagcctgacatcaagagcagcagcctgcggctgaccagcagcggcaaggaggagatcatcttcaacggcattgctgactggctgtatgaggaggagctgctgcacagccacatcgcccactggtggagcccagatggagagcggctggccttcctgatgatcaatgacagcctggtgcccaccatggtgatcccccgcttcaccggggccctgtaccccaagggcaagcagtacccctaccccaaggccggccaggtgaaccccaccatcaagctgtatgtggtgaacctgtatggccccacccacaccctggagctgatgcccccagacagcttcaagagccgggagtactacatcaccatggtgaagtgggtgagcaacaccaagacagtggtgcgctggctgaacagagcccagaacatcagcatcctgactgtgtgtgagaccaccactggagcctgcagcaagaagtatgagatgaccagtgacacctggctgagccagcagaatgaggagcctgtgttcagcagagatggcagcaagttcttcatgacagtgcctgtgaagcagggcggccgcggggagttccaccacgtggccatgttcctgatccagagcaagtctgagcagatcaccgtgcgccacctgaccagcggcaactgggaggtgatcaagatcctggcctatgatgagaccacccagaagatctacttcctgagcacagagagcagcccccggggccggcagctgtacagcgccagcacagagggcctgctgaaccggcagtgcatcagctgcaacttcatgaaggagcagtgcacctactttgatgccagcttcagccccatgaaccagcacttcctgctcttctgtgagggcccccgggtgcctgtggtgtccctgcacagcacagacaacccagccaagtacttcatcctggagagcaacagcatgctgaaggaggccatcctgaagaagaagattggcaagccagagatcaagatcctgcacattgatgattatgagctgcccctgcagctgagcctgcccaaggacttcatggacaggaaccagtatgccctgctgctgatcatggatgaggagcccggcggccagctggtgacagacaagttccacatcgactgggacagcgtgctgattgacatggacaacgtgattgtggccaggtttgatggccggggcagcggcttccagggcctgaagatcctgcaggagatccaccggcggctgggctctgtggaggtgaaggaccagatcacagctgtgaagttcctgctgaagctgccctacatcgacagcaagaggctgagcatctttgggaagggctacggcggctacatcgcctccatgatcctgaagagtgatgagaagctgttcaagtgtggctctgtggtggcccccatcacagacctgaagctgtatgccagcgccttcagcgagcgctacctgggcatgcccagcaaggaggagagcacctaccaggccgcctctgtgctgcacaacgtgcacggcctgaaggaggagaacatcctgatcatccatggaacagctgacaccaaggtgcacttccagcacagcgctgagctgatcaagcacctgatcaaggccggcgtgaactacaccatgcaggtgtacccagatgagggccacaacgtgtctgagaagagcaagtaccacctgtacagcaccatcctgaagttcttcagtgactgcctgaaggaggagatctctgtgctgccccaggagcctgaggaggatgaatag

SEQ ID NO: 300427 - DNA, 1803 bp, Artificial Sequence
  derived and/or modified sequence
ctgagcatcctgatcctgaccagcaacgagctgaccaacagcagcgagaccaggctctctctggaggacctgttcaggaaagactttgtgttgcacgatcccgaagcacggtggatcaacgacacagacgtggtttacaaaagcgaaaacgggcatgtaatcaaacttaatatcgagaccaacgcaactacactgctgctggaaaatactacgtttgttaccttcaaagcttctagacactcagtcagccctgatctgaagtatgttctgctcgcatatgatgtgaaacagatatttcactattcttatactgcatcatacgttatctacaatattcatacgagggaggtctgggaacttaatccacctgaagtggaagactctgtactgcaatacgcagcttggggggtacagggtcagcaacttatttacatctttgaaaacaatatctattatcagcccgacataaaaagctcatctcttcggctgacttctagtgggaaggaagagatcattttcaacggcatcgcagactggctgtacgaggaagaactccttcacagccacattgcccattggtggtctccagacggggaacggctggcgttcctcatgatcaatgacagcctggttccaactatggtcatccctcggtttaccggggccctgtatccgaaaggcaagcagtacccttacccaaaggccggtcaagtgaaccctaccatcaaactctatgttgtgaacttatatgggccgacccatacgctggagttaatgcctccggactcctttaaaagcagagagtactacatcacaatggttaaatgggtgtccaataccaaaaccgtggtgagatggcttaatcgggcacagaacataagcattctgacagtgtgcgaaactactaccggcgcttgcagcaaaaaatacgaaatgacttctgacacctggttgtcccagcagaatgaagaaccagtgtttagcagagacggttcaaaatttttcatgacagtgccggtcaagcagggtggacggggtgaattccaccacgtagcaatgtttttgatacagtctaagagtgagcagattacagtgcgtcatctgacctctgggaactgggaagtgatcaagatattagcttatgatgaaacaacccaaaagatttacttcctgtcaacagagtcatcaccacgcggacggcagctgtactcagcatctacagaagggctattgaaccggcagtgcatctcgtgcaattttatgaaagaacagtgcacatacttcgatgctagcttctcgccaatgaaccagcattttctgctgttttgcgagggtcctagagtgccagtggtatcactgcattctactgataatccagctaagtactttatactagaaagcaactcaatgctgaaagaggctatcctgaaaaaaaaaatcggcaagccagaaatcaagattctgcatattgatgattacgagctgcccctgcaactctcacttcctaaggatttcatggataggaaccagtacgcgctcttgttaattatggacgaagagcccgggggacagctggtcactgacaaattccatattgattgggatagcgtcctcatcgatatggacaacgtcatcgtcgcaaggttcgatggcaggggctctggatttcagggtctaaaaatcctccaggaaatccaccggcggctagggtctgtcgaggtcaaggatcagattacagccgtgaaatttctgctgaaactgccttatatagattctaagcgtctgtcaatttttggcaaatag

SEQ ID NO: 300428 - DNA, 2241 bp, Artificial Sequence
  derived and/or modified sequence
atgagcgtgatcctgctgacccccgacgagctgaccaacagcagcgagactagattatctctagaggatctattcaggaaagattttgtgttacacgatcccgaagccaggtggatcaacgacaccgatgttgtatacaaatccgaaaatgggcacgtgattaagctgaatatcgaaacaaacgctacgaccttattattggagaatacgacttttgtaactttcaaggcatcacgacactctgtgtcaccagacctgaagtatgtgttgctggcctacgatgttaagcaaatttttcattactcatatactgcgagttacgtgatttataatatacacactagggaggtgtgggaactcaatcctcctgaagttgaggactctgtattacagtatgctgcttggggagtccagggccagcagctgatttatatcttcgagaataatatttattatcaacctgatatcaagtcaagctcattgcggctcactagctccggaaaggaggagatcatctttaatggcatcgcagactggctgtacgaagaggaactcctccactcccatatagcccattggtggtcacctgacggagagagattggccttcttaatgatcaacgattctctggttccaaccatggtgattccgaggtttaccggggccttatatcctaagggcaaacagtatccttatcccaaagccggccaggttaatcctacaatcaaactgtatgtcgttaacctgtatggccccacccacaccctcgaactgatgccacctgacagcttcaagtcccgcgagtactatattacaatggtcaagtgggtaagtaacacgaagactgtcgttagatggctaaatcgcgcccagaacattagcatactaaccgtttgcgagactactactggagcatgctccaagaagtatgagatgaccagtgacacttggttgtctcagcaaaatgaggagccagttttctcgcgggacgggagcaaattttttatgacagtgcctgtgaagcagggcggcaggggcgaattccaccatgtggccatgttccttattcagtccaagtcagaacagattaccgtgaggcatctgaccagcgggaactgggaggtaatcaagattctcgcctatgatgaaacaactcaaaaaatttacttcctgtctaccgaatcatcaccacgaggccggcagctgtattccgcctctacagaaggccttcttaatcggcagtgcatttcatgcaattttatgaaagagcagtgcacctatttcgacgcctcttttagcccaatgaatcagcacttcctgctattttgcgaggggcccagagtccccgtggtgagtctccattctacagataaccccgctaagtacttcatactagaatctaattcgatgctcaaagaagctattctgaagaaaaagattggaaagcctgaaataaagattttacacatcgacgactacgaactgcccctgcaactgtctctgcctaaagattttatggatagaaatcagtacgctcttttacttataatggatgaagagccggggggccagctggttaccgacaagttccatattgactgggactctgttctgatcgacatggataacgtgatcgtggctcgattcgatggccggggaagtggattccagggtctgaaaattctgcaggaaatacaccggaggttggggtccgtagaagttaaagaccaaatcaccgcggttaaattcttgttgaaactgccatacatagactcaaagcgcttgtctattttcgggaagggttatggaggttacatcgcctccatgatcttgaaatccgacgaaaagctgttcaagtgcggctccgttgtggccccaattacagatcttaaactatatgcttcagccttttccgagaggtatctgggaatgccaagcaaggaggaaagcacataccaagccgcctcggtgctgcataacgtgcatggcctgaaagaggagaacattttgatcattcacgggactgctgacacaaaggtccacttccagcattccgccgagcttatcaagcacctcataaaggccggcgtgaactacactatgcaggtgtaccccgatgagggtcataacgtctccgaaaaatcaaagtaccatttgtattctacaatactcaagttcttcagtgactgcctgaaggaggaaatttccgtgctgccgcaagaacccgaagaagacgagtag

SEQ ID NO: 300429 - DNA, 1803 bp, Artificial Sequence
  derived and/or modified sequence
ctgtcaatccttatcctgaccagcaacgaactgactaatagctccgaaacccggttgtcgcttgaggatctttttcgcaaagatttcgttctccatgaccccgaggctagatggatcaacgacacagatgtggtgtacaagtctgaaaacggacacgtaattaagctgaatatcgagaccaatgccaccacacttctgctggagaataccaccttcgttacttttaaggcctccaggcactccgtctctccagatttgaaatacgtgcttttggcatatgacgtgaaacaaatcttccactatagttatacagctagctacgttatttataacatccacactcgcgaagtatgggagctaaatcctccagaggtggaggactctgtgctgcagtatgcagcttggggtgtgcaaggtcagcaactgatatacatattcgagaataatatttactatcagcccgatatcaagtcatcttcactgaggctgacatcgtccggaaaggaagaaatcattttcaatgggattgctgattggctgtacgaagaagagctgctgcatagtcacattgctcactggtggtctcccgatggggagagacttgcatttttaatgatcaatgattcactggtgcctactatggtcatcccacgcttcacaggagccctgtacccaaagggtaaacagtacccctatcctaaggccggtcaggtgaatcctactattaaactatacgtggttaacctgtacggtcccacccacacattggaactgatgccacctgactcattcaagtcccgcgaatactatattactatggtgaaatgggtgtccaatacaaaaaccgtcgttcggtggctaaatcgagcccaaaacatttctattctgactgtatgcgaaaccactaccggagcctgcagtaagaagtatgagatgacatctgatacatggctcagccagcagaatgaagagcctgttttctctagggatggaagtaagttctttatgaccgtgcccgtcaaacagggcggacggggagaattccatcacgtggccatgtttctgatccagagcaaatctgaacaaatcacagtccgccacctgacatctggtaactgggaggtgatcaagattctggcgtacgatgagacaacccagaagatctatttcctttcaactgagagcagccctcggggaagacagctctactccgccagcacagaaggtctcctgaataggcagtgtatctcgtgtaactttatgaaagaacaatgtacttactttgacgcctctttctcgcctatgaaccagcacttcctacttttctgtgaaggcccaagggttcctgtggtctcgttgcactcaaccgacaacccagctaaatactttatcctagagtctaattccatgctgaaggaggcgatcctgaaaaaaaagatcggtaaaccggaaataaagatcctgcacatcgacgattacgaactcccactccaattaagtttgccaaaggatttcatggatcgaaaccaatacgccctactgctcataatggatgaggagcccggaggccagttggtcaccgacaaatttcacatcgactgggattctgtgcttatcgatatggacaacgtgatcgtggcacggttcgacgggcgtgggagcggttttcagggactcaaaatcttgcaagagatccacagacggctcggctccgtggaggtaaaggaccaaatcaccgcggtcaagttcctgctaaagttgccttatattgacagcaagcgcttaagcattttcggtaaatag

SEQ ID NO: 300430 - DNA, 2241 bp, Artificial Sequence
  derived and/or modified sequence
atgtccgtgatcctcctcacgcccgatgagctgactaattcttctgaaacaagactctctctggaggatttatttagaaaagactttgtgctccatgaccccgaagccaggtggattaatgacactgacgtggtctacaagagcgagaacggccatgtgatcaagctcaacatcgaaaccaatgctacaactctgctcctagaaaacaccactttcgttacatttaaagcttccagacacagcgtcagcccagacctgaaatatgttcttctggcctatgacgtgaaacagatctttcactacagctacactgcttcttacgtcatctataatatccacacaagggaggtttgggagttaaaccctcccgaggtcgaagatagcgtcctgcaatacgccgcttggggagtgcaaggccagcagcttatctatatattcgagaacaacatttattatcaacctgacataaaatcaagttccctgcggctcacctccagcggcaaagaggagatcatcttcaacggaatcgccgactggttgtacgaggaggaactattacacagtcacattgcacattggtggtcacccgatggagaaaggctcgcattccttatgattaacgacagcctggttccaacgatggtaataccccgattcacaggcgcactgtacccaaagggaaagcagtacccatatcctaaggctggccaagttaaccctactatcaaactctatgtggttaatctctatggcccaacccatactttggagctcatgccaccagatagttttaagagccgggaatattatatcacgatggtgaaatgggtttcgaacacaaaaactgtggtgagatggttaaacagggcccagaacatctcaatcctgaccgtgtgcgaaacaactaccggagcatgctccaagaagtacgaaatgacctctgacacatggttgtcacagcagaacgaggagcctgtgttctccagggacgggtccaagttctttatgacagttcccgtgaagcagggaggtaggggagagtttcaccacgttgcaatgtttctcattcaaagcaagagtgagcagataacggttcggcacttgacaagtggtaactgggaagtcatcaagatactggcatatgacgagactacccagaaaatatactttctgtctaccgagagctcccccaggggtaggcagttgtactccgcctcgacagaggggttattgaatagacagtgcatctcctgcaactttatgaaagagcagtgtacatacttcgatgcctctttcagccctatgaaccagcatttcctgttgttttgtgaggggcctcgtgtccccgtggtatctctgcacagcacagataacccagcaaagtatttcatccttgaatcgaatagtatgctgaaggaagccattttaaagaaaaaaataggcaaaccagagatcaaaatactacacatcgatgactacgaactgcccctacagctcagtctgccgaaggacttcatggatcgaaaccagtacgcccttctgctgattatggacgaggaacctggaggccaactggtgacagacaagttccacatcgattgggactctgtgttgatagatatggataatgtgattgtcgccagatttgacggtcgaggtagcgggttccagggactgaagatcctgcaggagatccatagacggctcggctccgttgaggtaaaagaccagatcacggcagtgaaatttcttctgaaactgccatacatcgactccaagcgcctctcaatttttggaaaaggctacgggggttacattgccagcatgatcctgaaaagtgatgaaaagttgttcaaatgtgggagtgtggtcgcaccaatcacagatctaaaattatatgctagtgctttctccgagaggtatctcggcatgccctctaaagaagaatcgacataccaggccgcttcagtacttcacaacgtgcatggacttaaagaggaaaatatcctcatcatccatggcactgccgatacgaaagtccacttccaacacagcgctgagttgattaagcaccttattaaggccggtgtcaactacacaatgcaggtttaccctgatgaagggcacaacgtgtccgagaagagcaaatatcacctttactctactattctgaaattcttctcagattgtctgaaagaggagatttcagtgctgccccaggagccagaggaagacgagtag

SEQ ID NO: 300431 - DNA, 1803 bp, Artificial Sequence
  derived and/or modified sequence
ctgagcatcctgatcctgaccagcaacgagctgaccaacagcagcgagaccagactgagcctggaggacctgttcagaaaggacttcgtgctgcacgaccccgaggccagatggatcaacgacaccgacgtggtgtacaagagcgagaacggccacgtgatcaagctgaacatcgagaccaacgccaccaccctgctgctggagaacaccaccttcgtgaccttcaaggccagcagacacagcgtgagccccgacctgaagtacgtgctgctggcctacgacgtgaagcagatcttccactacagctacaccgccagctacgtgatctacaacatccacaccagagaggtgtgggagctgaacccccccgaggtggaggacagcgtgctgcagtacgccgcctggggcgtgcagggccagcagctgatctacatcttcgagaacaacatctactaccagcccgacatcaagagcagcagcctgagactgaccagcagcggcaaggaggagatcatcttcaacggcatcgccgactggctgtacgaggaggagctgctgcacagccacatcgcccactggtggagccccgacggcgagagactggccttcctgatgatcaacgacagcctggtgcccaccatggtgatccccagattcaccggcgccctgtaccccaagggcaagcagtacccctaccccaaggccggccaggtgaaccccaccatcaagctgtacgtggtgaacctgtacggccccacccacaccctggagctgatgccccccgacagcttcaagagcagagagtactacatcaccatggtgaagtgggtgagcaacaccaagaccgtggtgagatggctgaacagagcccagaacatcagcatcctgaccgtgtgcgagaccaccaccggcgcctgcagcaagaagtacgagatgaccagcgacacctggctgagccagcagaacgaggagcccgtgttcagcagagacggcagcaagttcttcatgaccgtgcccgtgaagcagggcggcagaggcgagttccaccacgtggccatgttcctgatccagagcaagagcgagcagatcaccgtgagacacctgaccagcggcaactgggaggtgatcaagatcctggcctacgacgagaccacccagaagatctacttcctgagcaccgagagcagccccagaggcagacagctgtacagcgccagcaccgagggcctgctgaacagacagtgcatcagctgcaacttcatgaaggagcagtgcacctacttcgacgccagcttcagccccatgaaccagcacttcctgctgttctgcgagggccccagagtgcccgtggtgagcctgcacagcaccgacaaccccgccaagtacttcatcctggagagcaacagcatgctgaaggaggccatcctgaagaagaagatcggcaagcccgagatcaagatcctgcacatcgacgactacgagctgcccctgcagctgagcctgcccaaggacttcatggacagaaaccagtacgccctgctgctgatcatggacgaggagcccggcggccagctggtgaccgacaagttccacatcgactgggacagcgtgctgatcgacatggacaacgtgatcgtggccagattcgacggcagaggcagcggcttccagggcctgaagatcctgcaggagatccacagaagactgggcagcgtggaggtgaaggaccagatcaccgccgtgaagttcctgctgaagctgccctacatcgacagcaagagactgagcatcttcggcaagtag

SEQ ID NO: 300432 - DNA, 2241 bp, Artificial Sequence
  derived and/or modified sequence
atgagcgtgatcctgctgacccccgacgagctgaccaacagcagcgagaccagactgagcctggaggacctgttcagaaaggacttcgtgctgcacgaccccgaggccagatggatcaacgacaccgacgtggtgtacaagagcgagaacggccacgtgatcaagctgaacatcgagaccaacgccaccaccctgctgctggagaacaccaccttcgtgaccttcaaggccagcagacacagcgtgagccccgacctgaagtacgtgctgctggcctacgacgtgaagcagatcttccactacagctacaccgccagctacgtgatctacaacatccacaccagagaggtgtgggagctgaacccccccgaggtggaggacagcgtgctgcagtacgccgcctggggcgtgcagggccagcagctgatctacatcttcgagaacaacatctactaccagcccgacatcaagagcagcagcctgagactgaccagcagcggcaaggaggagatcatcttcaacggcatcgccgactggctgtacgaggaggagctgctgcacagccacatcgcccactggtggagccccgacggcgagagactggccttcctgatgatcaacgacagcctggtgcccaccatggtgatccccagattcaccggcgccctgtaccccaagggcaagcagtacccctaccccaaggccggccaggtgaaccccaccatcaagctgtacgtggtgaacctgtacggccccacccacaccctggagctgatgccccccgacagcttcaagagcagagagtactacatcaccatggtgaagtgggtgagcaacaccaagaccgtggtgagatggctgaacagagcccagaacatcagcatcctgaccgtgtgcgagaccaccaccggcgcctgcagcaagaagtacgagatgaccagcgacacctggctgagccagcagaacgaggagcccgtgttcagcagagacggcagcaagttcttcatgaccgtgcccgtgaagcagggcggcagaggcgagttccaccacgtggccatgttcctgatccagagcaagagcgagcagatcaccgtgagacacctgaccagcggcaactgggaggtgatcaagatcctggcctacgacgagaccacccagaagatctacttcctgagcaccgagagcagccccagaggcagacagctgtacagcgccagcaccgagggcctgctgaacagacagtgcatcagctgcaacttcatgaaggagcagtgcacctacttcgacgccagcttcagccccatgaaccagcacttcctgctgttctgcgagggccccagagtgcccgtggtgagcctgcacagcaccgacaaccccgccaagtacttcatcctggagagcaacagcatgctgaaggaggccatcctgaagaagaagatcggcaagcccgagatcaagatcctgcacatcgacgactacgagctgcccctgcagctgagcctgcccaaggacttcatggacagaaaccagtacgccctgctgctgatcatggacgaggagcccggcggccagctggtgaccgacaagttccacatcgactgggacagcgtgctgatcgacatggacaacgtgatcgtggccagattcgacggcagaggcagcggcttccagggcctgaagatcctgcaggagatccacagaagactgggcagcgtggaggtgaaggaccagatcaccgccgtgaagttcctgctgaagctgccctacatcgacagcaagagactgagcatcttcggcaagggctacggcggctacatcgccagcatgatcctgaagagcgacgagaagctgttcaagtgcggcagcgtggtggcccccatcaccgacctgaagctgtacgccagcgccttcagcgagagatacctgggcatgcccagcaaggaggagagcacctaccaggccgccagcgtgctgcacaacgtgcacggcctgaaggaggagaacatcctgatcatccacggcaccgccgacaccaaggtgcacttccagcacagcgccgagctgatcaagcacctgatcaaggccggcgtgaactacaccatgcaggtgtaccccgacgagggccacaacgtgagcgagaagagcaagtaccacctgtacagcaccatcctgaagttcttcagcgactgcctgaaggaggagatcagcgtgctgccccaggagcccgaggaggacgagtag

SEQ ID NO: 300433 - DNA, 4646 bp, Artificial Sequence
  derived and/or modified sequence
ctctctatccttatactgacatctaatgaactcacaaattcgtcagaaaccagattgtctttggaagacctctttaggaaagactttgtgcttcacgatccagaggctcggtggatcaatgatacagatgtggtgtataaaagcgagaatggacatgtcattaaactgaatatagaaacaaatgctaccacattattattggaaaacacaacttttgtaaccttcaaagcatcaagacattcagtttcaccagatttaaaatatgtccttctggcatatgatgtcaaacagatttttcattattcgtatactgcttcatatgtgatttacaacatacacactagggaagtttgggagttaaatcctccagaagtagaggactccgtcttgcagtacgcggcctggggtgtccaagggcagcagctgatttatatttttgaaaataatatctactatcaacctgatataaagagcagttcattgcgactgacatcttctggaaaagaagaaataatttttaatgggattgctgactggttatatgaagaggaactcctgcattctcacatcgcccactggtggtcaccagatggagaaagacttgccttcctgatgataaatgactctttggtacccaccatggttatccctcggtttactggagcgttgtatcccaaaggaaagcagtatccgtatcctaaggcaggtcaagtgaacccaacaataaaattatatgttgtaaacctgtatggaccaactcacactttggagctcatgccacctgacagctttaaatcaagagaatactatatcactatggttaaatgggtaagcaataccaagactgtggtaagatggttaaaccgagctcagaacatctccatcctcacagtctgtgagaccactacaggtgcttgtagtaaaaaatatgagatgacatcagatacgtggctctctcagcagaatgaggagcccgtgttttctagagacggcagcaaattctttatgacagtgcctgttaagcaagggggacgtggagaatttcaccacgtagctatgttcctcatccagagtaaaagtgagcaaattaccgtgcggcatctgacatcaggaaactgggaagtgataaagatcttggcatacgatgaaactactcaaaaaatttactttctgagcactgaatcttctcccagaggaaggcagctgtacagtgcttctactgaaggattattgaatcgccaatgcatttcatgtaatttcatgaaagaacaatgtacatattttgatgccagttttagtcccatgaatcaacatttcttattattctgtgaaggtccaagggtcccagtggtcagcctacatagtacggacaacccagcaaaatattttatattggaaagcaattctatgctgaaggaagctatcctgaagaagaagataggaaagccagaaattaaaatccttcatattgacgactatgaacttcctttacagttgtcccttcccaaagattttatggaccgaaaccagtatgctcttctgttaataatggatgaagaaccaggaggccagctggttacagataagttccatattgactgggattccgtactcattgacatggataatgtcattgtagcaagatttgatggcagaggaagtggattccagggtctgaaaattttgcaggagattcatcgaagattaggttcagtagaagtaaaggaccaaataacagctgtgaaatttttgctgaaactgccttacattgactccaaaagattaagcatttttggaaagggttatggtggctatattgcatcaatgatcttaaaatcagatgaaaagctttttaaatgtggatccgtggttgcacctatcacagacttgaaattgtatgcctcagctttctctgaaagataccttgggatgccatctaaggaagaaagcacttaccaggcagccagtgtgctacataatgttcatggcttgaaagaagaaaatatattaataattcatggaactgctgacacaaaagttcatttccaacactcagcagaattaatcaagcacctaataaaagctggagtgaattatactatgcaggtctacccagatgaaggtcataacgtatctgagaagagcaagtatcatctctacagcacaatcctcaaattcttcagtgattgtttgaaggaagaaatatctgtgctaccacaggaaccagaagaagatgaataatggactgtatttatacagaactgaagggaatattgaggctcaatgaaacctgacaaagagactgtaatattgtagttgctccagaatgtcaagggcagcttacggagatgtcactggagcagcacgctcagagacagtgaactagcatttgaatacacaagtccaagtctactgtgttgctaggggtgcagaacccgtttctttgtatgagagaggtcaaagggttggtttcctgggagaaattagttttgcattaaagtaggagtagtgcatgttttcttctgttatccccctgtttgttctgtaactagttgctctcattttaatttcactggccaccatcatctttgcatataatgcacaatctatcatctgtcctacagtccctgatctttcatggctgagctgcaatctaacactttactgtacctttataataagtgcaattctttcattgtctattattatgcttaagaaaatattcagttaataaaaaacagagtattttatgtaatttctgtttttaaaaagacattattaaatgggtcaaaggacatatagaaatgtggatttcagcaccttccaaagttcagccagttatcagtagatacaatatctttaaatgaacacacgagtgtatgtctcacaatatatatacacaagtgtgcatatacagttaatgaaactatctttaaatgttattcatgctataaagagtaaacgtttgatgaattagaagagatgctcttttccaagctataatggatgctttgtttaatgagccaaatatgatgaaacattttttccaattcaaattctagctattgctttcctataaatgtttgggttgtgtttggtattgtttttagtggttaatagttttccagttgcatttaattttttgaatatgataccttgtcacatgtaaattagatacttaaatattaaattatagtttctgataaagaaattttgttaacaatgcaatgccactgagtgctattttgctcttttggtggagaaggcttttttcaaaactcttggtccttttacttctttctctcagtgcagaatcaattctcattttcatcgtaaaagcaaatagctggattatttcatttgccagtttctatttagtattccatgcctgcccaattcatctgttactgtttaatttcaattcttctggtgagaattagaaatgaaatattttttattcattggccaaaaagttcacagacagcagtgtttgctatttactttgaattgaaggcacaaaatgcatcaattcctgtgctgtgttgacttgcagtagtaagtaactgagagcataaaataaacctgactgtatgaagtcaatttaagtgatgagaacatttaactttggtgactaaagtcagaatatcttctcacttcacttaagggatcttccagaagatatctaaaagtctgtaataagcttagaagttcagataaatctaggcaggatactgcatttttgtggttttaaaaaagtccttaggacagactgaattatcataacttatggcatcaggaggaaactttaaaatatcaaggaatcactcagtcaccctcctgttttgttgaaggatcaaccccaaattctgggtatttgagtacatgtgaatcatggatttggtattcaactttttccctggatgctttggaatcgtgtcttccatgctccactgggttcaatttaaaataggagaggctttctcttctgaaagatccattttaggtctttttcaagaatagtgaacacattttttaacaaaataagttgtaattttaaaaggaaagttttgcctattttattaagatggaaatttctttttaggctaatttgaaatccaactgaagctttttaaccaatattttaaatttgaaccactagagttttttatgatgcaaatgattatgttgtctgaaaggtgtggttttattgaatgtctatttgagtatcatttaaaaagtatttgccttttactgtcatcatttctcttgttttattattattatcaatgtttatctatttttcaattaatttaatacagtttctaatgtgaaagacatttttctggaacccgttttccccttaaacactaaagagacctcaagtgaaagcatattgcttagtaggaaggtagaaaatgttaatccctgcgattctttgagttttaatgacagggtcattttcagtaaaggaaatgctcaccaacacatagtcaccaactattaaaggaatcatgtgattggattttcccctgtatacatgtacccttggtcataatcccactatttcatacatatttatgcattgctagattttcctaggactccaatagcatgctttccaagtgttattattcccttaatgttaa

SEQ ID NO: 300434 - protein, 585 aa, Artificial Sequence
  derived and/or modified sequence
  misc_feature (1)..(1): Xaa can be any naturally occurring amino acid
XLALVDKNIMGYIASLHELATTERRFYSKLSDIKSQILRPLLSLENLGTTTTVQLLQEVASRFSKLCYLIGQHGASLSSFLHGVKEARSLVILKHSSLFLDSYTEYCTSITNFLVMGGFQLLAKPAIDFLNKNQELLQDLSEVNDENTQLMEILNTLFFLPIRRLHNYAKVLLKLATCFEVASPEYQKLQDSSSCYECLALHLGRKRKEAEYTLGFWKTFPGKMTDSLRKPERRLLCESSNRALSLQHAGRFSVNWFILFNDALVHAQFSTHHVFPLATLWAEPLSEEAGGVNGLKITTPEEQFTLISSTPQEKTKWLRAISQAVDQALRGMSDLPPYGSGSSVQRQEPPISRSAKYTFYKDPRLKDATYDGRWLSGKPHGRGVLKWPDGKMYSGMFRNGLEDGYGEYRIPNKAMNKEDHYVGHWKEGKMCGQGVYSYASGEVFEGCFQDNMRHGHGLLRSGKLTSSSPSMFIGQWVMDKKAGYGVFDDITRGEKYMGMWQDDVCQGNGVVVTQFGLYYEGNFHLNKMMGNGVLLSEDDTIYEGEFSDDWTLSGKDNSGLIEQVGKCSLLPYFLKVCEALVLFLL

SEQ ID NO: 300435 - protein, 576 aa, Artificial Sequence
  derived and/or modified sequence
MGYIASLHELATTERRFYSKLSDIKSQILRPLLSLENLGTTTTVQLLQEVASRFSKLCYLIGQHGASLSSFLHGVKEARSLVILKHSSLFLDSYTEYCTSITNFLVMGGFQLLAKPAIDFLNKNQELLQDLSEVNDENTQLMEILNTLFFLPIRRLHNYAKVLLKLATCFEVASPEYQKLQDSSSCYECLALHLGRKRKEAEYTLGFWKTFPGKMTDSLRKPERRLLCESSNRALSLQHAGRFSVNWFILFNDALVHAQFSTHHVFPLATLWAEPLSEEAGGVNGLKITTPEEQFTLISSTPQEKTKWLRAISQAVDQALRGMSDLPPYGSGSSVQRQEPPISRSAKYTFYKDPRLKDATYDGRWLSGKPHGRGVLKWPDGKMYSGMFRNGLEDGYGEYRIPNKAMNKEDHYVGHWKEGKMCGQGVYSYASGEVFEGCFQDNMRHGHGLLRSGKLTSSSPSMFIGQWVMDKKAGYGVFDDITRGEKYMGMWQDDVCQGNGVVVTQFGLYYEGNFHLNKMMGNGVLLSEDDTIYEGEFSDDWTLSGKDNSGLIEQVGKCSLLPYFLKVCEALVLFLL

SEQ ID NO: 300436 - protein, 140 aa, Artificial Sequence [sequence omitted]

SEQ ID NO: 300437 - DNA, 384 bp, Artificial Sequence
  derived and/or modified sequence
atgctgctgcagcagcagctggacgacgccagaaacaaggccgacaaccaggagaaggccatcctgaacatccaggccagatgcgacgccagagtgcagaacctgcaggccgagtgcagaaagcacagactgctgctggaggaggacaacaagatgctggtgaacgagctgaaccacagcaaggagaaggagtgccagtacgagaaggagaaggccgagagagaggtggccgtgagacagctgcagcagaagagagacgacgtgctgaacaagggcagcgccaccaaggccctgctggacgccagcagcagacactgcacctacctggagaacggcatgcaggacagcagaaagaagctggaccagatgagaagccaggcctag

SEQ ID NO: 300438 - DNA, 384 bp, Artificial Sequence
  derived and/or modified sequence
atgctactccagcagcaactggacgacgccaggaacaaggctgataaccaggaaaaagccattctgaacatacaggcccgctgtgacgcccgcgtccagaatttgcaggcagagtgtcgcaaacacaggcttctgctggaagaggataacaagatgctcgtgaatgaactcaaccattccaaggagaaggaatgtcaatacgagaaagagaaagctgaacgtgaggtcgccgtccggcagcttcaacaaaagagagatgacgtgctgaacaaagggtctgccactaaggccctcctcgacgcctcgtcaagacattgcacgtacctggagaacggaatgcaggacagccggaaaaagcttgatcaaatgcggagccaagcctag

SEQ ID NO: 300439 - DNA, 384 bp, Artificial Sequence
  derived and/or modified sequence
atgctgctgcagcagcagctggatgatgccaggaacaaggctgacaaccaggagaaggccatcctgaacatccaggcccgctgtgatgcccgggtgcagaacctgcaggccgagtgcaggaagcaccggctgctgctggaggaggacaacaagatgctggtgaatgagctgaaccacagcaaggagaaggagtgccagtatgagaaggagaaggccgagcgggaggtggccgtgcggcagctgcagcagaagagagatgatgtgctgaacaagggcagcgccaccaaggccctgctggatgccagcagccgccactgcacctacctggagaatggcatgcaggacagcaggaagaagctggaccagatgaggagccaggcctag

SEQ ID NO: 300440 - DNA, 384 bp, Artificial Sequence
  derived and/or modified sequence
atgctgctgcagcagcagctggacgacgcccggaacaaggccgacaatcaagaaaaggccattttgaatatccaggcccggtgcgacgctcgcgtgcagaacctacaggccgaatgcagaaagcacaggttgctgttggaggaagacaataagatgttagtgaacgaactgaaccactccaaggagaaggaatgccagtacgagaaggaaaaggctgagagggaggtggctgtgcgccagctgcagcagaaaagagatgatgtgctgaataaagggagtgccaccaaggcgctcttggacgccagctcccgacattgtacctatctcgaaaatgggatgcaggattctcgaaaaaaattagaccagatgcgtagtcaggcatag

SEQ ID NO: 300441 - DNA, 384 bp, Artificial Sequence
  derived and/or modified sequence
atgctgctgcagcaacaattggatgacgccagaaataaggccgacaatcaagagaaggccattctgaatattcaggcacggtgcgatgcaagggtgcagaacttgcaagctgagtgtcgaaaacatcgattactcctggaggaggataacaaaatgctggtgaatgagctgaatcactcaaaagagaaagaatgtcagtacgaaaaggaaaaggccgaaagagaagttgctgtgcggcagttgcagcagaagcgtgacgatgtccttaacaaaggatcagccaccaaggccctgctggatgcatcgtcaaggcactgcacatatctggagaacggcatgcaagactcccgcaaaaaactggaccagatgcggtcacaagcatag

SEQ ID NO: 300442 - DNA, 360 bp, Artificial Sequence
  derived and/or modified sequence
atgggtacacgcacattgcagtttgagatctccgattctcatgagaaggaagaggaccttctgcataagaaccatcttatgcaagacgagatagccagactccggctggaaatccacaccataaaaaatcagatcttggaaaagaagtacctgaaagatatagaaattattaagagaaagcatgaggacctgcagaaagccctaaaacagaacggtgaaaaatccaccaagacaattgcacattactccgggcagcttacagcgctgacagatgagaatacaatgttgcgctccaagctggagaaagaaaaacagagtcgtcagagactcacgaaatggaatcacacgattgtcgattag

SEQ ID NO: 300443 - DNA, 360 bp, Artificial Sequence
  derived and/or modified sequence
atgggcaccaggaccctgcagtttgagatcagtgacagccatgagaaggaggaggacctgctgcacaagaaccacctgatgcaggatgaaattgcccggctgcggctggagatccacaccatcaagaaccagatcctggagaagaagtacctgaaggacatcgagatcatcaagaggaagcatgaggacctgcagaaggccctgaagcagaatggagagaagagcaccaagaccatcgcccactacagcggccagctgacagccctgacagatgagaacaccatgctgcggagcaagctggagaaggagaagcagagccggcagaggctgaccaagtggaaccacaccatcgtggactag

SEQ ID NO: 300444 - DNA, 360 bp, Artificial Sequence
  derived and/or modified sequence
atgggcacccggaccctgcagttcgagatcagcgacagccacgagaaggaagaggatctgctacacaagaaccacttaatgcaggacgagatcgcacgcctgcgtcttgaaatccacactatcaaaaatcagatactagagaaaaaatatctgaaagatatcgaaataattaagcgcaaacacgaggatcttcagaaggcactaaaacagaacggagagaagagcaccaaaaccatcgcccactattccggacagctgacagccttaaccgatgaaaacacaatgctccgttctaagctggagaaagaaaaacaatctaggcagcgcctcacaaagtggaatcacacgatcgttgattag

SEQ ID NO: 300445 - DNA, 1779 bp, Artificial Sequence
  derived and/or modified sequence
cctgtccgggggtgggggctaggggagggataacattacatgtatacctatgtaacaaacccgcatgttctgcacatgtaccccagaacttaaagtataatttaaaaaaagaagtatttccagaatctcatataaaaaaagaaaattaaaaatgcagtttatttatgtaaaagatcagtggaacttaaagataatcactgagtgacttacagtaaaaattaaaaaatgaaaaagactagtgtactacaaaagagactatctgaaaaaaaagaaatatcacagaatatcaaaaacttgaatgggaacaagaactctgcagtttgagatttctgatagtcatgaaaaagaagaagacctgttgcataaaaaccatttgatgcaagatgaaattgccaggctcaggctggaaatacacacaataaaaaatcaaatcctggaaaagaaatacttaaaagacattgaaattataaaaagaaagcatgaagaccttcaaaaggctctaaaacagaatggggaaaaatcaacaaaaacgatagcccattatagtggacagcttactgctctgacagatgagaacacaatgctccgttctaaactggagaaggaaaaacaaagcaggcaaagactgacgaaatggaatcataccatcgtagactgaatgttgctctacatgatcatgatcaaagtcactcaacagaaagagaccaagagcttgatttccagggcacagtagataaattgcgtcatttacaggaaaatttgaattctcatgttctgattctttctcagcaactttctaaagctgagagtaagtccaggtgcctcaaaactgagctccataacacaagagaggctctgaaagaaaacgctttggtttttgaacacatacaaagagagctaaaccaaacggtgtcaaatgaaggacattgaaaaaatgtacacaagtggccaagataaagtagaaaaatgcacagaaaagcaagtaagattatgtcaactacgaagacaaaatatgttgcttcaacagcaactggatgatgttcacaacaaagctgacaatcaagaaaaaacagtaattgatagtcaagccaaatgtgatgctacagcacaaaatcttcaagctgagtgcataaagcaccgtcttttgctagaagaacaagaggatgatcaataaagttaatcatttgaaagaaaaacaatgtcaatatgaaagagagaaagcagaaagagaagtagttgtgagacaacttcaacaaaaacagggtgacgtcctaaacaatcaacaacaaaagctttgctggatgcttcattgcgtcactgcgtccattgagaaagtgagatgtaggattcaaggaagaaattaggtcagatgagaattcaatttcaagaaaaatggaatcaacttacagcgactataaaatgtactaaggagacgcaaggccacgtacaaaaacttgaaatagaaaattctagtgttaagaaatacaattaaaaagcaagatggccaaattgagcagcttcagaaaatcctgcgaagttcaagtttgatgcagcagttattgcaagaaaatgaaactacagaaatagatgaagcttcttctgaatttaaatctggatcctctgtagcagaggttcccaacctacaggccatggacaggtccatgacctgttaggaaccagctgcacagcaggagagttactgtggatcttctagatcatctgcatgccatgtgaatcttaaaaccagtttttaatttctacaaaaaaaaaaaaaaaaaa

SEQ ID NO: 300446 - DNA, 360 bp, Artificial Sequence
  derived and/or modified sequence
atggggacccgcaccttacaatttgaaatctccgatagtcacgagaaggaggaggacctgctgcacaaaaaccatctcatgcaggacgaaattgcccgtctacgtctggaaatccatactataaagaatcagatcttagagaaaaaatatttaaaagacatagagattattaagcgtaaacacgaggaccttcagaaggccttgaagcaaaacggcgagaaaagtacaaaaaccatcgctcactactcaggccagctgacagcccttaccgacgaaaataccatgctaagaagcaagctggaaaaggagaaacaatctaggcagagactaactaagtggaaccacaccatcgtggactag

SEQ ID NO: 300447 - DNA, 360 bp, Artificial Sequence
  derived and/or modified sequence
atgggcaccagaaccctgcagttcgagatcagcgacagccacgagaaggaggaggacctgctgcacaagaaccacctgatgcaggacgagatcgccagactgagactggagatccacaccatcaagaaccagatcctggagaagaagtacctgaaggacatcgagatcatcaagagaaagcacgaggacctgcagaaggccctgaagcagaacggcgagaagagcaccaagaccatcgcccactacagcggccagctgaccgccctgaccgacgagaacaccatgctgagaagcaagctggagaaggagaagcagagcagacagagactgaccaagtggaaccacaccatcgtggactag

SEQ ID NO: 300448 - protein, 161 aa, Artificial Sequence
  derived and/or modified sequence
MTSRFRLPAGRTYNVRASELARDRQHTEVVCNILLLDNTVQAFKVNKHDQGQVLLDVVFKHLDLTEQDYFGLQLADDSTDNPRWLDPNKPIRKQLKKLLLLILGGSPYSLNFRVKFFVSDPNKLQEEYTRYQYFLQIKQDILTGRLPCPSNTAALLASFAV

SEQ ID NO: 300449 - DNA, 486 bp, Artificial Sequence
  derived and/or modified sequence
atgaccagcagattcagactgcccgccggcagaacctacaacgtgagagccagcgagctggccagagacagacagcacaccgaggtggtgtgcaacatcctgctgctggacaacaccgtgcaggccttcaaggtgaacaagcacgaccagggccaggtgctgctggacgtggtgttcaagcacctggacctgaccgagcaggactacttcggcctgcagctggccgacgacagcaccgacaaccccagatggctggaccccaacaagcccatcagaaagcagctgaagaagctgctgctgctgatcctgggcggcagcccctacagcctgaacttcagagtgaagttcttcgtgagcgaccccaacaagctgcaggaggagtacaccagataccagtacttcctgcagatcaagcaggacatcctgaccggcagactgccctgccccagcaacaccgccgccctgctggccagcttcgccgtgtag

SEQ ID NO: 300450 - DNA, 486 bp, Artificial Sequence
  derived and/or modified sequence
atgaccagtagattccgccttcctgccggacgcacttacaacgtgagagcctctgagctggcccgcgataggcagcacacagaagtagtctgcaatatcctcttactggataacacagtccaagcttttaaggtcaacaagcacgaccaggggcaagtgctattagatgtagttttcaagcatctcgacctgacggagcaagattattttggcctgcagctagctgacgattctacggataatccccggtggctggatcccaataaaccaattaggaaacagcttaaaaagttgctgcttctgatcttgggagggtctccatactctctcaactttagagtcaagttttttgtaagcgaccctaataaactgcaggaggagtacactcggtaccaatactttctccagatcaaacaagatatattaactggaagactgccctgtcccagtaataccgccgccttgttggcatctttcgcagtctag

SEQ ID NO: 300451 - DNA, 486 bp, Artificial Sequence
  derived and/or modified sequence
atgaccagccgcttccggctgcctgctggccgcacctacaacgtgcgggccagcgagctggcccgggaccggcagcacacagaggtggtgtgcaacatcctgctgctggacaacacagtgcaggccttcaaggtgaacaagcatgaccagggccaggtgctgctggatgtggtgttcaagcacctggacctgacagagcaggactacttcggcctgcagctggctgatgacagcacagacaacccccgctggctggaccccaacaagcccatcaggaagcagctgaagaagctgctgctgctgatcctgggcggcagcccctacagcctgaacttccgggtgaagttctttgtgtctgaccccaacaagctgcaggaggagtacacccgctaccagtacttcctgcagatcaagcaggacatcctgaccggccgcctgccctgccccagcaacacagctgccctgctggccagctttgctgtgtag

SEQ ID NO: 300452 - DNA, 486 bp, Artificial Sequence
  derived and/or modified sequence
atgaccagccggttccggctgcccgccggccggacctacaacgtgcgggcaagcgaattggcccgggacaggcagcatacagaggtggtttgtaacatcctactgttagataacacagtgcaggctttcaaggtaaacaaacacgaccagggacaggtgctgcttgatgtggtgttcaagcacctggacctgactgagcaagactacttcgggttgcaattggctgatgattcaactgataatccaagatggctggatcccaacaagccgattcgcaagcagctgaagaagctcctgctcctgatcctgggagggtccccgtattccttaaacttccgagtgaaattctttgtgtcagaccccaacaagctccaggaagagtatactagatatcaatacttcctacaaatcaagcaggatatacttactggacgcctgccttgtccttctaacaccgcagctctgctcgcctcattcgcggtttag

SEQ ID NO: 300453 - DNA, 662 bp, Artificial Sequence
  derived and/or modified sequence
ctggcggctccgggtcgtggcgcgaccgctgcggcggcggctgctcggggggcgctgaggtagccccccggagcggcacggaggacgcgcttctcctctgcgcgccggggcctcgaggctttttttctccagccgagaggacgcggctgtgatatacgaagactttgtgtggacagtaatgacctcacgtttccgattgcctgctggcagaacctacaatgtacgagcatcagagttggcccgagacagacagcatactgaagtggtttgcaacatccttcttctggataacactgtacaagctttcaaagtcaataaacatgatcaggggcaagtcttgttggatgtcgtcttcaagcatctagatttgactgagcaggactattttggtttacagttggctgatgattccacagataacccaaggtggctggatccaaacaaaccaataaggaagcagctaaagaaactacttttattaattctaggaggatctccttacagtttgaactttagagtcaaattttttgtaagtgaccccaacaagttacaagaagaatatacaaggtaccagtattttttgcaaattaaacaagacattcttactggaagattaccctgtccttctaatactgctgcccttttagcttcatttgctgttc

SEQ ID NO: 300454 - DNA, 486 bp, Artificial Sequence
  derived and/or modified sequence
atgaccagccgcttccgtctgcctgccggaaggacgtacaatgtcagggcaagcgaactggctcgcgatcgacagcataccgaagtcgtgtgcaatatcctgcttctggataataccgttcaggcgttcaaggttaacaagcacgaccagggacaagtgctgctcgacgtcgttttcaagcatctggatctcactgagcaggattacttcggactgcagctggccgatgacagcacggataacccccgttggctcgaccctaataagcctatccgtaagcagctgaaaaaattgttactgctcattctaggtggctccccttacagccttaattttagggtcaaattcttcgtcagcgaccccaacaaacttcaggaagaatacacccggtaccagtattttctccaaatcaagcaagacatcctcaccgggagactgccatgcccttctaacactgctgcgctcctcgctagcttcgccgtatag

SEQ ID NO: 300455 - protein, 75 aa, Artificial Sequence
  derived and/or modified sequence
MTSRFRLPAGRTYNVRASELARDRQHTEVVCNILLLDNTVQAFKVNKHDQGQVLLDVVFKHLDLTEQDYFGLQLA

SEQ ID NO: 300456 - DNA, 228 bp, Artificial Sequence
  derived and/or modified sequence
atgaccagcagattcagactgcccgccggcagaacctacaacgtgagagccagcgagctggccagagacagacagcacaccgaggtggtgtgcaacatcctgctgctggacaacaccgtgcaggccttcaaggtgaacaagcacgaccagggccaggtgctgctggacgtggtgttcaagcacctggacctgaccgagcaggactacttcggcctgcagctggcctag

SEQ ID NO: 300457 - DNA, 228 bp, Artificial Sequence
  derived and/or modified sequence
atgacttcacgctttaggctgccagcgggacggacctataatgtccgggcctcagagctcgcccgggatagacagcatactgaggtggtgtgcaatatcttactcctggacaacacggtgcaggcgtttaaggttaataaacacgaccagggccaggtgctgctggacgtggtattcaagcacttagacctgacagagcaggattactttggactccagctcgcttag

SEQ ID NO: 300458 - DNA, 228 bp, Artificial Sequence
  derived and/or modified sequence
atgaccagccgcttccggctgcctgctggccgcacctacaacgtgcgggccagcgagctggcccgggaccggcagcacacagaggtggtgtgcaacatcctgctgctggacaacacagtgcaggccttcaaggtgaacaagcatgaccagggccaggtgctgctggatgtggtgttcaagcacctggacctgacagagcaggactacttcggcctgcagctggcctag

SEQ ID NO: 300459 - DNA, 228 bp, Artificial Sequence
  derived and/or modified sequence
atgaccagccggttccggctgcccgccggccggacctacaacgtgcgggcaagcgagctggccagagatagacagcacacggaagtggtttgcaacattctcctgctggataacaccgtgcaggcctttaaggttaataaacacgaccagggacaagtgctgctcgacgttgtgttcaagcacttagatctcacagaacaagactatttcgggctgcagctggcctag

SEQ ID NO: 300460 - DNA, 568 bp, Artificial Sequence
  derived and/or modified sequence
ctccccagcggcgccggcccgcggctgcccagcagcatgaggtggtgctggcggctccgggtcgtggcgcgaccgctgcggcggcggctgctcggggggcgctgaggtagccccccggagcggcacggaggacgcgcttctcctctgcgcgccggggcctcgaggctttttttctccagccgagaggacgcggctgtgatatacgaagagtcttgctgtgtcgtctgggttggagtgcagtggcacaatctcagctcattgcaacttctgcctcctgggttcaagcgattctcctgcctcagcctcccgagtagctgggactacagactttgtgtggacagtaatgacctcacgtttccgattgcctgctggcagaacctacaatgtacgagcatcagagttggcccgagacagacagcatactgaagtggtttgcaacatccttcttctggataacactgtacaagctttcaaagtcaataaacatgatcaggggcaagtcttgttggatgtcgtcttcaagcatctagatttgactgagcaggactattttggtttacagttggct

SEQ ID NO: 300461 - DNA, 228 bp, Artificial Sequence
  derived and/or modified sequence
atgacaagtcggttccggctgcccgctgggagaacttacaacgtccgtgccagtgaactcgctcgcgaccgccaacataccgaggtggtctgtaacattctgcttctcgacaacaccgtgcaggcatttaaagtgaacaaacacgaccagggacaggtcctgctggacgtggtttttaagcacctcgacctaactgagcaagactattttggtctgcagttggcctag

SEQ ID NO: 300462 - DNA, 1680 bp, Artificial Sequence
  derived and/or modified sequence
atggactgggaggtggtgagcagaaacagcatcagcgacgacagactggagacccagagcctgcccagcagaagcccccccggcacccccaaccacagaaacagcaccttcacccaggagggcaccagactgagacccagcagcgtgggccacctggtggaccacatggtgcacaccagccccagcgaggtgttcgtgaaccagagaagccccagcagcacccaggccaacagcatcgtgctggagagcagccccagccaggagacccccggcgacggcaagccccccgccctgccccccaagcagagcaagaagaacagctggaaccagatccactacagccacagccagcaggacctggagagccacatcaacgagaccttcgacatccccagcagccccgagaagcccacccccaacggcggcatcccccacgacaacctggtgctgatcagaatgaagcccgacgagaacggcagattcggcttcaacgtgaagggcggctacgaccagaagatgcccgtgatcgtgagcagagtggcccccggcacccccgccgacctgtgcgtgcccagactgaacgagggcgaccaggtggtgctgatcaacggcagagacatcgccgagcacacccacgaccaggtggtgctgttcatcaaggccagctgcgagagacacagcggcgagctgatgctgctggtgagacccaacgccgtgtacgacgtggtggaggagaagctggagaacgagcccgacttccagtacatccccgagaaggcccccctggacagcgtgcaccaggacgaccacagcctgagagagagcatgatccagctggccgagggcctgatcaccggcaccgtgctgacccagttcgaccagctgtacagaaagaagcccggcatgaccatgagctgcgccaagctgccccagaacatcagcaagaacagatacagagacatcagcccctacgacgccaccagagtgatcctgaagggcaacgaggactacatcaacgccaactacatcaacatggagatccccagcagcagcatcatcaaccagtacatcgcctgccagggccccctgccccacacctgcaccgacttctggcagatgacctgggagcagggcagcagcatggtggtgatgctgaccacccaggtggagagaggcagagtgaagtgccaccagtactggcccgagcccaccggcagcagcagctacggctgctaccaggtgacctgccacagcgaggagggcaacaccgcctacatcttcagaaagatgaccctgttcaaccaggagaagaacgagagcagacccctgacccagatccagtacatcgcctggcccgaccacggcgtgcccgacgacagcagcgacttcctggacttcgtgtgccacgtgagaaacaagagagccggcaaggaggagcccgtggtggtgcactgcagcgccggcatcggcagaaccggcgtgctgatcaccatggagaccgccatgtgcctgatcgagtgcaaccagcccgtgtaccccctggacatcgtgagaaccatgagagaccagagagccatgatgatccagacccccagccagtacagattcgtgtgcgaggccatcctgaaggtgtacgaggagggcttcgtgaagcccctgaccaccagcaccaacaagtag

SEQ ID NO: 300463 - DNA, 1680 bp, Artificial Sequence
  derived and/or modified sequence
atggactgggaggttgtctccagaaactccatttccgacgataggcttgagacccaatctcttccatcacgcagtccaccgggaaccccaaaccaccgcaacagtacttttacccaagaaggcacgcgactgcgacccagcagcgtgggccaccttgtggatcacatggtgcatacaagccccagcgaagtctttgtcaatcagaggtcgcccagctccacccaagcgaatagcatcgtgttggaaagttcaccgtcacaggaaacacccggcgacggaaagccacctgctctgccccccaagcagtctaaaaaaaacagctggaaccagattcattatagccattcacagcaagatttggaaagccatatcaatgagactttcgacatcccctcctcaccggagaagccaacaccaaacggcggtatccctcacgataacttggttctgatcaggatgaagccagatgaaaacgggcgttttggctttaacgtgaagggagggtacgaccagaagatgcctgtaattgtatcaagagtggccccaggcacccccgccgacctgtgtgtcccaagactaaatgaaggtgaccaggtggtactgatcaatgggagagatattgccgagcatactcacgaccaagtggtgctcttcatcaaagccagctgcgagaggcattccggggagctgatgctcctggtgagacccaatgctgtctatgacgtggtggaggagaagttagaaaatgaacccgatttccagtacattcccgaaaaagcccccctcgacagtgtgcaccaagatgaccattcgctgagagagtctatgattcagctggcagagggattaatcacgggcactgtcttaacacagttcgatcaactgtatcgaaaaaaaccagggatgaccatgtcttgcgctaagcttccgcagaacataagcaaaaataggtatagggatatctctccgtacgatgcaacgagggtcattctaaaaggcaacgaggattatataaacgcaaactacatcaatatggagatcccttcctccagcatcattaatcagtacattgcctgtcagggccctctcccccacacatgtactgacttctggcagatgacttgggaacagggatcatccatggtcgtgatgctcacgacccaggtcgagcgcggtcgcgtgaagtgccaccagtactggcctgaaccgacaggctcttctagctacggatgttaccaagtaacgtgtcactctgaggagggcaacactgcatatatcttcaggaagatgactctttttaaccaggagaagaacgaatccagaccattgactcagatacaatatatcgcgtggcccgatcacggcgtgcccgatgactcatctgattttctggactttgtatgccatgtgcggaacaaaagagctgggaaggaggagcccgtggtggtgcattgcagcgctggtattggccgcacaggcgtgttgatcaccatggagacagcaatgtgtttgatcgagtgtaaccagccagtctatccgttggatattgttagaactatgcgcgatcaaagggcaatgatgatccagaccccctcccagtaccggttcgtttgcgaggcaatcctcaaggtgtacgaagaggggtttgtgaaaccactaactaccagcaccaacaaatag

SEQ ID NO: 300464 - DNA, 1680 bp, Artificial Sequence
  derived and/or modified sequence
atggactgggaggtggtgtccaggaacagcatcagtgatgaccggctggagacccagagcctgcccagccgcagccccccaggcacccccaaccacaggaacagcaccttcacccaggagggcacccggctgcggcccagctctgtgggccacctggtggaccacatggtgcacaccagccccagcgaggtgtttgtgaaccagaggagccccagcagcacccaggccaacagcatcgtgctggagagcagccccagccaggagaccccaggagatggcaagcccccagccctgccccccaagcagagcaagaagaacagctggaaccagatccactacagccacagccagcaggacctggagagccacatcaatgagacctttgacatccccagcagccctgagaagcccacccccaacggcggcatcccccatgacaacctggtgctgatccgcatgaagccagatgaaaatggccgcttcggcttcaacgtgaagggcggctatgaccagaagatgcctgtgattgtgtcccgggtggcccctggcaccccagctgacctgtgtgtgccccggctgaatgaaggagaccaggtggtgctgatcaatggccgggacattgctgagcacacccatgaccaggtggtgctcttcatcaaggccagctgtgagcggcacagcggggagctgatgctgctggtgcggcccaatgctgtgtatgatgtggtggaggagaagctggagaatgaaccagacttccagtacatccctgagaaggcccccctggacagcgtgcaccaggatgaccacagcctgcgggagagcatgatccagctggccgagggcctcatcactggaacagtgctgacccagtttgaccagctgtacaggaagaagccaggcatgaccatgagctgtgccaagctgccccagaacatcagcaagaaccgctacagagacatcagcccctatgatgccaccagggtcatcctgaagggaaatgaagactacatcaatgccaactacatcaacatggagatccccagcagcagcatcatcaaccagtacatcgcctgccagggccccctgccccacacctgcacagacttctggcagatgacctgggagcagggcagctccatggtggtgatgctgaccacccaggtggagcggggccgggtgaagtgccaccagtactggccagagcccaccggcagcagcagctatggctgctaccaggtgacctgccacagcgaggagggcaacacagcctacatcttcaggaagatgaccctcttcaaccaggagaagaatgaaagccggcccctgacccagatccagtacatcgcctggccagaccacggcgtgcctgatgacagcagtgacttcctggactttgtgtgccacgtgaggaacaagagagctgggaaggaggagcctgtggtggtgcactgcagcgctggcattggaagaactggagtgctgatcaccatggagacagccatgtgcctgattgagtgcaaccagcctgtgtaccccctggacatcgtgaggaccatgagggaccagagggccatgatgatccagacccccagccagtacagatttgtgtgtgaggccatcctgaaggtgtatgaggagggctttgtgaagcccctgaccaccagcaccaacaagtag

SEQ ID NO: 300465 - DNA, 1680 bp, Artificial Sequence
  derived and/or modified sequence
atggactgggaggtggtgagccggaacagcatcagcgacgaccggctcgaaacccagtcattaccatcccgatcccctccgggtacccctaatcaccgaaacagcacgttcacacaggagggaacgcgactgcgaccctccagcgtcggacacttggtggatcatatggtccacacaagccccagtgaggtttttgtgaatcagaggagtccgagctctacacaggccaacagcattgtcttagagtcctccccaagtcaagagactcccggcgatggtaaacctcccgcactgccccccaagcaaagcaaaaaaaatagctggaatcagatacactactctcactctcagcaggacctggaaagtcatataaacgaaactttcgacatcccctcctccccagaaaagcccacccctaatggtggcatcccccatgataacctggtactgatcagaatgaaaccagacgagaacggccgcttcggcttcaacgtaaaggggggatacgatcagaagatgccggtcatcgtgtcccgagtggcccctggaacccccgcggatctctgtgttccccgcctgaatgagggagatcaagtagttttgatcaacggacgcgacattgccgagcatacacacgatcaggttgtactcttcatcaaggcaagttgcgagcgccactctggtgagctcatgctgctggtgcggcctaatgcggtctatgatgtcgtggaggagaaattggaaaatgaacctgactttcagtacattccagagaaggcgcccctcgattctgtgcatcaagatgatcatagcctccgggaatccatgatacagctggccgagggactcattactggcaccgtgctgacacagtttgatcagctgtatcgaaagaaacctgggatgacgatgtcttgcgctaagctgcctcagaacattagtaaaaatagataccgtgatattagcccctatgacgcaacccgtgtaatcctgaagggaaacgaggactacattaatgccaattacataaacatggagatcccctccagtagcatcattaatcagtacatagcctgtcaggggcccctgcctcacacttgcactgacttctggcaaatgacgtgggaacaggggtccagtatggtggtcatgttaaccacacaggtcgagagagggcgggtgaagtgccaccaatactggcctgagcccacgggaagttctagctacggatgctatcaggttacctgtcactctgaagaaggcaacacagcttatatattccgaaagatgaccctgttcaaccaggaaaagaacgagagccggcctcttacccaaatccagtatattgcttggcccgatcacggcgttcccgacgacagctctgatttcctcgatttcgtctgtcacgtacggaacaaaagagccggtaaggaggaaccagtggtcgtgcattgctcggctgggattgggcggaccggagttctgattacaatggaaacagctatgtgtctaatcgagtgtaaccagcccgtgtacccattagatatcgttcggaccatgcgggatcaaagagccatgatgattcagaccccgtcccagtatcggtttgtgtgtgaagccatattaaaagtctatgaagaaggttttgtgaaacctcttaccaccagcactaataagtag

SEQ ID NO: 300466 - DNA, 1964 bp, Artificial Sequence
  derived and/or modified sequence
gtccagccatgtttagtccattaacagcaataaagtgttctgacgcttcagactagatccccaagtaagcccttggcacggaaattaatggattgggaagtagtaagcagaaattcaatatctgatgacaggttagaaacacaaagtcttccatcacgatctccaccgggaactcctaatcatcgaaattctacattcacgcaggaaggaacccggttacgaccatcttcagttggtcatttggtagaccatatggttcatacttccccaagcgaagtgtttgtaaatcagagatctccgtcatcaacacaagctaatagcattgttctggaatcatcaccatcacaagagacccctggagatgggaagcctccagctttaccacccaaacagtcaaagaaaaacagttggaaccaaattcattattcacattcgcaacaagatctagaaagtcatattaatgaaacatttgatattccatcttctcctgaaaaacccactcctaatggtggtattccacatgataatcttgtcctaatcagaatgaaacctgatgaaaatgggaggtttggattcaatgtaaagggaggatatgatcagaagatgcctgtgattgtgtctcgagtagcaccaggaacacctgctgacctctgtgtccctagactgaatgaaggggaccaagttgtactgatcaatggtcgggacattgcagaacacactcatgatcaggttgtgctgtttattaaagctagttgtgagagacattctggggaactcatgcttctagttcgacctaatgctgtatatgatgtagtggaagaaaagctagaaaatgagccagatttccagtatattcctgagaaagccccactagatagtgtgcatcaggatgaccattccctgcgggagtcaatgatccagctagctgaggggcttatcactggaacagtcctgacacagtttgatcaactgtatcggaaaaaacctggaatgacaatgtcctgtgccaaattacctcagaatatttccaaaaatagatacagagatatttcgccttatgatgccacacgggtcattttaaaaggtaatgaagactacatcaatgcgaactatataaatatggaaattccttcttccagcattataaatcagtacattgcttgtcaagggccattaccacacacttgtacagatttttggcagatgacttgggaacaaggctcctctatggttgtaatgttgaccacacaagttgaacgtggcagagttaaatgtcaccaatattggccagaacccacaggcagttcatcttatggatgctaccaagttacctgccactctgaagaaggaaacactgcctatatcttcaggaagatgaccctatttaaccaagagaaaaatgaaagtcgtccactcactcagatccagtacatagcctggcctgaccatggagtccctgatgattcgagtgactttctagattttgtttgtcatgtacgaaacaagagggctggcaaggaagaacccgttgttgtccattgcagtgctggaatcggaagaactggggttcttattactatggaaacagccatgtgtctcattgaatgcaatcagccagtttatccactagatattgtaagaacaatgagagatcagcgagccatgatgatccaaacacctagtcaatacagatttgtatgtgaagctattttgaaagtttatgaagaaggctttgttaaacccttaacaacatcaacaaataaataagaaagcaaaaagatctgggatatgtgttggaaaactgctttcccttatgttcactgtgccataatgctgctcgcaggaaatggcattttacaaaaaaaaaatgaagaactcaaaaaaactttgaaaacttcagcactgttgcactttatgttttaaaaaatgtcactctttcaaaatctataactcatgtatttgaa

SEQ ID NO: 300467 - DNA, 1680 bp, Artificial Sequence
  derived and/or modified sequence
atggattgggaggttgtaagtaggaacagcatctccgatgacagactggagactcaatcgcttccaagccggagcccacctgggactcctaatcaccgaaattccacctttacacaggagggcacgcggttgaggccatcctctgtcggacatctggttgatcatatggtacatacttcaccatccgaggtgtttgttaatcaacggagccccagttccactcaggcaaattcaattgtcctggagtccagcccttcccaggaaacacccggtgacgggaaacccccagctctccccccaaagcaatccaagaagaactcttggaatcagatccattactctcatagccagcaggacttagaatcccacatcaatgagaccttcgacatacctagcagtcctgagaaacctacacccaatggcggaatcccccatgataatctcgtgttaattagaatgaagcctgacgaaaacggaagattcggcttcaatgtaaaaggcggttacgatcagaagatgcctgtgatcgtaagtagagttgccccaggcacccccgcagatctgtgtgttccaaggctaaacgaaggggaccaggttgtgctcatcaatggtagggacattgccgaacacacccacgaccaggttgtgctctttattaaagcttcttgtgagaggcatagcggcgagctgatgctcttggtccggccaaatgcagtttacgacgttgtggaggaaaagttggagaacgagcccgacttccagtacatccctgaaaaagctcctttagattccgtgcaccaagatgatcactctctccgagaatcaatgatccagctcgccgaaggactgatcacaggaaccgtgctgacccaattcgatcagctgtatagaaaaaagccgggaatgactatgtcgtgtgctaaacttcctcagaatattagcaagaaccgttatagagacattagtccctatgacgctaccagggtcattctcaagggcaatgaggactacatcaatgccaactacatcaatatggagatacccagcagttcaatcatcaatcagtatattgcgtgccagggccctctccctcacacgtgcaccgatttctggcagatgacctgggagcaggggtcaagtatggtagtgatgctaaccacacaggtggagaggggcagggtgaagtgccatcagtattggcccgagcccactgggtcaagctcgtatggatgctaccaggtaacttgccacagcgaggaagggaatacagcttatatattccgcaagatgacactcttcaatcaagagaaaaacgagtcccgaccgttgacccagatccagtatatcgcctggccggaccacggggtgcctgacgatagcagtgatttcttggacttcgtttgccacgtgagaaacaaaagagccggtaaagaggagccagtagtagtccattgtagcgcaggcatcgggagaaccggtgtgctcattaccatggaaaccgccatgtgcctgatcgaatgtaaccagcctgtgtatcctcttgatatcgtgcgcacaatgagggatcagcgtgcaatgatgatccaaaccccatcccagtatcggtttgtttgcgaggccattctgaaggtgtatgaggaagggtttgtcaagccgctcaccacaagcacaaacaaatag

SEQ ID NO: 300468 - DNA, 489 bp, Artificial Sequence
  derived and/or modified sequence
atgagacggccaaggcgccccggaggtctaggtggaagtggcggcctccgcctgcttctctgccttctccttcttagttcacggcccggcggctgctctgcagttagcgcccacggttgtctgtttgataggcggctttgctcacacctggaggtgtgtattcaagatggactgtttggacaatgtcaggtaggggtagggcaggctcgcccactgctccaggttaccagcccagtgcttcagcgtctgcagggcgtgttacggcagctcatgtctcaaggattaagttggcacgatgacctgacacagtacgtgatttcccaggagatggagcgaataccgaggctgcggcccccagaaccccgccccagagatcggagtggcttggcgcccaagcgtcccggccctgcaggcgaactcctcttgcaggacatccccacaggctctgctcccgccgcccagctgctctccgtgccttcagcaggttag

SEQ ID NO: 300469 - DNA, 489 bp, Artificial Sequence
  derived and/or modified sequence
atgaggcggcccaggaggcctgggggcctgggcggcagcggcggcctgcggctgctgctgtgcctgctgctgctgagcagcaggcctgggggctgcagcgctgtgtctgcccacggctgcctgtttgaccggcggctgtgcagccacctggaggtgtgcatccaggacggcctgtttggccagtgccaggtgggcgtgggccaggcccggcccctgctgcaggtgaccagccctgtgctgcagaggctgcagggcgtgctgcggcagctgatgagccagggcctgtcctggcatgatgacctgacccagtatgtgatcagccaggagatggagcgcatcccccggctgcggcccccagagccccggccccgggacagaagtggcctggcccccaagaggcctggccctgctggggagctgctgctgcaggacatccccactggaagtgccccagctgcccagctgctgtctgtgcccagcgctggatag

SEQ ID NO: 300470 - DNA, 489 bp, Artificial Sequence
  derived and/or modified sequence
atgcggcggccccggcggcccggcggcctgggcggcagcggcggcttaaggcttctgctgtgcctcttgcttctatcgtctcggcctggaggctgcagtgccgtctccgctcacggttgtctctttgataggcgcctgtgttcccacctcgaagtatgcattcaggatgggctctttgggcagtgtcaggttggtgtgggccaagcccgcccactcctccaagttacaagcccagtactccagcgcttacagggagtcctcaggcagcttatgtcccaggggctgtcatggcacgacgacctgacgcagtatgtgatttctcaagagatggaacgtatcccgcggcttcgccccccggagcctcgtccgcgggatcgcagcgggttagcccccaagcgtcccggtcctgctggggagctcctgctgcaagacatacccacgggaagcgcccctgcagcccaattgctctcagtcccgtccgccggatag

SEQ ID NO: 300471 - DNA, 489 bp, Artificial Sequence
  derived and/or modified sequence
atgcggcgtcctcgcaggcccggagggttaggagggtctggcggacttaggttgctgctctgcctgctgctcttgagctctagaccaggtggctgtagtgcagtaagcgcacacgggtgcctgttcgaccgccgtctttgcagccacttagaggtctgcatacaggacggactcttcggacaatgccaagttggggtaggccaggcacgtccattactgcaggtcacatccccagttctgcaacgcctgcagggcgtactacgacagctgatgagtcagggactgagttggcacgacgacctgacccagtacgtgatttcccaggagatggaaagaatccctagactgaggcctcccgagcccagaccaagggataggtctggtctcgcacctaaacggcctggcccagccggtgaactgctgctccaggacatccccaccgggtcagcaccagctgcacaacttttgagcgtgccaagtgccggatag

SEQ ID NO: 300472 - DNA, 489 bp, Artificial Sequence
  derived and/or modified sequence
atgagaagacccagaagacccggcggcctgggcggcagcggcggcctgagactgctgctgtgcctgctgctgctgagcagcagacccggcggctgcagcgccgtgagcgcccacggctgcctgttcgacagaagactgtgcagccacctggaggtgtgcatccaggacggcctgttcggccagtgccaggtgggcgtgggccaggccagacccctgctgcaggtgaccagccccgtgctgcagagactgcagggcgtgctgagacagctgatgagccagggcctgagctggcacgacgacctgacccagtacgtgatcagccaggagatggagagaatccccagactgagaccccccgagcccagacccagagacagaagcggcctggcccccaagagacccggccccgccggcgagctgctgctgcaggacatccccaccggcagcgcccccgccgcccagctgctgagcgtgcccagcgccggctag

SEQ ID NO: 300473 - DNA, 1704 bp, Artificial Sequence
  derived and/or modified sequence
atgtggttctcaccaagatctaagaaagttcgttatgtcgtgagcaaggctagcgttcagacccagccagcaatcaaaaaggatgcctcagcccaacaggattcctatgaattcgtcagcccctctccgccagctgacgtgtccgaacgcgctaaaaaggcatctgctcggagcgggaagaagcagaaaaaaaagaccctcgccgaaattaaccagaagtggaatctggaggctgaaaaagaagacggagaattcgattctaaagaagaaagcaaacagaaactggtcagcttctgctctcagccttctgtcataagcagtcctcagataaacggcgaaatcgatctgctagcctctgggagcttgaccgagagcgaatgcttcggaagcttgaccgaggtcagcttgccgctggccgagcagatcgagagccctgacactaaaagccgtaacgaagttgtaactcccgagaaggtttgcaagaactacctaaccagtaagaagagtctgcctctggagaacaatggaaagcggggacatcataaccgactctccagtcctatctcaaaacgctgtagaacctccattctgagcacatcaggggatttcgttaagcagacagtcccctccgagaatattccactcccagagtgctcttcaccacctagttgtaagcgcaaagttggcggaaccagtggcaggaagaactctaacatgtcagacgaattcatttccctctctcctggcacccccccctcgactctgtcctcaagctcttacaggagggtaatgtccagcccttcagctatgaagctcctgcccaatatggcggtgaagcgcaaccatcgcggagagacactcctgcacatcgccagcatcaaaggggacattccaagcgtcgagtacttgcttcaaaacggtagtgatccaaatgtgaaagatcatgccggctggaccccactgcacgaagcctgcaaccacggacacttgaaagtggtggaactcctgctgcagcataaagcccttgttaacacgacaggctatcagaacgattcccccctgcacgacgctgccaagaatggccacgtggatatagtgaaattgttgctcagttacggtgccagtagaaatgccgtgaatatctttggccttcgccccgtagattacacagacgatgaatccatgaagtcactgctgctcctcccagagaagaacgaatcatcttccgcatcccactgttctgtgatgaataccgggcagcggcgggacggcccacttgtgctcatcggcagcggtctctcttctgagcagcagaagatgctctccgaactggccgtgatcttaaaagcaaaaaagtacaccgagtttgacagtacagtgacccacgtcgtggtccccggcgacgccgtccaaagtacgcttaagtgtatgcttggcatcctaaacggatgttggatccttaagtttgagtgggtgaaagcctgcttacggagaaaagtttgtgagcaggaagaaaagtatgaaattcccgaggggccacggcgctcaaggttgaatcgggagcactgccaaagctgcctgatggacgccaccagtatttgcggtgagccgtcgaacacaattcagcgaaccacattgctgtcatcatctctgcaggtgggcgccaggagtagtgtcgaaagcccttcccagaccgttacttag

SEQ ID NO: 300474 - DNA, 1704 bp, Artificial Sequence
  derived and/or modified sequence
atgtggttcagccccaggagcaagaaggtgcgctacgtggtgtccaaggcctctgtgcagacccagcctgccatcaagaaggatgccagcgcccagcaggacagctatgaatttgtgagccccagccccccagcagatgtgtctgagcgggccaagaaggccagcgcccggagcggcaagaagcagaagaagaagaccctggccgagatcaaccagaagtggaacctggaggccgagaaggaggatggagaatttgacagcaaggaggagagcaagcagaagctggtgtccttctgcagccagcccagcgtcatcagcagcccccagatcaatggagaaattgacctgctggccagcggcagcctgacagaaagtgagtgcttcggcagcctgacagaggtgtccctgcccctggccgagcagatcgagagcccagacaccaagagcagaaatgaggtggtgaccccagagaaggtgtgcaagaactacctgaccagcaagaagagcctgcccctggagaacaacgggaagaggggccaccacaaccggctgagcagccccatcagcaagcgctgcaggaccagcatcctgagcaccagcggggactttgtgaagcagacagtgcccagcgagaacatccccctgcctgaatgtagcagcccccccagctgcaagaggaaggtgggcggcaccagcggcaggaagaacagcaacatgtctgatgagttcatcagcctgagccctggcaccccacccagcaccctgagcagcagcagctacagaagagtgatgagcagccccagcgccatgaagctgctgcccaacatggctgtgaagaggaaccacagaggagagaccctgctgcacatcgccagcatcaagggggacatccccagcgtggagtacctgctgcagaatggaagtgaccccaacgtgaaggaccacgccggctggacccccctgcacgaggcctgcaaccacggccacctgaaggtggtggagctgctgctgcagcacaaggccctggtgaacaccaccggctaccagaatgacagccccctgcatgatgctgccaagaatggccacgtggacatcgtgaagctgctgctgtcctatggagccagcagaaatgctgtgaacatcttcggcctgcggcctgtggactacacagatgatgagagcatgaagagcctgctgctgctgcctgagaagaatgaaagcagcagcgccagccactgcagcgtgatgaacacaggccagaggagagatggccccctggtgctgattggcagcggcctgagcagcgagcagcagaagatgctgtctgagctggccgtcatcctgaaggccaagaagtacacagaatttgacagcacagtgacccacgtggtggtgcctggagatgctgtgcagagcaccctgaagtgcatgctgggcatcctgaatggctgctggatcctgaagtttgagtgggtgaaggcctgcctgcggaggaaggtgtgtgagcaggaggagaagtatgagatccctgagggcccccggcgcagccggctgaaccgggagcactgccagagctgcctgatggatgccaccagcatctgtggggagcccagcaacaccatccagaggaccaccctgctgagcagcagcctgcaggtgggcgcccggagctctgtggagagccccagccagacagtgacctag

SEQ ID NO: 300475 - DNA, 1704 bp, Artificial Sequence
  derived and/or modified sequence
atgtggttcagcccccggagcaagaaggtgcggtacgtggtgagcaaagcatcagtgcaaacacagcccgccattaaaaaagacgcctctgcccaacaggattcctatgaatttgtctccccatctcctccagccgatgtgtccgagcgagccaagaaggccagcgcaaggtccggcaagaaacaaaaaaagaagaccctggcggagattaaccagaaatggaatctcgaggctgaaaaagaagatggggagtttgactcaaaagaggaaagcaagcagaagctcgttagcttttgcagtcagcctagcgtcattagcagtccacagattaatggtgagatcgatctgctcgcaagtggctccttgaccgaatccgaatgctttggatccctgaccgaggtgagtctgcccctggcagagcagatagagtctcccgatactaaatctcggaacgaggttgttactcccgaaaaggtctgcaagaactatcttaccagtaaaaagtccctccctttggaaaataatggaaaaagaggccaccacaatcggctgtcgtctccaattagtaagaggtgtcgtacttctatactctctacatccggagacttcgtcaagcagactgtaccttcagagaacatccccctcccggaatgctcctcaccaccctcttgcaaacggaaagtgggcggaacgagcgggaggaagaattccaatatgtccgatgagttcatatccctctctccaggaaccccaccttctacgttaagtagtagctcttatcgccgtgttatgtccagccccagtgcaatgaaactcctacctaacatggccgttaaacgaaatcacaggggagagaccctcctccatattgcatctataaaaggtgatattccctccgtggagtacttgctacagaacggatccgaccctaacgttaaggaccacgcgggctggaccccactgcatgaagcttgtaatcacggacacttaaaagtcgtggaactgttgctccaacataaagccctggtgaacacgacagggtatcagaatgattctccactacatgacgccgcaaagaatggccacgtggatatcgtgaagctgctgctttcttatggagcttcccgcaacgctgttaatatttttggtctcagacctgtggactacaccgacgacgagtccatgaaaagtttattactgctgccagaaaagaacgaaagctcctccgcgagccattgcagcgtgatgaacaccggccaacggcgcgatggacctttagtgctcatcgggtcggggctgagcagtgaacaacaaaagatgttatccgagctcgccgttatcttgaaggcgaaaaaatacactgagtttgatagcacagtgacgcacgttgtagtgccaggggacgccgtgcaaagcacccttaaatgcatgctaggtattctgaacggatgttggatcctgaaattcgagtgggtgaaagcttgcctacgcaggaaagtgtgtgagcaagaggaaaagtacgagatccccgaagggccgcgcaggagtagactgaatcgggagcattgccaatcttgcctgatggatgcaacatcaatctgcggcgagccctccaataccatccagcgtactaccttgttatcttcctcgctacaggtcggagctcgctcatcagtggaaagcccatctcaaacagtcacatag

SEQ ID NO: 300476 - DNA, 1704 bp, Artificial Sequence
  derived and/or modified sequence
atgtggttttcacctcggagcaagaaggtacgttacgtcgtctcaaaagcgagcgttcagactcaacccgctattaaaaaggacgcgagtgctcagcaggatagctacgagtttgtgagtccctctccgccagcagatgttagcgaacgggctaagaaggcatccgccaggtctgggaaaaagcagaaaaagaagacactcgctgaaatcaaccagaaatggaacctagaggccgaaaaggaggacggcgagttcgactctaaagaggaaagcaaacagaagctcgtttcgttttgttcgcagccttcagtcatctctagtcctcagatcaacggagagattgacctcttagcctccggaagcctcaccgaatccgagtgttttggcagccttacagaggtgtccctccccttggctgagcagattgaatctcctgacacaaaatcgcggaacgaagtggtaacccctgaaaaagtgtgtaagaattatctaacttcgaaaaaaagtcttcctctcgagaacaatggtaaaagaggacaccacaaccgcctcagcagtcctatatctaagcggtgtcgaacctccatcctatcgacatccggtgatttcgtgaaacaaaccgttccaagtgagaatataccattaccggaatgtagctccccaccgagctgtaaacggaaggtcggtggcacctcaggcaggaaaaactccaatatgtcagacgagttcatctcactgtctccaggaacaccccctagtaccctgagctcctcgtcataccgcagggtgatgagctctccctctgctatgaagctactgcccaatatggctgtgaaaaggaatcataggggagaaactctcttgcatattgcttctattaagggtgacatcccgagcgtagaatacctcttgcagaacgggtccgatcccaatgtgaaggatcatgccggatggacacccttgcacgaagcttgcaaccacggtcacttaaaggtggttgaactgctcctgcagcacaaagcattggtcaacactacaggctaccaaaacgacagccctctgcatgatgctgcaaagaacggccatgtggatatcgtgaaattgctgctcagttacggcgcttccaggaacgccgtgaacatatttggattaagacctgtggattacaccgatgatgagtccatgaaaagtctactgctgctccctgaaaagaatgagtccagctctgccagtcattgctccgtgatgaatacaggtcagcggagagatggaccgttggtgctgataggaagtggactctcgagtgagcaacagaaaatgctcagtgagctggcagtaatactcaaggcaaagaagtacaccgaattcgatagcacagtgactcatgtagtcgtgccgggtgacgcagtgcagagtactctgaaatgtatgcttggaatacttaacggctgttggatcctgaagttcgagtgggtgaaagcctgcctgagaaggaaggtctgcgaacaagaagaaaagtatgaaattccagagggcccacgcagatcccgtcttaatcgcgagcattgtcagagctgcctcatggacgcgacgtccatctgcggagaaccgagcaacacaattcaaagaacgacactgctgtcctcctctctgcaggtgggagcgagaagttcagtggagagcccttcacagaccgttacctag

SEQ ID NO: 300477 - DNA, 2257 bp, Artificial Sequence
  derived and/or modified sequence
agagcttggccggtttcgagtcgctggcctgcagcttccctgtggtttcccgaggcttccttgcttcccgctctgcgaggagcctttcatccgaaggcgggacgatgccggataatcggcagccgaggaaccggcagccgaggatccgctccgggaacgagcctcgttccgcgcccgccatggaaccggatggtcgcggtgcctgggcccacagtcgcgccgcgctcgaccgcctggagaagctgctgcgctgctcgcgttgtactaacattctgagagagcctgtgtgtttaggaggatgtgagcacatcttctgtagatttgaaagaagataaacctaggaaaagtttgtttaatgatgcaggaaacaagaagaattcaattaaaatgtggtttagccctcgaagtaagaaagtcagatatgttgtgagtaaagcttcagtgcaaacccagcctgcaataaaaaaagatgcaagtgctcagcaagactcatatgaatttgtttccccaagtcctcctgcagatgtttctgagagggctaaaaaggcttctgcaagatctggaaaaaagcaaaaaaagaaaactttagctgaaatcaaccaaaaatggaatttagaggcagaaaaagaagatggtgaatttgactccaaagaggaatctaagcaaaagctggtatccttctgtagccaaccatctgttatctccagtcctcagataaatggtgaaatagacttactagcaagtggctccttgacagaatctgaatgttttggaagtttaactgaagtctctttaccattggctgagcaaatagagtctccagacactaagagcaggaatgaagtagtgactcctgagaaggtctgcaaaaattatcttacatctaagaaatctttgccattagaaaataatggaaaacgtggccatcacaatagactttccagtcccatttctaagagatgtagaaccagcattctgagcaccagtggagattttgttaagcaaacggtgccctcagaaaatataccattgcctgaatgttcttcaccaccttcatgcaaacgtaaagttggtggtacatcagggaggaaaaacagtaacatgtccgatgaattcattagtctttcaccaggtacaccaccttctacattaagtagttcaagttacaggcgagtgatgtctagtccctcagcaatgaagctgttgcccaatatggctgtgaaaagaaatcatagaggagagactttgctccatattgcttctattaagggcgacataccttctgttgaataccttttacaaaatggaagtgatccaaatgttaaagaccatgctggatggacaccattgcatgaagcttgcaatcatgggcacctgaaggtagtggaattattgctccagcataaggcattggtgaacaccaccgggtatcaaaatgactcaccacttcacgatgcagccaagaatgggcatgtggatatagtcaagctgttactttcctatggagcctccagaaatgctgttaatatatttggtctgcggcctgtcgattatacagatgatgaaagtatgaaatcgctattgctgctaccagagaagaatgaatcatcctcagctagccactgctcagtaatgaacactgggcagcgtagggatggacctcttgtacttataggcagtgggctgtcttcagaacaacagaaaatgctcagtgagcttgcagtaattcttaaggctaaaaaatatactgagtttgacagtacagtaactcatgttgttgttcctggtgatgcagttcaaagtaccttgaagtgtatgcttgggattctcaatggatgctggattctaaaatttgaatgggtaaaagcatgtctacgaagaaaagtatgtgaacaggaagaaaagtatgaaattcctgaaggtccacgcagaagcaggctcaacagagaacattgccaaagctgtttgatggatgctacttctatttgtggggaaccttcaaacaccatccaaaggacaaccttattaagctcgtcactgcaggtgggggccagatcctcagtagaaagcccaagccagacagtgacgtgactcagaccatcaatacagtcgcataccatgcgagacccgattctgatcagcgcttctgcacacagtatatcatctatgaagatttgtgtaattatcacccagagagggttcggcagggcaaagtctggaaggctccttcgagctggtttatagactgtgtgatgtc

SEQ ID NO: 300478 - DNA, 1704 bp, Artificial Sequence
  derived and/or modified sequence
atgtggttcagccccagaagcaagaaggtgagatacgtggtgagcaaggccagcgtgcagacccagcccgccatcaagaaggacgccagcgcccagcaggacagctacgagttcgtgagccccagcccccccgccgacgtgagcgagagagccaagaaggccagcgccagaagcggcaagaagcagaagaagaagaccctggccgagatcaaccagaagtggaacctggaggccgagaaggaggacggcgagttcgacagcaaggaggagagcaagcagaagctggtgagcttctgcagccagcccagcgtgatcagcagcccccagatcaacggcgagatcgacctgctggccagcggcagcctgaccgagagcgagtgcttcggcagcctgaccgaggtgagcctgcccctggccgagcagatcgagagccccgacaccaagagcagaaacgaggtggtgacccccgagaaggtgtgcaagaactacctgaccagcaagaagagcctgcccctggagaacaacggcaagagaggccaccacaacagactgagcagccccatcagcaagagatgcagaaccagcatcctgagcaccagcggcgacttcgtgaagcagaccgtgcccagcgagaacatccccctgcccgagtgcagcagcccccccagctgcaagagaaaggtgggcggcaccagcggcagaaagaacagcaacatgagcgacgagttcatcagcctgagccccggcaccccccccagcaccctgagcagcagcagctacagaagagtgatgagcagccccagcgccatgaagctgctgcccaacatggccgtgaagagaaaccacagaggcgagaccctgctgcacatcgccagcatcaagggcgacatccccagcgtggagtacctgctgcagaacggcagcgaccccaacgtgaaggaccacgccggctggacccccctgcacgaggcctgcaaccacggccacctgaaggtggtggagctgctgctgcagcacaaggccctggtgaacaccaccggctaccagaacgacagccccctgcacgacgccgccaagaacggccacgtggacatcgtgaagctgctgctgagctacggcgccagcagaaacgccgtgaacatcttcggcctgagacccgtggactacaccgacgacgagagcatgaagagcctgctgctgctgcccgagaagaacgagagcagcagcgccagccactgcagcgtgatgaacaccggccagagaagagacggccccctggtgctgatcggcagcggcctgagcagcgagcagcagaagatgctgagcgagctggccgtgatcctgaaggccaagaagtacaccgagttcgacagcaccgtgacccacgtggtggtgcccggcgacgccgtgcagagcaccctgaagtgcatgctgggcatcctgaacggctgctggatcctgaagttcgagtgggtgaaggcctgcctgagaagaaaggtgtgcgagcaggaggagaagtacgagatccccgagggccccagaagaagcagactgaacagagagcactgccagagctgcctgatggacgccaccagcatctgcggcgagcccagcaacaccatccagagaaccaccctgctgagcagcagcctgcaggtgggcgccagaagcagcgtggagagccccagccagaccgtgacctag

SEQ ID NO: 300479 - protein, 206 aa, Artificial Sequence
  derived and/or modified sequence
MAANKSKGQSSLALHKVIMVGSGGVGKSALTLQFMYDEFVEDYEPTKADSYRKKVVLDGEEVQIDILDTAGQEDYAAIRDNYFRSGEGFLLVFSITEHESFTATAEFREQILRVKAEEDKIPLLVVGNKSDLEERRQVPVEEARSKAEEWGVQYVETSAKTRANVDKVFFDLMREIRTKKMSENKDKNGKKSSKNKKSFKERCCLL

SEQ ID NO: 300480 - protein, 167 aa, Artificial Sequence
  derived and/or modified sequence
MAANKSKGQSSLALHKVIMVGSGGVGKSALTLQFMYDEFVEDYEPTKADSYRKKVVLDGEEVQIDILDTAGQEDYAAIRDNYFRSGEGFLLVFSITEHESFTATAEFREQILRVKAEEDKIPLLVVGNKSDLEERRQVPVEEARSKAEEWGVQYVETSAKTRANVDK

SEQ ID NO: 300481 - DNA, 1252 bp, Artificial Sequence
  derived and/or modified sequence
agaggaggggttgcctaggcgacgccggaggcgcgctcggggggtgggaaagcgagcccggcagctcaatgacaaatcggtggaggacggctggggtccggccccgggagggggcggggcgcgtttaagagctgcgggccgggtgcggacggcggaggcggcgggactggtccctgcagctcttcagtgggtcatctgtgtgtcacagcctcagaagaccagcgagatggctgccaacaagagtaagggccagagctccttggccctccacaaggtgatcatggttggcagcggaggcgttggcaagtcagccctgacgcttcagttcatgtatgacgagtttgtagaagactatgaacctaccaaagctgacagttatagaaagaaagtggttcttgatggggaagaagttcagatagatattctggacaccgctgggcaagaggactacgcagccattcgagataactactttcggagtggggaagggtttcttcttgtgttctcaatcacagaacatgaatcctttacagcaactgccgaattcagggaacagattctccgtgtgaaggctgaagaagataaaattccactgctcgtcgtgggaaacaagtctgacctagaggagcggaggcaggtgcctgtggaggaggccaggagtaaagccgaagagtggggcgtgcagtacgtggagacgtcagcgaagacccgggccaacgtggacaaggtgttctttgacctaatgagagaaatcagaacaaagaagatgtcagaaaacaaagacaagaatggcaagaaaagcagcaagaacaagaaaagttttaaagaaagatgttgcttactatgagtgtcaaggtgacggatgaagccagctgctcctaaggacacagggctgggttggtaaagagaaggctatggttgacttcttgcttgtgcttcccactctccccgacttcattcactcaaacttctttaaatggggaaaaatatttgtgactctgtggctggcagaagaaataagcccatgcaagtggaagggctgctttgtcaggaggttgtggaatttctttcttctccccttcttccctcccaaaagcttagctatgtataaagtgccacagataggaaacagctgttaattacaaagagaaagaattgtcatagcatcttattttgttcctagttttataacattaccatccttcgttttgaactacagatgttgtagtgggttttggaggagggagtggag

SEQ ID NO: 300482 - protein, 227 aa, Artificial Sequence
  derived and/or modified sequence
MAANKSKGQSSLALHKVIMVGSGGVGKSALTLQFMNVSKSLAYDKKKYTANKKVEGILEFVEDYEPTKADSYRKKVVLDGEEVQIDILDTAGQEDYAAIRDNYFRSGEGFLLVFSITEHESFTATAEFREQILRVKAEEDKIPLLVVGNKSDLEERRQVPVEEARSKAEEWGVQYVETSAKTRANVDKVFFDLMREIRTKKMSENKDKNGKKSSKNKKSFKERCCLL

SEQ ID NO: 300483 - protein, 2000 aa, Artificial Sequence
  derived and/or modified sequence
MAQALLVPPGPESFRLFTRESLAAIEKRAAEEKAKKPKKEQDNDDENKPKPNSDLEAGKNLPFIYGDIPPEMVSEPLEDLDPYYINKKTFIVMNKGKAIFRFSATSALYILTPLNPVRKIAIKILVHSLFSMLIMCTILTNCVFMTLSNPPDWTKNVEYTFTGIYTFESLIKILARGFCLEDFTFLRDPWNWLDFSVIVMAYVTEFVSLGNVSALRTFRVLRALKTISVIPGLKTIVGALIQSVKKLSDVMILTVFCLSVFALIGLQLFMGNLRNKCLQWPPSDSAFETNTTSYFNGTMDSNGTFVNVTMSTFNWKDYIGDDSHFYVLDGQKDPLLCGNGSDAGQCPEGYICVKAGRNPNYGYTSFDTFSWAFLSLFRLMTQDYWENLYQLTLRAAGKTYMIFFVLVIFLGSFYLVNLILAVVAMAYEEQNQATLEEAEQKEAEFQQMLEQLKKQQEEAQAVAAASAASRDFSGIGGLGELLESSSEASKLSSKSAKEWRNRRKKRRQREHLEGNNKGERDSFPKSESEDSVKRSSFLFSMDGNRLTSDKKFCSPHQSLLSIRGSLFSPRRNSKTSIFSFRGRAKDVGSENDFADDEHSTFEDSESRRDSLFVPHRHGERRNSNVSQASMSSRMVPGLPANGKMHSTVDCNGVVSLVGGPSALTSPTGQLPPEGTTTETEVRKRRLSSYQISMEMLEDSSGRQRAVSIASILTNTMEELEESRQKCPPCWYRFANVFLIWDCCDAWLKVKHLVNLIVMDPFVDLAITICIVLNTLFMAMEHYPMTEQFSSVLTVGNLVFTGIFTAEMVLKIIAMDPYYYFQEGWNIFDGIIVSLSLMELGLSNVEGLSVLRSFRLLRVFKLAKSWPTLNMLIKIIGNSVGALGNLTLVLAIIVFIFAVVGMQLFGKSYKECVCKINDDCTLPRWHMNDFFHSFLIVFRVLCGEWIETMWDCMEVAGQTMCLIVFMLVMVIGNLVVLNLFLALLLSSFSSDNLAATDDDNEMNNLQIAVGRMQKGIDYVKNKMRECFQKAFFRKPKVIEIHEGNKIDSCMSNNTGIEISKELNYLRDGNGTTSGVGTGSSVEKYVIDENDYMSFINNPSLTVTVPIAVGESDFENLNTEEFSSESELEESKEKLNATSSSEGSTVDVVLPREGEQAETEPEEDLKPEACFTEGCIKKFPFCQVSTEEGKGKIWWNLRKTCYSIVEHNWFETFIVFMILLSSGALAFEDIYIEQRKTIKTMLEYADKVFTYIFILEMLLKWVAYGFQTYFTNAWCWLDFLIVDVSLVSLVANALGYSELGAIKSLRTLRALRPLRALSRFEGMRVVVNALVGAIPSIMNVLLVCLIFWLIFSIMGVNLFAGKFYHCVNMTTGNMFDISDVNNLSDCQALGKQARWKNVKVNFDNVGAGYLALLQVATFKGWMDIMYAAVDSRDVKLQPVYEENLYMYLYFVIFIIFGSFFTLNLFIGVIIDNFNQQKKKFGGQDIFMTEEQKKYYNAMKKLGSKKPQKPIPRPANKFQGMVFDFVTRQVFDISIMILICLNMVTMMVETDDQGKYMTLVLSRINLVFIVLFTGEFVLKLVSLRHYYFTIGWNIFDFVVVILSIVGMFLAEMIEKYFVSPTLFRVIRLARIGRILRLIKGAKGIRTLLFALMMSLPALFNIGLLLFLVMFIYAIFGMSNFAYVKKEAGIDDMFNFETFGNSMICLFQITTSAGWDGLLAPILNSAPPDCDPDTIHPGSSVKGDCGNPSVGIFFFVSYIIISFLVVVNMYIAVILENFSVATEESAEPLSEDDFEMFYEVWEKFDPDATQFIEFSKLSDFAAALDPPLLIAKPNKVQLIAMDLPMVSGDRIHCLDILFAFTKRVLGESGEMDALRIQMEDRFMASNPSKVSYEPITTTLKRKQEEVSAAIIQRNFRCYLLKQRLKNISSNYNKEAIKGRIDLPIKQDMIIDKLNGNSTPEKTDGSSSTTSPPSYDSVTKPDKEKFEKDKPEKESKGKEVRENQK

SEQ ID NO: 300484 - DNA, 6003 bp, Artificial Sequence
  derived and/or modified sequence
atggctcaggcgctgctggttcctccagggcccgagagcttcaggctgtttactagggaatctctcgcagctattgaaaaaagggccgccgaggaaaaagccaagaagcccaagaaagaacaggacaacgacgacgagaacaagccaaaacctaattctgacctagaggctggtaagaacctgccttttatctatggagatattccaccggaaatggtgtcagagcccctggaggacctggacccctattacatcaataaaaagacattcatcgtgatgaacaaggggaaagccatcttcaggttctctgcaacctcagcgctctacatcctgaccccactgaatccggttcggaaaatagccatcaaaatactggtgcatagcctcttttcgatgcttatcatgtgcactatactaacaaattgcgtattcatgaccttgtctaacccccctgactggactaaaaatgtggagtacaccttcacaggtatttacaccttcgaatctctgatcaaaatcctagcgcgcggattttgtctggaagatttcacctttctgcgagacccctggaattggctcgactttagcgtgattgtgatggcttatgtcacagaattcgtgtcccttgggaatgtgagtgctctgaggactttccgcgttttacgcgctctgaagacaataagcgttatccctggccttaaaactatagttggtgcgctcattcaatcagttaaaaaactgtctgatgtgatgattttgaccgttttttgtctcagtgtgtttgccctgattgggttgcagctgttcatgggtaacttgaggaataagtgtctgcagtggcctccgtctgattcagcgtttgagaccaacactacatcttattttaatggtactatggacagcaatgggacatttgtaaatgtcactatgtctacattcaattggaaggactacatcggcgatgactcgcacttttatgtcctcgacgggcagaaagacccactgttatgtggcaatgggagtgatgctggccagtgcccagagggttacatttgcgtaaaagctggccggaacccaaactacggttatacatctttcgataccttttcatgggcttttctttccctgttcaggcttatgacccaggattactgggagaatctgtatcagctcaccttgagggccgccggaaagacttacatgatattcttcgtgctggtcattttcctcgggtcattttacttggtcaacctgatccttgccgtcgtggcaatggcctacgaggaacagaaccaagccactctggaggaggcggagcagaaggaggcggagtttcagcaaatgcttgagcaactgaagaaacagcaggaagaagcccaggctgtcgccgctgcaagtgctgcgagtcgagacttttccggaatcggcggcctgggggaactattggaaagtagctcggaggccagtaagctctcgtcgaaaagtgcaaaggagtggcggaatcgccgaaaaaagcggcggcagagggagcacttggaagggaacaataagggcgagcgcgatagtttcccaaaaagcgaatctgaggattccgtaaaacgcagtagcttcctgttctcgatggacggcaaccgtctgacttctgataagaaattctgcagtccacaccagagtctcttgagtatccgggggagcctcttctcccccagaaggaactccaagacctctattttttcttttcgcggccgtgctaaggacgtgggctctgaaaatgactttgctgatgacgagcactcaacctttgaggattcagagagcagaagagattccctgtttgtgcctcatagacatggggagcggaggaactccaatgtttcccaggcaagcatgtcatcgcggatggttcctggcctgccggccaatgggaagatgcactcaaccgtagactgtaacggagtggtttcactggtcggaggtccctctgcattaacaagccctacaggccagctgccccctgaaggtactacaacggaaactgaagtgcggaagaggcgtctatcctcataccagatttccatggagatgctagaagactccagtggtcggcaacgcgccgtgtctatcgcctctatcctcacaaataccatggaagaactggaggaatcccggcagaagtgtcctccatgttggtatcggttcgccaatgtgtttttgatttgggactgctgcgatgcatggttgaaggtgaaacatctggtaaacttaatcgtgatggatcccttcgtcgacctagcgattaccatctgtattgtactgaacacactcttcatggccatggagcattatccaatgactgagcagttctcaagtgtgctcacggtgggaaacctcgtgttcaccggaattttcacggccgagatggtacttaaaatcatcgctatggatccctactactatttccaagaaggatggaatattttcgacgggattatcgtctctctctcgctcatggaactgggactgtcaaatgtagagggcctgtcagtgctccggtccttcagattgctgcgcgtgttcaaactggccaaatcttggccaactttgaatatgttgattaagatcatcgggaactccgttggggcgctaggaaatttaactctcgtcttggccataatcgtattcatctttgccgtcgttggcatgcagctcttcggcaagtcctataaggagtgcgtgtgcaagatcaatgacgactgcacactgccgcgctggcacatgaatgacttcttccactcattcctgatcgtgttcagagttctgtgcggtgagtggatagaaacaatgtgggattgtatggaagttgccggccagaccatgtgtttgattgtctttatgctggtgatggtgatcgggaatctcgtcgtgcttaatttgttcctggcactcctcctgagctcgttcagttcagacaacctcgcagccacagacgatgataatgagatgaacaatctgcagatagccgtgggcagaatgcagaagggtatcgattacgtcaaaaacaagatgcgcgagtgctttcaaaaggccttctttcgcaaaccaaaagttattgagattcatgaaggaaacaaaattgatagttgcatgtcaaacaacacaggaatcgaaatctccaaggagctgaattatctgcgtgatggtaatggcactacctcaggagtggggacgggtagtagcgtggaaaagtatgtgattgacgagaatgattacatgtcttttattaacaatccctcattgacagtgactgttcctattgctgtgggggagtcagacttcgaaaatttgaacacggaagaatttagttccgaaagcgaactggaggaatcaaaagagaagctgaatgccacctctagttctgaagggagcacagtcgatgtggtgctgcctagggaaggggagcaggccgaaactgagcctgaggaagatttgaaaccagaggcatgttttactgaggggtgcatcaaaaagtttccattttgtcaggtctctacagaggaagggaaagggaagatatggtggaacctcagaaaaacctgctacagcatcgtggagcacaattggtttgaaaccttcatagttttcatgattctcctcagctccggggcgctggcatttgaagacatctacatcgaacaaagaaaaactattaagaccatgcttgagtacgccgataaggtgttcacttacatttttatactggagatgttactgaagtgggtggcctatggtttccagacctacttcacgaacgcctggtgctggcttgactttctgatcgtggatgtgagccttgttagtctggttgccaacgccctggggtatagtgagttgggggctattaagagcctgaggacgctccgagccctgcggccccttcgagctctgtcacggttcgagggaatgcgggtagtggttaatgccctagtcggcgccattccatcgattatgaacgtgctcctggtctgtctgatcttttggctgatattttccatcatgggtgtcaatcttttcgccgggaagttctaccactgcgtgaatatgactaccggcaatatgttcgacattagtgacgtgaataacctcagcgattgccaggccctgggaaagcaggcacggtggaaaaacgtgaaggttaactttgacaacgtgggagccggctacctggccctgctgcaggtcgcaaccttcaaaggatggatggatattatgtacgcggccgtggacagccgggacgtgaagctccaaccggtgtacgaggaaaacttgtatatgtatctatactttgttattttcattatcttcggctccttctttactctgaatctcttcataggtgtgatcatcgacaacttcaatcagcagaagaaaaagtttggaggccaagatatattcatgaccgaggagcagaaaaaatactataatgctatgaaaaaattggggtcaaaaaagcctcaaaaacctattcctagacccgctaataaattccaaggcatggtgttcgattttgttacgagacaggtctttgatatctcaattatgatccttatttgcctgaatatggtgactatgatggttgagactgacgatcaaggaaaatatatgacattggtcctgtctcgcattaatcttgtgttcatcgtgctgttcacaggcgaattcgtgctgaaactggtttcactgaggcattactacttcactattggctggaacattttcgacttcgtggttgtcattcttagcattgtggggatgttcctggctgagatgattgagaagtacttcgttagccctacacttttccgtgtaatccggctcgctagaatcggccgtatcctcagactgatcaagggagccaaggggatcagaacactcctgtttgcactcatgatgagcctgcccgccctgttcaacattggtctgcttctgttcctggtaatgtttatttacgccattttcgggatgtccaatttcgcctatgtgaagaaggaggctggcatagacgacatgttcaatttcgagaccttcggtaacagtatgatttgcctctttcagatcacaacctctgcgggatgggacggattgcttgcccccatcctgaactccgccccacctgattgtgaccccgatactatccaccccgggagcagtgtaaagggcgactgcggaaatccctcggttggcattttcttctttgtgagttacatcatcatcagctttcttgtggtggtcaatatgtacatcgctgttatcctggagaacttcagtgtagccactgaagagagcgccgaaccgctgtcggaagacgacttcgagatgttctacgaggtttgggaaaagttcgacccagacgccactcagttcatagagttttctaaactctctgacttcgctgcagcactggacccacccttgctcattgctaagcctaataaggttcagctgattgcaatggatctgcccatggtcagcggagatagaattcactgcctggatatattgtttgcattcactaagcgcgtgctgggggaaagtggcgaaatggatgccctgaggattcagatggaagatagattcatggccagtaacccctctaaagtgagctatgaaccaatcaccactactctgaagcgcaagcaggaggaagtctccgccgcgatcatacagcgcaatttccgatgttacctgctcaagcaaaggctcaaaaatatctcctccaactacaacaaagaggccatcaagggtcgaattgatcttcccatcaagcaggacatgattatcgacaagctcaatggcaatagtacacccgaaaaaaccgacggttccagctcaactacttctcccccaagctacgactccgtaacaaagcccgacaaggaaaagttcgaaaaggacaagcctgaaaaagaaagtaagggcaaggaggtgcgggaaaaccagaaatag

SEQ ID NO: 300485 - DNA, 6003 bp, Artificial Sequence
  derived and/or modified sequence
atggcccaggccctgctggtgcccccaggccctgagagcttccgcctcttcacccgggagagcctggccgccatcgagaagagagctgctgaggagaaggccaagaagcccaagaaggagcaggacaatgatgatgagaacaagcccaagcccaacagcgacctggaggccggcaagaacctgcccttcatctatggagacatccccccagagatggtgtctgagcccctggaggacctggacccctactacatcaacaagaagaccttcatcgtgatgaacaagggcaaggccatcttccgcttcagcgccaccagcgccctgtacatcctgacccccctgaaccctgtgaggaagatcgccatcaagatcctggtgcacagcctcttctccatgctgatcatgtgcaccatcctgaccaactgtgtgttcatgaccctgagcaaccccccagactggaccaagaatgtggagtacaccttcaccggcatctacacctttgagagcctcatcaagatcctggcccggggcttctgcctggaggacttcaccttcctgcgggacccctggaactggctggacttcagcgtcatcgtgatggcctacgtgacagaatttgtgtccctgggcaatgtgtctgccctgcggaccttccgggtgctgcgggccctgaagaccatcagcgtcatccctggcctgaagaccatcgtgggcgccctgatccagagcgtgaagaagctgagtgatgtgatgatcctgaccgtcttctgcctgtctgtgtttgccctgattggcctgcagctgttcatgggcaacctgaggaacaagtgcctgcagtggcccccaagtgacagcgcctttgagaccaacaccaccagctacttcaacggcaccatggacagcaatggcacctttgtgaatgtgaccatgagcaccttcaactggaaggactacatcggagatgacagccacttctacgtgctggatggccagaaggaccccctgctgtgtggaaatggaagtgatgctggccagtgcccagagggctacatctgtgtgaaggccggcaggaaccccaactacggctacaccagctttgacaccttctcctgggccttcctgagcctcttccggctgatgacccaggactactgggagaacctgtaccagctgaccctgcgggccgccggcaagacctacatgatcttctttgtgctggtgatcttcctgggcagcttctacctggtgaacctgatcctggccgtggtggccatggcctatgaggagcagaaccaggccaccctggaggaggccgagcagaaggaggccgagttccagcagatgctggagcagctgaagaagcagcaggaggaggcccaggccgtggccgccgccagcgctgccagccgggacttctctggaattggaggcctgggggagctgctggagagcagcagcgaggccagcaagctgagcagcaagagcgccaaggagtggaggaacagaaggaagaagaggcggcagcgggagcacctggagggcaacaacaagggggagcgggacagcttccccaagtctgagagtgaagattctgtgaagaggagcagcttcctgttctccatggatggcaaccggctgaccagtgacaagaagttctgcagcccccaccagagcctgctgagcatccggggcagcctcttcagccccaggaggaacagcaagaccagcatcttctccttccggggccgggccaaggatgtgggctctgaaaatgactttgctgatgatgagcacagcacctttgaggacagcgagagcagaagagacagcctgtttgtgccccacagacatggagagaggaggaacagcaatgtgtcccaggcctccatgagcagcaggatggtgcccggcctgcctgccaacgggaagatgcacagcacagtggactgcaatggagtggtgtccctggtgggcggccccagcgccctgaccagccccaccggccagctgcccccagagggcaccaccacagaaacagaggtgaggaagaggcggctgagcagctaccagatctccatggagatgctggaggacagcagcggccggcagagagctgtgtccatcgccagcatcctgaccaacaccatggaggagctggaggagagccggcagaagtgccccccctgctggtacagatttgccaacgtgttcctgatctgggactgctgtgatgcctggctgaaggtgaagcacctggtgaacctgattgtgatggacccctttgtggacctggccatcaccatctgcatcgtgctgaacaccctcttcatggccatggagcactaccccatgacagagcagttcagctctgtgctgactgtgggcaacctggtgttcaccggcatcttcaccgctgagatggtgctgaagatcatcgccatggacccctactactacttccaggagggctggaacatctttgatggcatcatcgtgtccctgagcctgatggagctgggcctgagcaatgtggagggcctgtctgtgctgcggagcttccggctgctgcgggtcttcaagctggccaagtcctggcccaccctgaacatgctgatcaagatcatcggcaacagcgtgggcgccctgggcaacctgaccctggtgctggccatcatcgtgttcatctttgctgtggtgggcatgcagctgtttgggaagagctacaaggaatgtgtgtgcaagatcaatgatgactgcaccctgccccgctggcacatgaatgacttcttccacagcttcctgattgtgttccgggtgctgtgtggggagtggattgagaccatgtgggactgcatggaggtggccggccagaccatgtgcctgattgtgttcatgctggtgatggtgattggcaacctggtggtgctgaacctcttcctggccctgctgctgagcagcttcagcagtgacaacctggccgccacagatgatgacaatgagatgaacaacctgcagattgctgtgggccgcatgcagaagggcattgattatgtgaagaacaagatgagggagtgcttccagaaggccttcttcaggaagcccaaggtgattgagatccacgagggcaacaagattgacagctgcatgagcaacaacacaggaattgagatcagcaaggagctgaactacctgagagatggaaatggcaccaccagcggcgtgggcaccggcagctctgtggagaagtatgtgattgatgaaaatgactacatgtccttcatcaacaaccccagcctgactgtgacagtgcccatcgctgtgggggagagtgactttgagaacctgaacacagaggagttcagcagcgagagcgagctggaggagagcaaggagaagctgaatgccaccagcagcagcgagggcagcacagtggatgtggtgctgccccgggagggggagcaggccgagacagagcctgaggaggacctgaagccagaggcctgcttcacagagggctgcatcaagaagttccccttctgccaggtgtccacagaggagggcaagggcaagatctggtggaacctgaggaagacctgctacagcatcgtggagcacaactggtttgagaccttcatcgtgttcatgatcctgctgagcagcggggccctggcctttgaggacatctacatcgagcagaggaagaccatcaagaccatgctggagtatgctgacaaggtgttcacctacatcttcatcctggagatgctgctgaagtgggtggcctacggcttccagacctacttcaccaatgcctggtgctggctggacttcctgattgtggatgtgtccctggtgtccctggtggccaatgccctgggctacagcgagctgggcgccatcaagagcctgcggaccctgcgggccctgcggcccctgcgggccctgagcagatttgagggcatgagggtggtggtgaatgccctggtgggcgccatccccagcatcatgaatgtgctgctggtgtgcctgatcttctggctgatcttcagcatcatgggcgtgaacctgtttgctgggaagttctaccactgtgtgaacatgaccactggaaacatgtttgacatcagtgatgtgaacaacctgagtgactgccaggccctgggcaagcaggcccgctggaagaatgtgaaggtgaactttgacaacgtgggcgccggctacctggccctgctgcaggtggccaccttcaagggctggatggacatcatgtatgctgctgtggacagcagagatgtgaagctgcagcctgtgtatgaggagaacctgtacatgtacctgtacttcgtcatcttcatcatcttcggcagcttcttcaccctgaacctcttcatcggggtcatcatcgacaacttcaaccagcagaagaagaagtttggaggccaggacatcttcatgacagaggagcagaagaagtactacaatgccatgaagaagctgggcagcaagaagccccagaagcccatccccaggcctgccaacaagttccagggcatggtgtttgattttgtgacccggcaggtgtttgacatcagcatcatgatcctgatctgcctgaacatggtgaccatgatggtggagacagatgaccagggcaagtacatgaccctggtgctgagccgcatcaacctggtgttcatcgtgctcttcaccggggagtttgtgctgaagctggtgtccctgcggcactactacttcaccatcggctggaacatctttgattttgtggtggtgatcctgagcatcgtgggcatgttcctggccgagatgattgagaagtactttgtgagccccaccctcttccgggtcatccggctggcccgcatcggccgcatcctgcggctcatcaagggggccaagggcatccgcaccctgctgtttgccctgatgatgagcctgcctgccctcttcaacatcggcctgctgctcttcctggtgatgttcatctatgccatcttcggcatgagcaactttgcctacgtgaagaaggaggccggcattgatgacatgttcaactttgagacctttggaaacagcatgatctgcctcttccagatcaccaccagcgctggctgggatggcctgctggcccccatcctgaacagcgcccccccagactgtgaccctgacaccatccaccctggcagctctgtgaagggggactgtggcaaccccagcgtgggcatcttcttctttgtgtcctacatcatcatctccttcctggtggtggtgaacatgtacatcgccgtcatcctggagaacttctctgtggccacagaggagagcgctgagcccctgtctgaagatgactttgagatgttttatgaggtgtgggagaagtttgatcctgatgccacccagttcatcgagttcagcaagctgagtgactttgctgctgccctggacccccccctgctgattgccaagcccaacaaggtgcagctgattgccatggacctgcccatggtgtctggggaccgcatccactgcctggacatcctgtttgccttcaccaagagggtgctgggggagagcggggagatggatgccctgcgcatccagatggaggaccgcttcatggccagcaaccccagcaaggtgtcctatgagcccatcaccaccaccctgaagaggaagcaggaggaggtgtctgctgccatcatccagaggaacttccgctgctacctgctgaagcagaggctgaagaacatcagcagcaactacaacaaggaggccatcaagggcagaattgacctgcccatcaagcaggacatgatcatcgacaagctgaatggaaacagcaccccagagaagacagatggcagcagcagcaccaccagccccccatcctatgacagcgtgaccaagccagacaaggagaagtttgagaaggacaagccagagaaggagagcaagggcaaggaggtgcgggagaaccagaagtag

SEQ ID NO: 300486 - DNA, 6003 bp, Artificial Sequence
  derived and/or modified sequence
atggcccaggccctgctggtgccccccggccccgagagcttccggctattcacgcgagaatccctggccgccatcgagaagagggcagcggaagaaaaggctaagaaacccaagaaggaacaggataacgacgatgagaataaacccaaacctaatagtgatctggaagccggcaagaatctaccctttatctacggtgacatcccccccgaaatggtgtccgaaccactcgaggacctggacccttattatatcaataagaaaaccttcatcgtgatgaataaaggaaaggccatctttcgcttttcagccactagcgccttgtacatcctgacaccactcaacccagtgcgcaaaattgctataaaaattttggtccactctctattttccatgcttatcatgtgcactatactcacaaactgtgtgttcatgaccctgagcaaccccccagactggactaagaatgtggagtacacattcactggcatatacacctttgaaagcctgataaaaatcttggctaggggcttttgcctggaggatttcacctttctccgtgatccttggaactggctggacttcagcgtcattgttatggcatacgtcacggaattcgtgagcctgggaaacgtgtccgctctcagaacctttcgtgtgctgcgggctctcaagactatcagtgtaattcccgggctgaaaacaattgtgggcgcactgatacagtctgtgaaaaaactctctgacgtcatgattcttacagtcttctgcctgagcgtatttgccctcatcggcttgcagctgtttatgggaaacctgcgtaacaagtgcctccagtggccccctagtgatagtgccttcgagaccaacacaacgtcatacttcaatgggaccatggacagcaatggaacttttgtaaatgtcactatgtctacatttaattggaaagattacatcggtgatgactctcatttttacgtgctagatggccagaaggatccactactatgcggcaacggctcagacgccggccagtgccctgagggttacatctgtgtgaaagctggccgcaaccccaactacggatacacttcattcgacactttctcatgggcctttcttagcctgtttagactgatgactcaagactactgggaaaatctttatcagctcacactgagagccgccgggaaaacctatatgattttctttgtgctggttattttcctggggagcttttatctcgtgaatttaattcttgccgtcgtcgccatggcctacgaggaacagaatcaagcgacgctcgaggaggccgaacaaaaggaggcagaattccaacagatgctggagcaactaaagaaacaacaggaagaggcgcaagccgttgcagctgcatcagccgcatcccgcgactttagcgggataggaggcctgggggagctacttgagtcctcatcagaggcttctaagctgtcctccaagtccgctaaagagtggaggaaccgccggaagaagcggcggcaacgtgaacaccttgaaggaaacaataaaggcgagagagattctttcccaaagtcagagtccgaggatagtgtgaaaagatcctcctttctgttctccatggacggtaatcggctcacttctgacaagaagttttgcagcccacaccagagtctactgtcaatacggggctcccttttttctccacgtagaaatagcaagactagcatcttcagttttcggggacgagctaaggacgttggatccgagaacgacttcgcagacgacgaacactccacattcgaagatagcgagagtagaagagattccctctttgtcccacaccgacacggcgagaggcggaatagtaatgtgtcgcaggcctctatgtcgtcccggatggtgccaggtcttcccgctaacggaaagatgcactccaccgttgattgtaatggcgtagtgagcctggtgggagggccctccgccttaacctcgcctacagggcagctgcctcctgaagggaccactactgagacagaggttcgtaagcggagactgtccagttaccagattagcatggaaatgctagaagatagcagcggtcggcagcgagctgtcagtattgcctccatccttactaacacaatggaagaactggaggagagccgccaaaaatgcccaccctgttggtatcggtttgcaaacgtctttctgatttgggattgttgtgatgcttggcttaaggtgaagcatctggtgaacctcatcgtgatggatcccttcgttgatctcgcaatcacgatatgcatcgtactgaatacactctttatggcgatggagcattaccctatgacagaacagtttagtagcgtactgaccgtcgggaaccttgtcttcaccgggatattcaccgcggaaatggttctcaaaatcattgctatggatccatactattactttcaggagggatggaacatctttgatggaatcatcgtaagtctcagcctgatggaacttgggctgtctaatgtcgagggtctcagcgtcttacggtccttcaggcttctgagggtctttaagcttgccaagtcctggcctactcttaatatgttaatcaaaatcatcggaaacagcgttggtgctctgggcaatctcacactcgtgctcgcaattattgtgttcatattcgccgtggtggggatgcagctgtttgggaaatcttataaggagtgcgtgtgtaaaattaacgacgattgtaccctgcctcggtggcacatgaatgacttcttccactcatttctgatagtatttcgggtgctgtgcggagaatggatcgaaactatgtgggattgcatggaggtcgctggacagacgatgtgtttgatcgtgtttatgctcgtgatggtaatcggcaatctggtggtcttaaatctgttccttgccttgctcctgtcttcattctctagcgataatcttgctgcgactgacgacgataacgaaatgaataaccttcagatcgctgtcggaagaatgcagaaagggatcgactatgtcaagaacaaaatgagggagtgcttccagaaggcgttttttagaaaaccaaaagtgattgaaatccatgaagggaacaagatcgactcgtgcatgtcaaacaatactggaattgagatctcaaaagagttgaactacctccgcgacgggaacggcacaacctctggcgtgggcactggctctagcgttgagaagtacgttattgacgaaaacgactacatgagctttataaacaacccctctctgactgtgaccgttccaatcgctgttggggagtctgacttcgagaatctaaacaccgaggaattttcgagcgaatcggaactggaagagtctaaggagaaactcaacgccacatctagtagcgaagggtctaccgtggacgtggttctgccaagggaaggcgagcaggccgaaactgagccagaagaggacttaaagccagaagcttgcttcactgagggttgcatcaaaaaattcccgttctgccaggtgagtacagaggaaggcaaaggcaagatctggtggaacttgcgaaagacatgttactcaatcgtcgagcataattggttcgagacctttatagtgttcatgatcttgttgtcctccggcgcgctcgccttcgaagacatttatatcgaacaacgcaagaccatcaaaacaatgctcgaatacgcagacaaggtcttcacctacattttcatattggagatgctgcttaagtgggttgcatacgggttccagacgtactttacgaacgcgtggtgctggttggatttcctgattgtggacgtttcgctggtctctctcgtagcgaatgcactgggttattctgagctcggggcgattaagtcacttcgtaccctgagagccttgcggccacttagggctctcagcagatttgagggcatgcgggtggtggtgaatgcgctggtgggcgctattccatctatcatgaatgtgctcctggtgtgtctcattttttggctcatcttcagtatcatgggggtcaacctgttcgcaggaaaattttaccattgtgtcaatatgactacaggcaatatgtttgacatatccgacgtgaataatctgagcgactgtcaggcactgggaaaacaagcgcgatggaagaatgtaaaagttaattttgataatgtgggtgctgggtaccttgccctcttgcaagttgcaaccttcaagggatggatggacattatgtatgcggccgtggacagtagagacgtcaaactgcaacctgtttatgaggagaatctatacatgtacctttacttcgtcatctttattatcttcggatcattcttcacgctgaatctgttcattggtgtgatcattgacaactttaatcagcagaaaaagaaattcggagggcaggatatcttcatgactgaggagcagaagaagtattacaatgctatgaaaaagctggggtctaaaaaacctcaaaagcctatcccacgcccagctaataaatttcaggggatggtattcgacttcgtgactcggcaggttttcgacattagtataatgatcctcatctgtctgaatatggtaactatgatggtagaaactgacgatcagggcaaatacatgactctggtgctttcacggataaatctggtcttcatcgtattgtttaccggagagttcgtgctgaagcttgtgtccctcaggcattactacttcactatcgggtggaacatttttgactttgtggtggtgatcttgtccatcgtcggcatgttcctcgcagagatgatcgaaaagtactttgtgtctccaaccttatttcgggtgatcaggttggcccgcattggacgcatattgcggcttatcaaaggcgcaaagggtatcaggactttactgttcgccctgatgatgagtctacctgccttgttcaacattggactgctgctgttcctcgtgatgtttatctacgccattttcgggatgtctaatttcgcctatgtgaaaaaagaggccggaattgatgacatgtttaactttgagacattcgggaattcgatgatttgtttgtttcagatcacgacctcagctggctgggatgggctgctcgctcccattttgaattctgccccaccagattgcgaccctgacaccatccaccccggatctagcgtcaaaggagactgcggtaatccatctgtgggcatttttttttttgtaagctacatcatcatctcctttctcgtggtcgtgaacatgtacatcgccgtgatcctggaaaactttagcgtggctactgaagagagcgccgagccactgtcagaagacgatttcgagatgttttacgaagtctgggagaaattcgatcccgacgctacccaattcatcgaattttcaaagttgtctgacttcgctgcggcccttgatccaccactgttaatcgccaagccaaataaggtgcagctgatcgccatggacttaccaatggtatctggggacagaatccactgtttagatattttgttcgcttttaccaagcgcgtgttgggcgaaagcggtgagatggatgctttacgtattcagatggaagaccgattcatggcatccaaccccagcaaggtgtcctatgagccaataaccaccaccctgaaaagaaagcaggaggaagtatctgctgcaattatccagagaaactttagatgttaccttctcaaacagcgtctgaagaacatcagctctaattataataaggaggcgataaagggccgcatcgacctgcctattaaacaggacatgataattgataagctcaatggaaactccaccccggagaagacagacgggtccagctccacaaccagccccccttcctacgactccgtaaccaaacctgataaagagaagttcgaaaaggacaaacctgagaaggagagtaagggcaaagaggtgcgggagaatcagaagtag

SEQ ID NO: 300487 - DNA, 6002 bp, Artificial Sequence
  derived and/or modified sequence
atggcccaagcccttttggtccccccaggacctgaatccttcagactgttcactagagaaagcttggctgctatcgagaaacgcgctgcggaggagaaggctaaaaagcctaaaaaggagcaggacaacgatgatgagaacaaacctaagcctaatagcgaccttgaggccggtaaaaatctcccatttatttatggagacataccgcctgagatggtttcagagccactggaggacctcgatccttattacatcaataaaaaaaccttcattgtgatgaataaaggaaaggccattttcagattcagtgctactagtgctctgtacattttgacccctctgaatcccgtacggaagattgcaatcaagatactcgtgcactccttgttcagcatgctgattatgtgcaccatccttacgaactgcgtgtttatgacactctcgaatcccccagactggacaaagaatgtggagtacacgttcaccggtatatacacgtttgagtctctgattaaaatattggcccgaggattctgcctagaggactttacctttttgagagatccttggaattggttggatttctccgtgattgtgatggcttatgtaactgagtttgtctccctggggaacgtaagtgccctacggacgttccgggtgctcagagcgctgaaaactatctctgtcattcccggattgaaaaccattgtgggagcactcatacagagtgtgaagaaactgagcgacgtcatgatcctcactgtgttttgcctttcagtgttcgcgctgattggcctccagctctttatgggaaacttgcgtaataagtgtttacaatggcccccttccgattcagcctttgaaacaaacaccaccagctattttaacggaacaatggactctaacggtactttcgtgaacgtgaccatgtcaacatttaactggaaggactacatcggcgacgactctcacttttatgtcctggacggccagaaggatcctctcctctgtggcaatggcagcgacgccggtcagtgtcccgagggctatatttgcgtgaaggcaggcagaaaccccaactatggatatacaagtttcgatacatttagttgggcgtttctatccttgtttcggctgatgacacaggactactgggagaacctgtaccagttgaccctgcgagccgctggtaagacatacatgatctttttcgtcctggtgattttcctgggatcattctacctggtgaacctgattttggctgtcgttgcaatggcctatgaggaacagaatcaggccactctggaagaagcagagcaaaaggaggccgagtttcagcagatgctggagcaattgaagaagcaacaggaggaagcacaagcagtggctgccgcttctgccgctagccgtgatttttccggaatcgggggactgggtgaattgttggaatctagctcagaggcatccaagctcagcagtaaaagcgcaaaggagtggcggaaccgacggaagaagagacgacagcgtgaacacctggagggcaataacaagggcgaacgggactctttccccaaaagcgagtccgaggactccgtcaagaggtccagcttcctgttcagcatggacgggaaccggcttacaagcgacaaaaaattctgtagccctcaccaatcacttctgagcatccggggatctttgtttagcccacgacggaattccaagaccagtatcttttcctttcgagggagagccaaagacgtgggaagcgagaacgactttgctgatgacgagcattccacttttgaggacagtgaatctaggcgagactctctattcgtcccacatcgccacggtgaaagacgtaattccaacgttagccaggccagtatgagtagccgcatggtgcctgggctccctgcaaatggcaaaatgcactcaacagtcgattgcaatggggtggtgagcctggtggggggaccatccgcattaacgtccccaaccggtcagctgcccccagagggaacgactaccgagaccgaggtccgcaagagaagactgtccagttaccagatctctatggaaatgctagaggatagcagcggccgacagcgcgctgtctctatcgcttcaatcctgactaacaccatggaagagcttgaagagtcgcggcagaagtgcccaccttgctggtatcgattcgcgaatgtgttcctgatctgggattgttgcgatgcctggcttaaagttaaacacctcgtgaatttgatcgtgatggatccctttgtagacctggctataacaatttgcattgttctcaacactctgttcatggcaatggaacactatcccatgaccgaacagttttcttcagtgctgaccgttggaaacctcgtctttacagggatcttcacggcggagatggttctgaaaattattgccatggatccatactactattttcaggaagggtggaatatcttcgatgggatcatcgtgtcactgtctctcatggaactgggcctgagcaacgtcgaggggttgtcagttctgcgaagcttccggctgttaagggtatttaagctcgcgaaaagttggccaactctgaatatgctgataaagatcatcggcaactcagtaggagcactgggaaatctaactttggtgctagctatcatcgtgtttatattcgcagtcgttggaatgcaactctttgggaaaagttacaaggaatgtgtgtgtaaaattaatgatgattgcactttgccacggtggcacatgaatgattttttccatagctttctcatcgtgttccgtgtgctgtgtggcgagtggatcgagacgatgtgggattgcatggaggtggccggtcagactatgtgcctcattgtctttatgctggtgatggtgattggaaatctcgtggtgctaaatctctttcttgcactcctgcttagctctttctcaagcgacaatctggccgctaccgacgacgacaacgaaatgaacaatcttcagattgctgtcggccgaatgcagaagggcatagattacgtaaagaataaaatgagggaatgcttccaaaaggcgtttttccgaaagcccaaggtgatcgagatccacgagggcaataaaatcgatagctgtatgtccaacaatacgggcatagaaatctcaaaggagctgaattacttgcgggacggtaatggaaccaccagcggcgtaggaaccggctcctctgtcgagaaatacgtgattgacgagaatgattacatgtccttcatcaataatccatccctcacggtgaccgtgccgattgctgtcggggagtctgatttcgagaatctcaacaccgaggaattctcgtctgagtccgagcttgaagaatctaaggagaagctcaacgctactagtagttccgaagggtctaccgttgatgttgtgctcccccgtgaaggggaacaggccgagactgagcctgaggaagatctgaagccggaggcatgcttcacagaggggtgtataaagaagttccctttctgtcaggtgagcaccgaggaagggaagggcaagatctggtggaacctgcgaaagacatgttatagcatcgtggaacataactggtttgagaccttcatagtctttatgattctgctgagctccggtgcgttggcgtttgaagacatatacatagaacagcggaagacaatcaaaacaatgctcgaatacgcggacaaggtctttacgtatatcttcatactggaaatgctcctgaaatgggtggcttacggtttccagacctattttaccaatgcatggtgttggttggacttcctgattgtagacgtgagtcttgtgagtctggtagccaacgcgttgggctattccgagttaggagccattaagtcgttgaggactctgagggctctccggcctttgagggcacttagtcgttttgaaggaatgagagttgttgtcaacgctctggtgggcgctataccttcaatcatgaacgtgctgctcgtttgcttaattttctggctgatcttcagcatcatgggtgtcaacctcttcgctggaaaattctatcactgcgtcaacatgacaaccggaaatatgtttgacatctcagatgtcaacaacctttccgattgccaggccctgggaaaacaggctcgttggaagaatgtgaaagtgaatttcgataatgtgggagccggatacctggctctgctccaggtcgcaacatttaaagggtggatggacatcatgtacgccgctgtcgacagtagagacgtaaaactccagcctgtctacgaggaaaacctgtacatgtatttatattttgtgatctttatcatattcggctcattttttacactgaacctttttataggagtgataatcgacaatttcaaccagcagaagaagaaattcggaggccaggatatctttatgacagaagaacaaaaaaaatactataacgccatgaaaaagcttggcagcaaaaaaccccagaaacccattcctcgcccagcaaacaagtttcagggcatggtgtttgattttgtgacacggcaagtgtttgacatttctatcatgatactcatctgcctcaacatggtgaccatgatggtggagacagacgatcagggtaagtacatgactttggttctctcccggattaatcttgtttttatcgttttatttaccggcgagttcgttctgaagttggtttccctgcgtcattactactttaccattgggtggaacatatttgactttgtggtagtgatcctctcaattgtgggtatgtttctggccgagatgatagagaaatactttgtgagccccacattgtttagggtcattaggcttgcgagaattggcaggattctcagattgattaagggtgccaaagggatccgaactctgctttttgccttgatgatgagtctgccagcgttgttcaacatcggattactgctgttccttgtgatgtttatttacgctatcttcggcatgtctaacttcgcctacgtgaaaaaagaggccggaattgatgacatgtttaactttgagaccttcggcaactcaatgatctgcttattccagataactacatcagccggttgggacgggctactggcccctattctcaactccgccccacctgattgtgatccagacactattcatcccggatcttccgtaaagggcgactgtggaaatccgagcgtgggtatattctttttcgtgtcctacataatcatctctttcctcgtggttgtgaacatgtacattgccgttattcttgagaatttttcagtggctacggaggagagcgctgaaccgctctctgaagacgacttcgagatgttctacgaagtgtgggagaagtttgatcccgatgcgacacagttcatcgagtttagtaagctcagtgactttgccgctgctctggatccaccccttctgatagcaaaacccaacaaagtccagcttattgccatggatcttccaatggtgtccggggataggatccactgtctcgatattctgttcgcatttaccaagagagtcttaggagagtcaggtgagatggacgctctgagaatccagatggaagacaggtttatggcctcaaatcccagcaaggtctcctacgaacccataacgacaacactgaaacgcaagcaggaggaggtgtccgcagcgattatccaacgcaatttccgctgttatttactgaagcagcgtcttaagaacatttcaagcaactataacaaagaagccatcaaaggtcggatcgaccttccgattaagcaagacatgatcattgacaaactgaacggcaattcaacaccagagaagactgacggctcttcaagtaccacgagtccacctagttatgattctgtgactaaacccgataaggagaaattcgagaaggacaaaccagaaaaggagagtaagggtaaggaagtacgggaaaatcagaagta

SEQ ID NO: 300488 - DNA, 9123 bp, Artificial Sequence
  derived and/or modified sequence
accatagagtgaatctcagaacaggaagcggaggcataagcagagaggattctggaaaggtctctttgttttcttatccacagagaaagaaagaaaaaaaattgtaactaatttgtaaacctctgtggtcaaaaaaaaaaaaaaaaaaaaaagctgaacagctgcagaggaagacacgttataccctaaccatcttggatgctgggctttgttatgctgtaattcataaggctctgttttatcagagattatggagcaagaaaactgaagccaagccacatcaaggtttgacagggatgagatacctgtcaaggattcatagtagagtggcttactgggaaaggagcaaagaatctcttctagggatattgtaagaataaatgagataattcacagaagggacctggagcttttccggaaaaaggtgctgtgactatctaaggtaattcgtatgcaagaagctacacgtaattaaatgtgcaggatgaaaagatggcacaggcactgttggtacccccaggacctgaaagcttccgcctttttactagagaatctcttgctgctatcgaaaaacgtgctgcagaagagaaagccaagaagcccaaaaaggaacaagataatgatgatgagaacaaaccaaagccaaatagtgacttggaagctggaaagaaccttccatttatttatggagacattcctccagagatggtgtcagagcccctggaggacctggatccctactatatcaataagaaaacttttatagtaatgaataaaggaaaggcaattttccgattcagtgccacctctgccttgtatattttaactccactaaaccctgttaggaaaattgctatcaagattttggtacattctttattcagcatgcttatcatgtgcactattttgaccaactgtgtatttatgaccttgagcaaccctcctgactggacaaagaatgtagagtacacattcactggaatctatacctttgagtcacttataaaaatcttggcaagagggttttgcttagaagattttacgtttcttcgtgatccatggaactggctggatttcagtgtcattgtgatggcgtatgtaacagaatttgtaagcctaggcaatgtttcagcccttcgaactttcagagtcttgagagctctgaaaactatttctgtaattccaggtttaaagaccattgtgggggccctgatccagtcggtaaagaagctttctgatgtgatgatcctgactgtgttctgtctgagcgtgtttgctctcattgggctgcagctgttcatgggcaatctgaggaataaatgtttgcagtggcccccaagcgattctgcttttgaaaccaacaccacttcctactttaatggcacaatggattcaaatgggacatttgttaatgtaacaatgagcacatttaactggaaggattacattggagatgacagtcacttttatgttttggatgggcaaaaagaccctttactctgtggaaatggctcagatgcaggccagtgtccagaaggatacatctgtgtgaaggctggtcgaaaccccaactatggctacacaagctttgacacctttagctgggctttcctgtctctatttcgactcatgactcaagactactgggaaaatctttaccagttgacattacgtgctgctgggaaaacatacatgatattttttgtcctggtcattttcttgggctcattttatttggtgaatttgatcctggctgtggtggccatggcctatgaggagcagaatcaggccaccttggaagaagcagaacaaaaagaggccgaatttcagcagatgctcgaacagcttaaaaagcaacaggaagaagctcaggcagttgcggcagcatcagctgcttcaagagatttcagtggaataggtgggttaggagagctgttggaaagttcttcagaagcatcaaagttgagttccaaaagtgctaaagaatggaggaaccgaaggaagaaaagaagacagagagagcaccttgaaggaaacaacaaaggagagagagacagctttcccaaatccgaatctgaagacagcgtcaaaagaagcagcttccttttctccatggatggaaacagactgaccagtgacaaaaaattctgctcccctcatcagtctctcttgagtatccgtggctccctgttttccccaagacgcaatagcaaaacaagcattttcagtttcagaggtcgggcaaaggatgttggatctgaaaatgactttgctgatgatgaacacagcacatttgaagacagcgaaagcaggagagactcactgtttgtgccgcacagacatggagagcgacgcaacagtaacgttagtcaggccagtatgtcatccaggatggtgccagggcttccagcaaatgggaagatgcacagcactgtggattgcaatggtgtggtttccttggtgggtggaccttcagctctaacgtcacctactggacaacttcccccagagggcaccaccacagaaacggaagtcagaaagagaaggttaagctcttaccagatttcaatggagatgctggaggattcctctggaaggcaaagagccgtgagcatagccagcattctgaccaacacaatggaagaacttgaagaatctagacagaaatgtccgccatgctggtatagatttgccaatgtgttcttgatctgggactgctgtgatgcatggttaaaagtaaaacatcttgtgaatttaattgttatggatccatttgttgatcttgccatcactatttgcattgtcttaaataccctctttatggccatggagcactaccccatgactgagcaattcagtagtgtgttgactgtaggaaacctggtctttactgggattttcacagcagaaatggttctcaagatcattgccatggatccttattactatttccaagaaggctggaatatctttgatggaattattgtcagcctcagtttaatggagcttggtctgtcaaatgtggagggattgtctgtactgcgatcattcagactgcttagagttttcaagttggcaaaatcctggcccacactaaatatgctaattaagatcattggcaattctgtgggggctctaggaaacctcaccttggtgttggccatcatcgtcttcatttttgctgtggtcggcatgcagctctttggtaagagctacaaagaatgtgtctgcaagatcaatgatgactgtacgctcccacggtggcacatgaacgacttcttccactccttcctgattgtgttccgcgtgctgtgtggagagtggatagagaccatgtgggactgtatggaggtcgctggccaaaccatgtgccttattgttttcatgttggtcatggtcattggaaaccttgtggttctgaacctctttctggccttattgttgagttcatttagctcagacaaccttgctgctactgatgatgacaatgaaatgaataatctgcagattgcagtaggaagaatgcaaaagggaattgattatgtgaaaaataagatgcgggagtgtttccaaaaagccttttttagaaagccaaaagttatagaaatccatgaaggcaataagatagacagctgcatgtccaataatactggaattgaaataagcaaagagcttaattatcttagagatgggaatggaaccaccagtggtgtaggtactggaagcagtgttgaaaaatacgtaatcgatgaaaatgattatatgtcattcataaacaaccccagcctcaccgtcacagtgccaattgctgttggagagtctgactttgaaaacttaaatactgaagagttcagcagtgagtcagaactagaagaaagcaaagagaaattaaatgcaaccagctcatctgaaggaagcacagttgatgttgttctaccccgagaaggtgaacaagctgaaactgaacccgaagaagaccttaaaccggaagcttgttttactgaaggatgtattaaaaagtttccattctgtcaagtaagtacagaagaaggcaaagggaagatctggtggaatcttcgaaaaacctgctacagtattgttgagcacaactggtttgagactttcattgtgttcatgatccttctcagtagtggtgcattggcctttgaagatatatacattgaacagcgaaagactatcaaaaccatgctagaatatgctgacaaagtctttacctatatattcattctggaaatgcttctcaaatgggttgcttatggatttcaaacatatttcactaatgcctggtgctggctagatttcttgatcgttgatgtttctttggttagcctggtagccaatgctcttggctactcagaactcggtgccatcaaatcattacggacattaagagctttaagacctctaagagccttatcccggtttgaaggcatgagggtggttgtgaatgctcttgttggagcaattccctctatcatgaatgtgctgttggtctgtctcatcttctggttgatctttagcatcatgggtgtgaatttgtttgctggcaagttctaccactgtgttaacatgacaacgggtaacatgtttgacattagtgatgttaacaatttgagtgactgtcaggctcttggcaagcaagctcggtggaaaaacgtgaaagtaaactttgataatgttggcgctggctatcttgcactgcttcaagtggccacatttaaaggctggatggatattatgtatgcagctgttgattcacgagatgttaaacttcagcctgtatatgaagaaaatctgtacatgtatttatactttgtcatctttatcatctttgggtcattcttcactctgaatctattcattggtgtcatcatagataacttcaaccagcagaaaaagaagtttggaggtcaagacatctttatgacagaggaacagaaaaaatattacaatgcaatgaagaaacttggatccaagaaacctcagaaacccatacctcgcccagcaaacaaattccaaggaatggtctttgattttgtaaccagacaagtctttgatatcagcatcatgatcctcatctgcctcaacatggtcaccatgatggtggaaacggatgaccagggcaaatacatgaccctagttttgtcccggatcaacctagtgttcattgttctgttcactggagaatttgtgctgaagctcgtctccctcagacactactacttcactataggctggaacatctttgactttgtggtggtgattctctccattgtaggtatgtttctggctgagatgatagaaaagtattttgtgtcccctaccttgttccgagtgatccgtcttgccaggattggccgaatcctacgtctgatcaaaggagcaaaggggatccgcacgctgctctttgctttgatgatgtcccttcctgcgttgtttaacatcggcctcctgctcttcctggtcatgtttatctatgccatctttgggatgtccaactttgcctatgttaaaaaggaagctggaattgatgacatgttcaactttgagacctttggcaacagcatgatctgcttgttccaaattacaacctctgctggctgggatggattgctagcacctattcttaatagtgcaccacccgactgtgaccctgacacaattcaccctggcagctcagttaagggagactgtgggaacccatctgttgggattttcttttttgtcagttacatcatcatatccttcctggttgtggtgaacatgtacatcgcggtcatcctggagaacttcagtgttgctactgaagaaagtgcagagcccctgagtgaggatgactttgagatgttctatgaggtttgggaaaagtttgatcccgatgcgacccagtttatagagttctctaaactctctgattttgcagctgccctggatcctcctcttctcatagcaaaacccaacaaagtccagcttattgccatggatctgcccatggtcagtggtgaccggatccactgtcttgatattttatttgcctttacaaagcgtgttttgggtgagagtggagagatggatgcccttcgaatacagatggaagacaggtttatggcatcaaacccctccaaagtctcttatgagcctattacaaccactttgaaacgtaaacaagaggaggtgtctgccgctatcattcagcgtaatttcagatgttatcttttaaagcaaaggttaaaaaatatatcaagtaactataacaaagaggcaattaaagggaggattgacttacctataaaacaagacatgattattgacaaactaaatgggaactccactccagaaaaaacagatgggagttcctctaccacctctcctccttcctatgatagtgtaacaaaaccagacaaggaaaagtttgagaaagacaaaccagaaaaagaaagcaaaggaaaagaggtcagagaaaatcaaaagtaaaaagaaacaaagaattatctttgtgatcaattgtttacagcctatgaaggtaaagtatatgtgtcaactggacttcaagaggaggtccatgccaaactgactgttttaacaaatactcatagtcagtgcctatacaagacagtgaagtgacctctctgtcactgcaactctgtgaagcagggtatcaacattgacaagaggttgctgtttttattaccagctgacactgctgaggagaaacccaatggctacctagactatagggatagttgtgcaaagtgaacattgtaactacaccaaacacctttagtacagtccttgcatccattctatttttaacttccatatctgccatatttttacaaaatttgttctagtgcatttccatggtccccaattcatagtttattcataatgctatgtcactatttttgtaaatgaggtttacgttgaagaaacagtatacaagaaccctgtctctcaaatgatcagacaaaggtgttttgccagagagataaaatttttgctcaaaaccagaaaaagaattgtaatggctacagtttcagttacttccattttctagatggctttaattttgaaagtattttagtctgttatgtttgtttctatctgaacagttatgtgcctgtaaagtctcctctaatatttaaaggattatttttatgcaaagtattctgtttcagcaagtgcaaattttattctaagtttcagagctctatatttaatttaggtcaaatgctttccaaaaagtaatctaataaatccattctagaaaaatatatctaaagtattgctttagaatagttgttccactttctgctgcagtattgctttgccatcttctgctctcagcaaagctgatagtctatgtcaattaaataccctatgttatgtaaatagttattttatcctgtggtgcatgtttgggcaaatatatatatagcctgataaacaacttctattaaatcaaatatgtaccacagtgtatgtgtcttttgcaagcttccaacagggatgtatcctgtatcattcattaaacatagtttaaaggctatcactaatgcatgttaatattgcctatgctgctctattttactcaatccattcttcacaagtcttggttaaagaatgtcacatattggtgatagaatgaattcaacctgctctgtccattatgtcaagcagaataatttgaagctatttacaaacacctttacttttgcacttttaattcaacatgagtatcatatggtatctctctagatttcaaggaaacacactggatactgcctactgacaaaacctattcttcatattttgctaaaaatatgtctaaaacttgtttaaatataaataatgtaaaaatataatcaactttatttgtcagcattttgtacataagaaaattattttcaggttgatgacatcacaatttattttactttatgcttttgcttttgatttttaatcacaattccaaacttttgaatccataagatttttcaatggataatttcctaaaataaaagttagataatgggttttatggatttctttgttataatatattttctaccattccaataggagatacattggtcaaacactcaaacctagatcattttctaccaactatggttgcctcaatataaccttttattcatagatgtttttttttattcaacttttgtagtatttacgtatgcagactagtcttatttttttaattcctgctgcactaaagctattacaaatataacatggactttgttctttttagccatgaacaaagtggcaaagttgtgcaattacctaacatgatataaatttttgttttttgcacaaaccaaaagtttaatgttaattctttttacaaaactatttactgtagtgtattgaagaactgcatgcagggaattgctattgctaaaaagaatggtgagctacgtcattattgagccaaaagaataaatttcattttttattgcatttcacttattggcctctggggttttttgtttttgttttttgctgttggcagtttaaaatatatataattaataaaacctgtgcttgatctgacatttgtatacataaaagtttacatgaattttacaacaaactagtgcatgattcaccaagcagtactacagaacaaaggcaaattaaaagcagctttgtgaacttttatgtgtgcaaaggatcaagttcacatgttccaactttcaggtttgataataatagtagtaaccacctacaatagctttcaatttcaattaactcccttggctataagcatctaaactcatcttctttcaatataattgatgctatctcctaattacttggtggctaataaatgttacattctttgttacttaaatgcattatataaactcctatgtatacataaggtattaatgatatagttattgagaatttatattaacttttttttcaagaacccttggatttatgtgaggtcaaaaccaaactcttattctcagtggaaaactccagttgtaatgcatatttttaaagacaatttggatctaaatatgtatttcataattctcccataataaattatataaggtggctaattgg

SEQ ID NO: 300489 - DNA, 6003 bp, Artificial Sequence
  derived and/or modified sequence
atggcccaggccctgctggtgccccccggccccgagagcttcagactgttcaccagagagagcctggccgccatcgagaagagagccgccgaggagaaggccaagaagcccaagaaggagcaggacaacgacgacgagaacaagcccaagcccaacagcgacctggaggccggcaagaacctgcccttcatctacggcgacatcccccccgagatggtgagcgagcccctggaggacctggacccctactacatcaacaagaagaccttcatcgtgatgaacaagggcaaggccatcttcagattcagcgccaccagcgccctgtacatcctgacccccctgaaccccgtgagaaagatcgccatcaagatcctggtgcacagcctgttcagcatgctgatcatgtgcaccatcctgaccaactgcgtgttcatgaccctgagcaacccccccgactggaccaagaacgtggagtacaccttcaccggcatctacaccttcgagagcctgatcaagatcctggccagaggcttctgcctggaggacttcaccttcctgagagacccctggaactggctggacttcagcgtgatcgtgatggcctacgtgaccgagttcgtgagcctgggcaacgtgagcgccctgagaaccttcagagtgctgagagccctgaagaccatcagcgtgatccccggcctgaagaccatcgtgggcgccctgatccagagcgtgaagaagctgagcgacgtgatgatcctgaccgtgttctgcctgagcgtgttcgccctgatcggcctgcagctgttcatgggcaacctgagaaacaagtgcctgcagtggccccccagcgacagcgccttcgagaccaacaccaccagctacttcaacggcaccatggacagcaacggcaccttcgtgaacgtgaccatgagcaccttcaactggaaggactacatcggcgacgacagccacttctacgtgctggacggccagaaggaccccctgctgtgcggcaacggcagcgacgccggccagtgccccgagggctacatctgcgtgaaggccggcagaaaccccaactacggctacaccagcttcgacaccttcagctgggccttcctgagcctgttcagactgatgacccaggactactgggagaacctgtaccagctgaccctgagagccgccggcaagacctacatgatcttcttcgtgctggtgatcttcctgggcagcttctacctggtgaacctgatcctggccgtggtggccatggcctacgaggagcagaaccaggccaccctggaggaggccgagcagaaggaggccgagttccagcagatgctggagcagctgaagaagcagcaggaggaggcccaggccgtggccgccgccagcgccgccagcagagacttcagcggcatcggcggcctgggcgagctgctggagagcagcagcgaggccagcaagctgagcagcaagagcgccaaggagtggagaaacagaagaaagaagagaagacagagagagcacctggagggcaacaacaagggcgagagagacagcttccccaagagcgagagcgaggacagcgtgaagagaagcagcttcctgttcagcatggacggcaacagactgaccagcgacaagaagttctgcagcccccaccagagcctgctgagcatcagaggcagcctgttcagccccagaagaaacagcaagaccagcatcttcagcttcagaggcagagccaaggacgtgggcagcgagaacgacttcgccgacgacgagcacagcaccttcgaggacagcgagagcagaagagacagcctgttcgtgccccacagacacggcgagagaagaaacagcaacgtgagccaggccagcatgagcagcagaatggtgcccggcctgcccgccaacggcaagatgcacagcaccgtggactgcaacggcgtggtgagcctggtgggcggccccagcgccctgaccagccccaccggccagctgccccccgagggcaccaccaccgagaccgaggtgagaaagagaagactgagcagctaccagatcagcatggagatgctggaggacagcagcggcagacagagagccgtgagcatcgccagcatcctgaccaacaccatggaggagctggaggagagcagacagaagtgccccccctgctggtacagattcgccaacgtgttcctgatctgggactgctgcgacgcctggctgaaggtgaagcacctggtgaacctgatcgtgatggaccccttcgtggacctggccatcaccatctgcatcgtgctgaacaccctgttcatggccatggagcactaccccatgaccgagcagttcagcagcgtgctgaccgtgggcaacctggtgttcaccggcatcttcaccgccgagatggtgctgaagatcatcgccatggacccctactactacttccaggagggctggaacatcttcgacggcatcatcgtgagcctgagcctgatggagctgggcctgagcaacgtggagggcctgagcgtgctgagaagcttcagactgctgagagtgttcaagctggccaagagctggcccaccctgaacatgctgatcaagatcatcggcaacagcgtgggcgccctgggcaacctgaccctggtgctggccatcatcgtgttcatcttcgccgtggtgggcatgcagctgttcggcaagagctacaaggagtgcgtgtgcaagatcaacgacgactgcaccctgcccagatggcacatgaacgacttcttccacagcttcctgatcgtgttcagagtgctgtgcggcgagtggatcgagaccatgtgggactgcatggaggtggccggccagaccatgtgcctgatcgtgttcatgctggtgatggtgatcggcaacctggtggtgctgaacctgttcctggccctgctgctgagcagcttcagcagcgacaacctggccgccaccgacgacgacaacgagatgaacaacctgcagatcgccgtgggcagaatgcagaagggcatcgactacgtgaagaacaagatgagagagtgcttccagaaggccttcttcagaaagcccaaggtgatcgagatccacgagggcaacaagatcgacagctgcatgagcaacaacaccggcatcgagatcagcaaggagctgaactacctgagagacggcaacggcaccaccagcggcgtgggcaccggcagcagcgtggagaagtacgtgatcgacgagaacgactacatgagcttcatcaacaaccccagcctgaccgtgaccgtgcccatcgccgtgggcgagagcgacttcgagaacctgaacaccgaggagttcagcagcgagagcgagctggaggagagcaaggagaagctgaacgccaccagcagcagcgagggcagcaccgtggacgtggtgctgcccagagagggcgagcaggccgagaccgagcccgaggaggacctgaagcccgaggcctgcttcaccgagggctgcatcaagaagttccccttctgccaggtgagcaccgaggagggcaagggcaagatctggtggaacctgagaaagacctgctacagcatcgtggagcacaactggttcgagaccttcatcgtgttcatgatcctgctgagcagcggcgccctggccttcgaggacatctacatcgagcagagaaagaccatcaagaccatgctggagtacgccgacaaggtgttcacctacatcttcatcctggagatgctgctgaagtgggtggcctacggcttccagacctacttcaccaacgcctggtgctggctggacttcctgatcgtggacgtgagcctggtgagcctggtggccaacgccctgggctacagcgagctgggcgccatcaagagcctgagaaccctgagagccctgagacccctgagagccctgagcagattcgagggcatgagagtggtggtgaacgccctggtgggcgccatccccagcatcatgaacgtgctgctggtgtgcctgatcttctggctgatcttcagcatcatgggcgtgaacctgttcgccggcaagttctaccactgcgtgaacatgaccaccggcaacatgttcgacatcagcgacgtgaacaacctgagcgactgccaggccctgggcaagcaggccagatggaagaacgtgaaggtgaacttcgacaacgtgggcgccggctacctggccctgctgcaggtggccaccttcaagggctggatggacatcatgtacgccgccgtggacagcagagacgtgaagctgcagcccgtgtacgaggagaacctgtacatgtacctgtacttcgtgatcttcatcatcttcggcagcttcttcaccctgaacctgttcatcggcgtgatcatcgacaacttcaaccagcagaagaagaagttcggcggccaggacatcttcatgaccgaggagcagaagaagtactacaacgccatgaagaagctgggcagcaagaagccccagaagcccatccccagacccgccaacaagttccagggcatggtgttcgacttcgtgaccagacaggtgttcgacatcagcatcatgatcctgatctgcctgaacatggtgaccatgatggtggagaccgacgaccagggcaagtacatgaccctggtgctgagcagaatcaacctggtgttcatcgtgctgttcaccggcgagttcgtgctgaagctggtgagcctgagacactactacttcaccatcggctggaacatcttcgacttcgtggtggtgatcctgagcatcgtgggcatgttcctggccgagatgatcgagaagtacttcgtgagccccaccctgttcagagtgatcagactggccagaatcggcagaatcctgagactgatcaagggcgccaagggcatcagaaccctgctgttcgccctgatgatgagcctgcccgccctgttcaacatcggcctgctgctgttcctggtgatgttcatctacgccatcttcggcatgagcaacttcgcctacgtgaagaaggaggccggcatcgacgacatgttcaacttcgagaccttcggcaacagcatgatctgcctgttccagatcaccaccagcgccggctgggacggcctgctggcccccatcctgaacagcgccccccccgactgcgaccccgacaccatccaccccggcagcagcgtgaagggcgactgcggcaaccccagcgtgggcatcttcttcttcgtgagctacatcatcatcagcttcctggtggtggtgaacatgtacatcgccgtgatcctggagaacttcagcgtggccaccgaggagagcgccgagcccctgagcgaggacgacttcgagatgttctacgaggtgtgggagaagttcgaccccgacgccacccagttcatcgagttcagcaagctgagcgacttcgccgccgccctggacccccccctgctgatcgccaagcccaacaaggtgcagctgatcgccatggacctgcccatggtgagcggcgacagaatccactgcctggacatcctgttcgccttcaccaagagagtgctgggcgagagcggcgagatggacgccctgagaatccagatggaggacagattcatggccagcaaccccagcaaggtgagctacgagcccatcaccaccaccctgaagagaaagcaggaggaggtgagcgccgccatcatccagagaaacttcagatgctacctgctgaagcagagactgaagaacatcagcagcaactacaacaaggaggccatcaagggcagaatcgacctgcccatcaagcaggacatgatcatcgacaagctgaacggcaacagcacccccgagaagaccgacggcagcagcagcaccaccagcccccccagctacgacagcgtgaccaagcccgacaaggagaagttcgagaaggacaagcccgagaaggagagcaagggcaaggaggtgagagagaaccagaagtag

SEQ ID NO: 300490 - protein, 483 aa, Artificial Sequence
  derived and/or modified sequence
MVFDFVTRQVFDISIMILICLNMVTMMVETDDQGKYMTLVLSRINLVFIVLFTGEFVLKLVSLRHYYFTIGWNIFDFVVVILSIVGMFLAEMIEKYFVSPTLFRVIRLARIGRILRLIKGAKGIRTLLFALMMSLPALFNIGLLLFLVMFIYAIFGMSNFAYVKKEAGIDDMFNFETFGNSMICLFQITTSAGWDGLLAPILNSAPPDCDPDTIHPGSSVKGDCGNPSVGIFFFVSYIIISFLVVVNMYIAVILENFSVATEESAEPLSEDDFEMFYEVWEKFDPDATQFIEFSKLSDFAAALDPPLLIAKPNKVQLIAMDLPMVSGDRIHCLDILFAFTKRVLGESGEMDALRIQMEDRFMASNPSKVSYEPITTTLKRKQEEVSAAIIQRNFRCYLLKQRLKNISSNYNKEAIKGRIDLPIKQDMIIDKLNGNSTPEKTDGSSSTTSPPSYDSVTKPDKEKFEKDKPEKESKGKEVRENQK

SEQ ID NO: 300491 - DNA, 1452 bp, Artificial Sequence
  derived and/or modified sequence
atggtcttcgacttcgttacaagacaggtgttcgacatatcaattatgatcctgatctgcttaaatatggttactatgatggtagaaaccgatgatcagggaaaatatatgaccctcgtcctctctcgcatcaacctggttttcatcgtgctcttcacaggggaattcgtactgaagctggtgtcactccgccattattactttactatcggctggaacattttcgacttcgttgtagtcatattgtcaatcgtggggatgttcttggcggaaatgattgagaaatacttcgttagcccaaccctgttccgggtgatccggctagcaagaatagggaggatactacgcctcataaaaggggcaaagggcatcagaaccctgctctttgcactgatgatgtccctacccgccctgttcaatataggcttgcttctctttctcgtgatgttcatctacgctattttcggtatgtctaactttgcatatgtgaagaaagaagccggtatagatgacatgtttaattttgagaccttcggtaatagtatgatttgtctctttcaaatcactaccagtgccgggtgggatggactgctggcaccaatcctaaatagtgccccgcccgattgcgatcctgataccatccacccaggatcgagcgtgaaaggagactgcggtaacccatccgttgggatctttttctttgtctcctatatcataattagcttcctcgtggtagtgaacatgtacatcgccgtgattctcgagaatttcagtgtcgctaccgaggaaagtgcggagcccctcagcgaggatgattttgaaatgttctacgaggtgtgggaaaagttcgatcccgatgcgacacaattcatcgaattttctaagctgagcgattttgcagctgccctggatccacctctgctgattgcaaagccaaacaaggtgcagttgatagccatggatcttccaatggtcagtggcgaccgaatccattgcctggatattctcttcgccttcacgaagcgggtccttggggagagcggggaaatggatgctctccgtattcagatggaggaccgctttatggcctcaaacccatcaaaagtgtcgtatgaacctatcaccactaccttgaagagaaaacaggaagaggtcagcgctgcgatcatccagcgaaacttccgatgctacctgttgaagcaaagactgaagaatatctccagcaattacaacaaggaggccattaagggtcggattgatttgcccatcaaacaggacatgattattgacaaactcaatggcaactccacacctgagaagactgacggaagctcttcaaccacttctccacccagctatgattcagtaaccaagcccgacaaggaaaaattcgagaaggataaaccagaaaaggagagcaagggcaaagaggttcgcgaaaatcagaaatag

SEQ ID NO: 300492 - DNA, 1452 bp, Artificial Sequence
  derived and/or modified sequence
atggtgtttgattttgtgacccggcaggtgtttgacatcagcatcatgatcctgatctgcctgaacatggtgaccatgatggtggagacagatgaccagggcaagtacatgaccctggtgctgagccgcatcaacctggtgttcatcgtgctcttcaccggggagtttgtgctgaagctggtgtccctgcggcactactacttcaccatcggctggaacatctttgattttgtggtggtgatcctgagcatcgtgggcatgttcctggccgagatgattgagaagtactttgtgagccccaccctcttccgggtcatccggctggccagaattggccgcatcctgcggctcatcaagggggccaagggcatccgcaccctgctgtttgccctgatgatgagcctgcctgccctcttcaacatcggcctgctgctcttcctggtgatgttcatctatgccatcttcggcatgagcaactttgcctacgtgaagaaggaggccggcattgatgacatgttcaactttgagaccttcggcaacagcatgatctgcctcttccagatcaccaccagcgctggctgggatggcctgctggcccccatcctgaacagcgcccccccagactgtgaccctgacaccatccaccctggcagctctgtgaagggggactgtggcaaccccagcgtgggcatcttcttctttgtgtcctacatcatcatctccttcctggtggtggtgaacatgtacatcgctgtgatcctggagaacttctctgtggccacagaggagagcgctgagcccctgtctgaagatgactttgagatgttttatgaggtgtgggagaagtttgatcctgatgccacccagttcatcgagttcagcaagctgagtgactttgctgctgccctggacccccccctgctgattgccaagcccaacaaggtgcagctgattgccatggacctgcccatggtgtctggggaccgcatccactgcctggacatcctgtttgccttcaccaagagggtgctgggggagagcggggagatggatgccctgcgcatccagatggaggaccgcttcatggccagcaaccccagcaaggtgtcctatgagcccatcaccaccaccctgaagaggaagcaggaggaggtgtctgctgccatcatccagaggaacttccgctgctacctgctgaagcagaggctgaagaacatcagcagcaactacaacaaggaggccatcaagggcagaattgacctgcccatcaagcaggacatgatcatcgacaagctgaatggaaacagcaccccagagaagacagatggcagcagcagcaccaccagcccccccagctatgattctgtgaccaagccagacaaggagaagtttgagaaggacaagccagagaaggagagcaagggcaaggaggtgcgggagaaccagaagtag

SEQ ID NO: 300493 - DNA, 1452 bp, Artificial Sequence
  derived and/or modified sequence
atggtgttcgacttcgtgacccggcaggtgttcgacatcagcatcatgatcctgatttgcctcaacatggtcacaatgatggtagagaccgacgatcagggcaagtacatgacactcgtgctgtccaggattaacctggtgttcatcgtgctttttaccggggagttcgtcctcaaactcgtgtcacttaggcactattactttacaattgggtggaacatctttgacttcgtggtggtgatactgtccattgttggtatgtttttggccgaaatgattgaaaaatattttgtatctcccactctctttcgcgttattcggctcgcgcggatcggaaggatcttaaggcttataaagggcgccaaggggatccgaaccctgttgttcgcgcttatgatgagcctgcccgcattgttcaacatcggactattacttttcttggttatgttcatctacgctatctttggaatgtctaacttcgcgtacgtcaaaaaagaagccggcatcgacgacatgttcaacttcgagacatttgggaacagcatgatctgccttttccagattaccacttccgctggatgggatgggcttttggcgcccatcctgaactcggctccaccagactgtgatcccgacacaattcatcctggaagttcagtcaagggagactgtggcaatccttccgtgggcattttttttttcgtgtcctatatcattatcagcttcctggtggtggttaacatgtatatcgcagtgattctcgagaactttagcgtagctactgaggagagcgccgagcccctgtcagaagacgacttcgaaatgttttatgaggtttgggaaaaattcgaccctgatgctacccagtttatagaattctctaagctgtcggatttcgcagcagctctggatccaccactgctaattgccaaacctaacaaggtgcagttgatcgcaatggacctcccaatggtctcaggagaccggattcattgcctcgatattctcttcgccttcacgaaacgggtgctcggcgagagcggcgagatggatgctctgaggattcagatggaggacaggtttatggcaagtaacccttccaaagtgtcatacgaacccatcaccactaccctcaagcgaaaacaggaggaggtgagtgctgctattatccaacggaatttccggtgttacctgctgaaacagagactgaagaacatcagttcgaattacaataaagaggcaattaaagggaggattgatctacctataaaacaggacatgatcatagacaaactgaatggcaacagcacccctgagaagactgatggcagttcttccactacctctcccccttcttacgacagtgtgacaaagccggacaaggagaagtttgaaaaagacaaaccggaaaaagagagcaaaggtaaagaagttagggaaaatcagaagtag

SEQ ID NO: 300494 - DNA, 1452 bp, Artificial Sequence
  derived and/or modified sequence
atggtcttcgacttcgtcacccggcaggtatttgatattagcataatgatcctgatctgtctgaatatggttaccatgatggtggagaccgatgatcaagggaagtacatgaccctggtgttgtctcgcatcaaccttgtgtttattgtgctgtttacaggtgagtttgtgcttaagcttgtctctctccgccactactactttacaattggctggaacattttcgatttcgttgtagttatcctctctattgtcggaatgttcctggccgaaatgatagagaaatatttcgtgtctcccacactgtttcgcgtcatccgactagcgagaattggacggatactgcggctcattaagggcgcaaagggaattaggactctcttgttcgccctcatgatgtccctgccggcactgtttaatatcggcttgctgctgttcctggtgatgtttatctacgcaatctttggcatgtctaatttcgcatacgtgaagaaggaggcaggaatcgatgatatgttcaatttcgagacattcggaaatagcatgatttgcctgttccagatcaccactagtgccggatgggatggactgttggcacctatcttaaatagcgcccctccagactgtgatccagataccatccacccaggatctagcgttaagggcgattgcgggaatccgtctgtaggcattttcttcttcgtcagctacatcatcatatcatttcttgtcgtggtgaatatgtatatagctgtcattctggagaacttctccgtcgcgacagaggaatcagcggagccactctcagaggatgatttcgagatgttttacgaagtatgggaaaagtttgatccagacgccacccaattcattgagttctccaagctgagtgactttgccgcagctttggatcccccattgctgattgcaaagccaaacaaggtgcagctgatagcgatggaccttccgatggtgtctggggaccgaatacactgcttagatattctctttgcttttactaaacgggtccttggcgagtccggtgaaatggacgctctcagaattcagatggaagataggtttatggcctcaaacccgagcaaggtaagctacgaacccataacaacaactcttaaaaggaaacaggaagaggtctctgctgcaatcattcagaggaattttaggtgctatctactaaaacaaagactcaaaaacatctccagcaactataataaagaggcgatcaaagggcgtatagatcttccgataaagcaggatatgatcatcgacaagttaaatgggaattcaacacccgagaaaacggacgggtcctccagcactacctccccgccaagctatgactctgtaacaaagccagataaagaaaaattcgagaaggataaacctgagaaggaatcaaagggcaaggaagtacgcgaaaatcagaagtag

SEQ ID NO: 300495 - DNA, 1908 bp, Artificial Sequence
  derived and/or modified sequence
attttctgagattggtaaggagtaaggaaactgaggcccaaagaacatacgaatcatgccccaagtcacaaatcttgtaattgccagaactgggacttgacaaggccccataaattctctaagtgacttgactttaccatatttataagagtagttggagctggaatgtgagggagcagggtaagaggggaaaggattgaactgactttactagagttctttaaaaattaaaacatggtcacttcatgacctttgatttttgaacaaattccaaggaatggtctttgattttgtaaccagacaagtctttgatatcagcatcatgatcctcatctgcctcaacatggtcaccatgatggtggaaacggatgaccagggcaaatacatgaccctagttttgtcccggatcaacctagtgttcattgttctgttcactggagaatttgtgctgaagctcgtctccctcagacactactacttcactataggctggaacatctttgactttgtggtggtgattctctccattgtaggtatgtttctggctgagatgatagaaaagtattttgtgtcccctaccttgttccgagtgatccgtcttgccaggattggccgaatcctacgtctgatcaaaggagcaaaggggatccgcacgctgctctttgctttgatgatgtcccttcctgcgttgtttaacatcggcctcctgctcttcctggtcatgtttatctatgccatctttgggatgtccaactttgcctatgttaaaaaggaagctggaattgatgacatgttcaactttgagacctttggcaacagcatgatctgcttgttccaaattacaacctctgctggctgggatggattgctagcacctattcttaatagtgcaccacccgactgtgaccctgacacaattcaccctggcagctcagttaagggagactgtgggaacccatctgttgggattttcttttttgtcagttacatcatcatatccttcctggttgtggtgaacatgtacatcgcggtcatcctggagaacttcagtgttgctactgaagaaagtgcagagcccctgagtgaggatgactttgagatgttctatgaggtttgggaaaagtttgatcccgatgcgacccagtttatagagttctctaaactctctgattttgcagctgccctggatcctcctcttctcatagcaaaacccaacaaagtccagcttattgccatggatctgcccatggtcagtggtgaccggatccactgtcttgatattttatttgcctttacaaagcgtgttttgggtgagagtggagagatggatgcccttcgaatacagatggaagacaggtttatggcatcaaacccctccaaagtctcttatgagcctattacaaccactttgaaacgtaaacaagaggaggtgtctgccgctatcattcagcgtaatttcagatgttatcttttaaagcaaaggttaaaaaatatatcaagtaactataacaaagaggcaattaaagggaggattgacttacctataaaacaagacatgattattgacaaactaaatgggaactccactccagaaaaaacagatgggagttcctctaccacctctcctccttcctatgatagtgtaacaaaaccagacaaggaaaagtttgagaaagacaaaccagaaaaagaaagcaaaggaaaagaggtcagagaaaatcaaaagtaaaaagaaacaaagaattatctttgtgatcaattgtttacagcctatgaaggtaaagtatatgtgtcaactggacttcaagaggaggtccatgccaaactgactgttttaacaaatactcatagtcagtgcctatacaagacagtgaagtgacctctctgtcactgcaactctgtgaagca

SEQ ID NO: 300496 - DNA, 1452 bp, Artificial Sequence
  derived and/or modified sequence
atggtgttcgacttcgtgaccagacaggtgttcgacatcagcatcatgatcctgatctgcctgaacatggtgaccatgatggtggagaccgacgaccagggcaagtacatgaccctggtgctgagcagaatcaacctggtgttcatcgtgctgttcaccggcgagttcgtgctgaagctggtgagcctgagacactactacttcaccatcggctggaacatcttcgacttcgtggtggtgatcctgagcatcgtgggcatgttcctggccgagatgatcgagaagtacttcgtgagccccaccctgttcagagtgatcagactggccagaatcggcagaatcctgagactgatcaagggcgccaagggcatcagaaccctgctgttcgccctgatgatgagcctgcccgccctgttcaacatcggcctgctgctgttcctggtgatgttcatctacgccatcttcggcatgagcaacttcgcctacgtgaagaaggaggccggcatcgacgacatgttcaacttcgagaccttcggcaacagcatgatctgcctgttccagatcaccaccagcgccggctgggacggcctgctggcccccatcctgaacagcgccccccccgactgcgaccccgacaccatccaccccggcagcagcgtgaagggcgactgcggcaaccccagcgtgggcatcttcttcttcgtgagctacatcatcatcagcttcctggtggtggtgaacatgtacatcgccgtgatcctggagaacttcagcgtggccaccgaggagagcgccgagcccctgagcgaggacgacttcgagatgttctacgaggtgtgggagaagttcgaccccgacgccacccagttcatcgagttcagcaagctgagcgacttcgccgccgccctggacccccccctgctgatcgccaagcccaacaaggtgcagctgatcgccatggacctgcccatggtgagcggcgacagaatccactgcctggacatcctgttcgccttcaccaagagagtgctgggcgagagcggcgagatggacgccctgagaatccagatggaggacagattcatggccagcaaccccagcaaggtgagctacgagcccatcaccaccaccctgaagagaaagcaggaggaggtgagcgccgccatcatccagagaaacttcagatgctacctgctgaagcagagactgaagaacatcagcagcaactacaacaaggaggccatcaagggcagaatcgacctgcccatcaagcaggacatgatcatcgacaagctgaacggcaacagcacccccgagaagaccgacggcagcagcagcaccaccagcccccccagctacgacagcgtgaccaagcccgacaaggagaagttcgagaaggacaagcccgagaaggagagcaagggcaaggaggtgagagagaaccagaagtag

SEQ ID NO: 300497 - protein, 200 aa, Artificial Sequence
  derived and/or modified sequence
MAQALLVPPGPESFRLFTRESLAAIEKRAAEEKAKKPKKEQDNDDENKPKPNSDLEAGKNLPFIYGDIPPEMVSEPLEDLDPYYINKKTFIVMNKGKAIFRFSATSALYILTPLNPVRKIAIKILVHSLFSMLIMCTILTNCVFMTLSNPPDWTKNVEYTFTGIYTFESLIKILARGFCLEDFTFLRDPWNWLDFSVIVM

SEQ ID NO: 300498 - DNA, 603 bp, Artificial Sequence
  derived and/or modified sequence
atggcccaggccctgcttgtacctccagggccagagtcttttagactgttcacaagagaaagtttagcagcgattgagaagcgggctgcagaggagaaagccaaaaagccaaagaaggaacaggacaacgatgatgagaataagcctaagccgaactctgatctcgaggcagggaagaatctgccattcatctatggggatatccccccagaaatggtcagcgagcccctggaagaccttgatccctactatattaataagaaaacattcattgtcatgaataaaggaaaggccattttccgtttctccgccacatccgccctgtacattctgacacccttaaaccctgttagaaaaatcgccatcaaaatcctggtgcattctttgttttccatgctgatcatgtgcactatcctcacgaactgcgtgtttatgacgctgtcaaatccccccgactggactaaaaacgtcgaatacactttcactggcatctacaccttcgaatcactcatcaagatccttgccaggggcttctgcctggaggactttacattcctcagggacccctggaattggctggactttagcgttatagtgatgtag

SEQ ID NO: 300499 - DNA, 603 bp, Artificial Sequence
  derived and/or modified sequence
atggcccaggccctgctggtgcccccaggccctgagagcttccgcctcttcacccgggagagcctggccgccatcgagaagagagctgctgaggagaaggccaagaagcccaagaaggagcaggacaatgatgatgagaacaagcccaagcccaacagcgacctggaggccggcaagaacctgcccttcatctatggagacatccccccagagatggtgtctgagcccctggaggacctggacccctactacatcaacaagaagaccttcatcgtgatgaacaagggcaaggccatcttccgcttcagcgccaccagcgccctgtacatcctgacccccctgaaccctgtgaggaagatcgccatcaagatcctggtgcacagcctcttctccatgctgatcatgtgcaccatcctgaccaactgtgtgttcatgaccctgagcaaccccccagactggaccaagaatgtggagtacaccttcaccggcatctacacctttgagagcctcatcaagatcctggcccggggcttctgcctggaggacttcaccttcctgcgggacccctggaactggctggacttcagcgtcatcgtgatgtag

SEQ ID NO: 300500 - DNA, 603 bp, Artificial Sequence
  derived and/or modified sequence
atggcccaggccctgctggtgccccccggccccgagagcttccggctatttacaagagagtccctggcagccatagagaaaagagcagctgaagagaaagcaaaaaaaccaaaaaaggagcaagataacgatgatgaaaataagcctaagccaaactcagatctcgaggccggaaagaacctccccttcatttacggtgatatcccacctgaaatggtcagtgagccactggaggacctcgacccctactacatcaacaagaaaacttttatcgtcatgaacaaagggaaagctatctttaggttttccgctacatcagctctgtacattctgacgccactcaaccccgtcagaaagattgccattaaaatccttgtgcactccctctttagtatgctgattatgtgtacgatcctgaccaactgcgtcttcatgacgctaagcaacccacccgattggactaagaatgttgagtacactttcacaggcatatatacctttgaatctctgattaagattctggcgcgggggttctgcttagaggacttcaccttccttagagacccgtggaactggttggatttctctgtgattgtcatgtag

SEQ ID NO: 300501 - DNA, 603 bp, Artificial Sequence
  derived and/or modified sequence
atggcccaagcccttctggtcccccctggacccgaatcattccggctattcactcgagaatctttggcagctatagagaagagggccgctgaagagaaggccaagaagcctaagaaggaacaggacaacgatgacgagaataagcccaagcccaatagtgatctggaagcagggaaaaatttgccatttatctacggagacattccgcctgagatggtgagcgagcccctggaagacctggacccctattacattaacaaaaagacatttattgtcatgaacaaaggtaaagctatatttcggttttccgccacttctgccttgtacatccttacccctctgaaccccgtacgcaagatcgccattaaaattctggtgcattctctgttctcaatgttgattatgtgcaccattttgaccaattgcgtttttatgacactgtccaaccctccggattggaccaaaaatgtggaatacaccttcaccgggatatataccttcgagagcttaattaagatactagcacgcggattctgtctggaagatttcacctttctgcgagacccttggaactggctcgatttctcggtcattgtgatgtag

SEQ ID NO: 300502 - DNA, 1216 bp, Artificial Sequence
  derived and/or modified sequence
agaacaggaagcggaggcataagcagagaggattctggaaaggtctctttgttttcttatccacagagaaagaaagaaaaaaaattgtaactaatttgtaaacctctgtggtcaaaaaaaaaaaaaaaaaaaaaagctgaacagctgcagaggaagacacgttataccctaaccatcttggatgctgggctttgttatgctgtaattcataaggctctgttttatcagagattatggagcaagaaaactgaagccaagccacatcaaggtttgacagggatgagatacctgtcaaggattcatagtagagtggcttactgggaaaggagcaaagaatctcttctagggatattgtaagaataaatgagataattcacagaagggacctggagcttttccggaaaaaggtgctgtgactatctaaggggaaaagctgagagtctggaactagcctatcttccgaggacttagagacaacagtatgggaatttcaacgagacgtttttactttcttttgaccaagattcaaattctttattccagcccttgataagtaaataagaaggtaattcgtatgcaagaagctacacgtaattaaatgtgcaggatgaaaagatggcacaggcactgttggtacccccaggacctgaaagcttccgcctttttactagagaatctcttgctgctatcgaaaaacgtgctgcagaagagaaagccaagaagcccaaaaaggaacaagataatgatgatgagaacaaaccaaagccaaatagtgacttggaagctggaaagaaccttccatttatttatggagacattcctccagagatggtgtcagagcccctggaggacctggatccctactatatcaataagaaaacttttatagtaatgaataaaggaaaggcaattttccgattcagtgccacctctgccttgtatattttaactccactaaaccctgttaggaaaattgctatcaagattttggtacattctttattcagcatgcttatcatgtgcactattttgaccaactgtgtatttatgaccttgagcaaccctcctgactggacaaagaatgtagagtacacattcactggaatctatacctttgagtcacttataaaaatcttggcaagagggttttgcttagaagattttacgtttcttcgtgatccatggaactggctggatttcagtgtcattgtgatgg

SEQ ID NO: 300503 - DNA, 603 bp, Artificial Sequence
  derived and/or modified sequence
atggcccaggccctgctggtgccccccggccccgagagcttcagactgttcaccagagagagcctggccgccatcgagaagagagccgccgaggagaaggccaagaagcccaagaaggagcaggacaacgacgacgagaacaagcccaagcccaacagcgacctggaggccggcaagaacctgcccttcatctacggcgacatcccccccgagatggtgagcgagcccctggaggacctggacccctactacatcaacaagaagaccttcatcgtgatgaacaagggcaaggccatcttcagattcagcgccaccagcgccctgtacatcctgacccccctgaaccccgtgagaaagatcgccatcaagatcctggtgcacagcctgttcagcatgctgatcatgtgcaccatcctgaccaactgcgtgttcatgaccctgagcaacccccccgactggaccaagaacgtggagtacaccttcaccggcatctacaccttcgagagcctgatcaagatcctggccagaggcttctgcctggaggacttcaccttcctgagagacccctggaactggctggacttcagcgtgatcgtgatgtag

SEQ ID NO: 300504 - protein, 1989 aa, Artificial Sequence
  derived and/or modified sequence
MAMLPPPGPQSFVHFTKQSLALIEQRIAERKSKEPKEEKKDDDEEAPKPSSDLEAGKQLPFIYGDIPPGMVSEPLEDLDPYYADKKTFIVLNKGKTIFRFNATPALYMLSPFSPLRRISIKILVHSTLFSMLIMCTILTNCIFMTMNNPPDWTKNVEYTFTGIYTFESLVKILARGFCVGEFTFLRDPWNWLDFVVIVFAYLTEFVNLGNVSALRTFRVLRALKTISVIPGLKTIVGALIQSVKKLSDVMILTVFCLSVFALIGLQLFMGNLKHKCFRNSLENNETLESIMNTLESEEDFRKYFYYLEGSKDALLCGFSTDSGQCPEGYTCVKIGRNPDYGYTSFDTFSWAFLALFRLMTQDYWENLYQQTLRAAGKTYMIFFVVVIFLGSFYLINLILAVVAMAYEEQNQANIEEAKQKELEFQQMLDRLKKEQEEAEAIAAAAAEYTSIRRSRIMGLSESSSETSKLSSKSAKERRNRRKKKNQKKLSSGEEKGDAEKLSKSESEDSIRRKSFHLGVEGHRRAHEKRLSTPNQSPLSIRGSLFSARRSSRTSLFSFKGRGRDIGSETEFADDEHSIFGDNESRRGSLFVPHRPQERRSSNISQASRSPPMLPVNGKMHSAVDCNGVVSLVDGRSALMLPNGQLLPEVIIDKATSDDSGTTNQIHKKRRCSSYLLSEDMLNDPNLRQRAMSRASILTNTVEELEESRQKCPPWWYRFAHKFLIWNCSPYWIKFKKCIYFIVMDPFVDLAITICIVLNTLFMAMEHHPMTEEFKNVLAIGNLVFTGIFAAEMVLKLIAMDPYEYFQVGWNIFDSLIVTLSLVELFLADVEGLSVLRSFRLLRVFKLAKSWPTLNMLIKIIGNSVGALGNLTLVLAIIVFIFAVVGMQLFGKSYKECVCKINDDCTLPRWHMNDFFHSFLIVFRVLCGEWIETMWDCMEVAGQAMCLIVYMMVMVIGNLVVLNLFLALLLSSFSSDNLTAIEEDPDANNLQIAVTRIKKGINYVKQTLREFILKAFSKKPKISREIRQAEDLNTKKENYISNHTLAEMSKGHNFLKEKDKISGFGSSVDKHLMEDSDGQSFIHNPSLTVTVPIAPGESDLENMNAEELSSDSDSEYSKVRLNRSSSSECSTVDNPLPGEGEEAEAEPMNSDEPEACFTDGCVWRFSCCQVNIESGKGKIWWNIRKTCYKIVEHSWFESFIVLMILLSSGALAFEDIYIERKKTIKIILEYADKIFTYIFILEMLLKWIAYGYKTYFTNAWCWLDFLIVDVSLVTLVANTLGYSDLGPIKSLRTLRALRPLRALSRFEGMRVVVNALIGAIPSIMNVLLVCLIFWLIFSIMGVNLFAGKFYECINTTDGSRFPASQVPNRSECFALMNVSQNVRWKNLKVNFDNVGLGYLSLLQVATFKGWTIIMYAAVDSVNVDKQPKYEYSLYMYIYFVVFIIFGSFFTLNLFIGVIIDNFNQQKKKLGGQDIFMTEEQKKYYNAMKKLGSKKPQKPIPRPGNKIQGCIFDLVTNQAFDISIMVLICLNMVTMMVEKEGQSQHMTEVLYWINVVFIILFTGECVLKLISLRHYYFTVGWNIFDFVVVIISIVGMFLADLIETYFVSPTLFRVIRLARIGRILRLVKGAKGIRTLLFALMMSLPALFNIGLLLFLVMFIYAIFGMSNFAYVKKEDGINDMFNFETFGNSMICLFQITTSAGWDGLLAPILNSKPPDCDPKKVHPGSSVEGDCGNPSVGIFYFVSYIIISFLVVVNMYIAVILENFSVATEESTEPLSEDDFEMFYEVWEKFDPDATQFIEFSKLSDFAAALDPPLLIAKPNKVQLIAMDLPMVSGDRIHCLDILFAFTKRVLGESGEMDSLRSQMEERFMSANPSKVSYEPITTTLKRKQEDVSATVIQRAYRRYRLRQNVKNISSIYIKDGDRDDDLLNKKDMAFDNVNENSSPEKTDATSSTTSPPSYDSVTKPDKEKYEQDRTEKEDKGKDSKESKK

SEQ ID NO: 300505 - protein, 1988 aa, Artificial Sequence
  derived and/or modified sequence
MAMLPPPGPQSFVHFTKQSLALIEQRIAERKSKEPKEEKKDDDEEAPKPSSDLEAGKQLPFIYGDIPPGMVSEPLEDLDPYYADKKTFIVLNKGKTIFRFNATPALYMLSPFSPLRRISIKILVHSLFSMLIMCTILTNCIFMTMNNPPDWTKNVEYTFTGIYTFESLVKILARGFCVGEFTFLRDPWNWLDFVVIVFAYLTEFVNLGNVSALRTFRVLRALKTISVIPGLKTIVGALIQSVKKLSDVMILTVFCLSVFALIGLQLFMGNLKHKCFRNSLENNETLESIMNTLESEEDFRKYFYYLEGSKDALLCGFSTDSGQCPEGYTCVKIGRNPDYGYTSFDTFSWAFLALFRLMTQDYWENLYQQTLRAAGKTYMIFFVVVIFLGSFYLINLILAVVAMAYEEQNQANIEEAKQKELEFQQMLDRLKKEQEEAEAIAAAAAEYTSIRRSRIMGLSESSSETSKLSSKSAKERRNRRKKKNQKKLSSGEEKGDAEKLSKSESEDSIRRKSFHLGVEGHRRAHEKRLSTPNQSPLSIRGSLFSARRSSRTSLFSFKGRGRDIGSETEFADDEHSIFGDNESRRGSLFVPHRPQERRSSNISQASRSPPMLPVNGKMHSAVDCNGVVSLVDGRSALMLPNGQLLPEVIIDKATSDDSGTTNQIHKKRRCSSYLLSEDMLNDPNLRQRAMSRASILTNTVEELEESRQKCPPWWYRFAHKFLIWNCSPYWIKFKKCIYFIVMDPFVDLAITICIVLNTLFMAMEHHPMTEEFKNVLAIGNLVFTGIFAAEMVLKLIAMDPYEYFQVGWNIFDSLIVTLSLVELFLADVEGLSVLRSFRLLRVFKLAKSWPTLNMLIKIIGNSVGALGNLTLVLAIIVFIFAVVGMQLFGKSYKECVCKINDDCTLPRWHMNDFFHSFLIVFRVLCGEWIETMWDCMEVAGQAMCLIVYMMVMVIGNLVVLNLFLALLLSSFSSDNLTAIEEDPDANNLQIAVTRIKKGINYVKQTLREFILKAFSKKPKISREIRQAEDLNTKKENYISNHTLAEMSKGHNFLKEKDKISGFGSSVDKHLMEDSDGQSFIHNPSLTVTVPIAPGESDLENMNAEELSSDSDSEYSKVRLNRSSSSECSTVDNPLPGEGEEAEAEPMNSDEPEACFTDGCVWRFSCCQVNIESGKGKIWWNIRKTCYKIVEHSWFESFIVLMILLSSGALAFEDIYIERKKTIKIILEYADKIFTYIFILEMLLKWIAYGYKTYFTNAWCWLDFLIVDVSLVTLVANTLGYSDLGPIKSLRTLRALRPLRALSRFEGMRVVVNALIGAIPSIMNVLLVCLIFWLIFSIMGVNLFAGKFYECINTTDGSRFPASQVPNRSECFALMNVSQNVRWKNLKVNFDNVGLGYLSLLQVATFKGWTIIMYAAVDSVNVDKQPKYEYSLYMYIYFVVFIIFGSFFTLNLFIGVIIDNFNQQKKKLGGQDIFMTEEQKKYYNAMKKLGSKKPQKPIPRPGNKIQGCIFDLVTNQAFDISIMVLICLNMVTMMVEKEGQSQHMTEVLYWINVVFIILFTGECVLKLISLRHYYFTVGWNIFDFVVVIISIVGMFLADLIETYFVSPTLFRVIRLARIGRILRLVKGAKGIRTLLFALMMSLPALFNIGLLLFLVMFIYAIFGMSNFAYVKKEDGINDMFNFETFGNSMICLFQITTSAGWDGLLAPILNSKPPDCDPKKVHPGSSVEGDCGNPSVGIFYFVSYIIISFLVVVNMYIAVILENFSVATEESTEPLSEDDFEMFYEVWEKFDPDATQFIEFSKLSDFAAALDPPLLIAKPNKVQLIAMDLPMVSGDRIHCLDILFAFTKRVLGESGEMDSLRSQMEERFMSANPSKVSYEPITTTLKRKQEDVSATVIQRAYRRYRLRQNVKNISSIYIKDGDRDDDLLNKKDMAFDNVNENSSPEKTDATSSTTSPPSYDSVTKPDKEKYEQDRTEKEDKGKDSKESKK

SEQ ID NO: 300506 - DNA, 5970 bp, Artificial Sequence
  derived and/or modified sequence
atggcgatgttgccccctcccggtccccaatccttcgtccactttacaaagcaatccctcgcactaatcgaacaacggatcgccgagaggaaatccaaggagcctaaagaggagaaaaaggacgacgatgaggaagcacccaaaccttcatcggatctggaggcggggaaacagcttcccttcatctatggggatatcccacctggcatggtgtccgagccactcgaggacctggatccttattacgctgacaagaaaacatttatagtgcttaataagggcaagactattttccgctttaatgcgactcccgctctttacatgctgtcacctttctcgcccctcaggcggataagcattaagatcctcgtccacagcacgctgttcagtatgctgattatgtgtaccatcctcacaaattgcatcttcatgaccatgaacaacccaccagattggacaaaaaacgtggaatacacctttaccggcatctacaccttcgagtcccttgtcaaaattctggcaagaggattttgcgtgggggagttcacctttttgcgcgatccatggaattggctggattttgtcgtgatcgtctttgcctatctgactgaatttgtcaatctcggtaatgtcagcgcactgaggacatttagggttctgcgtgcactcaaaaccatcagtgtgatcccaggattgaagaccattgtgggcgctctgatccagtcagttaagaaactatcagacgtgatgatcctcaccgtcttctgcctatctgtgttcgctctcatcggtttgcagttgtttatggggaacctcaagcacaagtgcttccggaatagcctggaaaacaacgagaccctggagtctataatgaacacccttgaaagcgaggaggacttccgcaagtatttctactacctggaaggttctaaggatgctctgttgtgtgggttcagcacagactccgggcaatgtccagagggctacacatgcgttaagatcggtcgtaatccggactatgggtacacctctttcgacacattttcttgggcattcctggctctgttccgtttgatgactcaagattactgggagaacttgtaccagcagacactgagggctgcagggaagacgtatatgattttctttgtggtggtaattttcctcggctcgttctacctgattaacctaatcctcgctgtggtggccatggcctacgaagagcagaaccaggccaatatcgaggaagccaagcagaaagagctcgagtttcagcagatgttggacaggctaaagaaggaacaggaggaggccgaggcaatcgctgccgccgctgctgagtacacctctatcaggcgcagtagaattatgggcttatcggaaagctcaagcgagacctctaagctgagcagcaagtcagcaaaggaacgacggaaccggagaaagaagaaaaaccaaaagaagttatcttctggagaggagaagggggacgctgagaagctgtctaaatccgagtccgaggacagcatcaggcgtaagtcctttcacttaggagtggaaggccatcgacgcgcacatgagaagcggcttagcaccccaaaccagtcccctttgtccatccgaggtagcctcttctccgcaaggcggagtagtagaacaagcttgttctcctttaagggccgcggccgggatatcgggtcggagaccgaatttgctgatgacgaacactccatcttcggggataacgaatcacgacgagggtcactgttcgtaccgcaccggcctcaggaaagacgctctagcaatatcagccaagcttcccgtagcccccctatgctgccagtgaacgggaagatgcatagtgccgtggattgcaacggggtggtgtcacttgttgatggcagatccgctctgatgctgcccaacggacaattgttgcctgaagtcataatagacaaggccacctccgacgacagtggaacgacaaatcagattcacaaaaagagacgatgctcgtcctatctgttgtctgaggacatgctcaatgatcctaacctgcggcagcgcgccatgtccagggcgtccattctgaccaacaccgttgaagagcttgaggaatcaagacagaagtgtccaccgtggtggtaccgatttgctcacaaatttctcatatggaactgcagtccctactggatcaagttcaagaaatgtatttatttcatcgttatggacccatttgtggatttggccattacaatctgcattgtgttaaacactctttttatggccatggaacatcatccaatgacagaagagttcaaaaatgtgctcgcgatcggcaatctagtttttaccggaatctttgccgcagagatggtactgaagctgattgctatggacccgtacgaatactttcaggtgggatggaacatcttcgactctctcatagtcacactctccctagtcgagttgttcctcgccgatgtagaaggcctgtctgtccttcgttcatttcgcctgctgcgggttttcaaactggctaagtcctggcccaccctgaacatgctgattaaaatcattggaaacagcgtgggggcgctggggaacttaactcttgtgctggctattatcgtgttcatctttgccgttgttgggatgcagttgttcggcaaatcttacaaagaatgtgtttgtaaaattaatgatgattgcacactgcctaggtggcatatgaacgacttcttccattctttcctgattgtgttcagagtcctgtgtggagagtggatcgagaccatgtgggactgcatggaggtggccggccaagccatgtgtttaattgtgtatatgatggttatggtgatcggcaaccttgttgtgctgaacctgtttctcgctctcctgctgagctcattttcgtccgataaccttactgcaatagaggaggaccccgatgccaataatctgcagatcgccgtcacacgcattaagaaggggatcaattatgtgaaacagacattaagggaattcatcctaaaagcatttagcaaaaagccaaagatttcacgcgaaattcgccaagctgaagatttaaatactaagaaagaaaactacatctccaaccacaccttggcggaaatgagtaaaggacacaatttcctgaaggaaaaagataagatttccggtttcggctcgagtgttgacaaacatctcatggaggactccgacggccagagtttcattcacaatccctcactcaccgtcaccgtgcctatcgcacctggcgaatctgatcttgaaaatatgaatgccgaggaactctcatctgactctgactctgaatactccaaagtgcgtctgaatagaagctctagtagcgagtgttctactgtcgataacccactgcctggtgagggcgaggaggccgaggcggagcctatgaactctgatgagcccgaggcctgctttacagacggatgcgtttggcggttttcatgctgccaagtgaatatagaaagcggtaaaggtaagatttggtggaacatcaggaagacctgctataaaattgtggagcactcctggttcgagtcttttatcgtcctcatgattctgctttccagtggggcgctcgcgtttgaggatatttacatcgagcgtaagaagacaataaaaataatcctggagtatgctgataaaatctttacctacattttcattctggaaatgttgctgaaatggatcgcctacggatataagacctacttcaccaatgcgtggtgttggctggacttcctcattgtcgatgtgtccctggttaccctcgtggccaacaccctcgggtacagtgatcttggtcccattaagtctctccgaactcttcgcgcactccggccactccgtgctctgagtaggtttgagggcatgcgagtggtggtcaacgccctgatcggagcaatacctagcattatgaatgtgctgctcgtgtgcctcatcttctggctcatcttttccatcatgggcgtgaacttgttcgcaggcaagttttacgagtgcattaacacaaccgatgggtcacgcttccccgcctcacaagtgcccaaccgtagcgagtgttttgccctgatgaatgtctctcagaacgttcggtggaaaaatctgaaggtcaactttgataacgttggtttgggctacctctccctactccaggtggcaacttttaagggctggacgatcattatgtacgcagccgttgattcggttaacgtggataagcagcccaagtacgaatattcactttatatgtatatctacttcgtggtgttcattatctttggatctttcttcactctgaatctttttatcggggtaatcatagacaactttaatcagcagaaaaaaaagctcggcggccaggatatatttatgaccgaggagcagaagaaatattataacgccatgaaaaagctcggcagtaaaaaacctcaaaagccgatccctcgtcctggcaataaaatccaaggatgtattttcgacctggtcaccaaccaggcttttgatataagcatcatggtgctcatctgtctgaatatggtgacaatgatggtagaaaaggaaggccagtcacagcatatgacggaggtactgtactggattaacgttgttttcattattctgttcactggtgagtgtgttttaaaacttattagtttacgtcactactacttcactgttgggtggaacatcttcgatttcgttgtcgttattattagcattgtggggatgttcctcgctgacctgatagaaacgtattttgtgagccctaccctctttcgtgtgatcagattagctcgcatagggcgtattctgcgactcgtcaagggagcaaagggcattcggaccctcctcttcgccttaatgatgagcctccccgcgttgttcaacatcgggcttcttctgttcttagtgatgttcatctatgctatattcggcatgtcaaatttcgcctacgtgaaaaaggaggatggaatcaatgatatgtttaatttcgaaacctttggcaattccatgatctgcctcttccagatcacgacttccgctggttgggatggtctcctcgctcccatactcaacagcaagcccccggactgcgatccgaaaaaggtccatccagggtcaagcgtggagggagattgcggaaatccaagcgtcggaattttttattttgtgtcatacattatcattagtttcctggtagtggtcaacatgtacatcgcagttatcttggagaatttctcagtagccaccgaagagtctaccgaacccctgtccgaagatgacttcgagatgttttacgaagtgtgggagaaatttgaccctgatgctacacaattcattgagttctcaaagctgtcggactttgccgccgccttagaccccccgctcttaatcgccaagccaaacaaggtgcaactgatcgcaatggacctaccgatggtcagcggggacagaattcactgtctcgacatccttttcgcttttacgaagcgggtgctgggtgaatcaggagaaatggacagtcttcgcagtcagatggaggaacgcttcatgtccgcgaatccgtcaaaagtcagctatgagccaataacaactacactaaaaagaaagcaggaggacgtcagcgcgactgtaatccagagggcctaccggaggtacagacttcgccagaacgtgaaaaatatctcatccatctatatcaaagacggagaccgggacgacgacctcctgaataaaaaagacatggcctttgacaacgtgaatgaaaattccagtccagagaaaacagacgctactagtagtactactagtccaccttcctatgattccgtgaccaagccggataaggaaaagtatgaacaggaccgcacagagaaggaggacaaaggaaaagatagtaaagagtctaaaaaatag

SEQ ID NO: 300507 - DNA, 5967 bp, Artificial Sequence
  derived and/or modified sequence
atggccatgttgccccccccaggcccccaatcttttgtgcatttcactaagcagtcgctcgctcttatcgagcagcgcatcgccgagagaaagtctaaggagcccaaggaggagaagaaggacgacgacgaggaagcacccaaaccttcaagtgatctcgaggctggaaaacagctgccattcatttacggcgacattccccctgggatggttagtgagccccttgaggatttagatccatactacgccgacaagaagaccttcatcgtgctcaacaaagggaaaaccatttttcgtttcaatgcgacgccagcactgtatatgttgtccccattttccccgctgcgcagaatatcaataaagatcctggtgcactctctgttcagtatgctcattatgtgtactatcctgactaattgtatctttatgactatgaacaatcctcctgactggaccaagaacgtggagtacaccttcaccggcatatatacttttgagtctctggtcaagatactggcacggggcttctgcgttggggaattcactttcttacgcgatccttggaattggttggacttcgtagtcatagtgttcgcctatctgactgagtttgttaacttgggaaatgtaagcgcattgcgaacattccgtgtgctgcgtgctctgaaaacaatttcagttatcccgggactgaagaccattgtgggagcactaattcagtccgttaagaagctgtctgatgtgatgatcctaactgtattctgtctgtccgtgttcgccctgattggactgcaactttttatgggtaatctgaaacacaagtgctttaggaacagcctagaaaacaatgagactctggagagtataatgaacactctcgagagcgaggaagatttcaggaagtatttctactatctcgaggggagcaaagacgccctcctgtgtgggttttcaacggattcaggtcaatgcccagaggggtacacctgcgtcaagatcggtaggaacccagactatggatacacatcgttcgacaccttctcttgggcgttcttagccctgtttaggctgatgacacaagattattgggagaatctgtatcagcagacactgagggccgcagggaaaacatatatgatcttcttcgtggtggtgatttttctcggctccttctatctgatcaatttgatcctggcggtggtcgccatggcctacgaggagcagaaccaagcgaatattgaagaagccaagcagaaggagctcgagtttcagcagatgctggaccggctgaagaaagaacaggaggaggccgaggcgattgccgctgcagcagccgagtatacctctatcaggcgctcacggatcatgggcctttcggagtctagcagtgaaacgtccaagctgtcaagtaaaagcgccaaagagcggcggaacaggagaaagaagaagaatcagaagaaactgagtagcggtgaggagaagggagatgccgaaaagctttcaaaatcagagagcgaagattccatcagaaggaagtccttccacctcggggtcgaaggccatcgccgcgctcacgagaaaagacttagcaccccgaaccagagccccctctccattcgaggatctttgttctctgcgaggcggagcagccgcacttcactctttagttttaaggggcgtggaagggatatcgggtctgaaacagaattcgcggatgacgaacacagtatattcggtgataatgaatccagaaggggatctctgtttgtgccccaccggccgcaggagcgccggtcgtcgaacattagtcaagcctcaaggagcccgcccatgctgccggtcaacggaaagatgcactccgccgttgactgcaacggggtggtgtctctggtagatggtagatccgccctcatgttaccaaacgggcaactgctgcctgaggttataatcgacaaggctacctccgatgattctggaacgactaatcaaatccacaagaagcgtcgatgttcctcgtatctgctgtcagaagacatgttgaacgatcccaacctccggcagcgggcaatgtcaagagcttccatcctgacaaataccgtggaggagcttgaggaatcgcggcaaaagtgtcccccatggtggtatcggtttgcgcacaagtttctcatttggaactgctctccctattggattaagtttaagaagtgcatctactttatagtgatggacccctttgtggaccttgctatcacgatttgcatagtgcttaataccttgtttatggccatggagcatcatcctatgactgaagaattcaagaatgtgctagcgataggaaatcttgtttttacgggcatttttgctgcggagatggttttaaagttgatagcgatggatccctacgaatacttccaggttggatggaatatctttgactcccttatcgtaacactcagtctggtggagctctttctggcagatgtggagggcctgagcgtgctgaggtcattcaggctcctgcgtgtctttaagctcgctaaatcatggcccaccctgaatatgctgattaaaatcatcggaaattccgtgggggctctaggaaatctgacccttgtgctggctatcatcgtgtttatattcgcagtcgttggcatgcagctgttcggcaagtcctacaaggaatgtgtgtgtaaaattaatgacgattgcactctaccaagatggcacatgaacgactttttccattccttcttaattgtcttccgggtcttgtgtggcgaatggatagagaccatgtgggactgtatggaggtcgctgggcaggccatgtgtctgatcgtctacatgatggtcatggtgattggcaacctggtcgtgctgaatttattcttggcactactgttgagcagcttttcttctgacaacctgacagctattgaggaagatcctgatgctaataacttacagatcgcagtgaccagaattaagaagggaattaactacgttaagcaaactctgagagaattcattctgaaggcattctccaagaaaccaaagataagccgggagattcggcaagctgaagacctaaatacaaaaaaggaaaattatatttccaatcatacacttgccgagatgagcaaagggcacaactttctcaaggaaaaagataagattagcggttttggatcttccgttgacaagcacttaatggaggatagcgacggacagtcttttattcacaacccttccttaaccgtgactgttcctattgctccaggagagagtgacctggaaaacatgaatgctgaagaactgtccagcgattcagacagcgaatattctaaggtacgtcttaatagaagttcctccagcgagtgcagtactgtggataatcctctccccggcgagggcgaagaagctgaggccgaacccatgaacagcgacgaaccagaggcgtgtttcaccgacggttgcgtctggagattcagttgttgccaggtgaacattgaaagtggcaaaggaaaaatttggtggaatatacgaaagacatgctataaaatcgttgaacactcttggtttgaatctttcattgttttgatgattctgctttcaagcggagctctagcctttgaggatatttatatagagaggaagaagacaatcaaaataattttggagtacgctgataagatatttacttacatctttattttggagatgctactgaaatggattgcatatggctataagacttatttcacgaacgcttggtgctggctcgattttctaatagtggatgtgagcctggtgactcttgttgcaaacacacttggatatagcgatttgggccctatcaaaagcctcagaacactgagggccctgcggccattacgggctctctctcgctttgaagggatgcgggttgtggtgaacgcgcttataggagccatcccgtccattatgaatgtgctcctggtatgtctcatcttttggcttattttttctatcatgggtgtgaatttattcgcaggtaagttctacgagtgtatcaacactactgatggtagtcgattccctgcgtcacaagtgccaaatagatctgagtgctttgccctgatgaacgtgagccagaatgtcaggtggaaaaatctcaaggttaactttgataacgtgggattaggatatctatctctccttcaggttgctaccttcaaaggctggaccattataatgtatgcggcagtggattccgtaaatgtcgataagcagcctaaatatgagtatagcctttatatgtacatttacttcgtggtgttcatcattttcggaagttttttcaccctgaatctgtttatcggagtgattatcgataacttcaaccaacaaaaaaagaagctgggtggccaagatatcttcatgactgaagaacagaagaagtactacaatgcaatgaaaaagctcggcagcaaaaaaccccagaagccaataccacggccgggcaacaaaatccagggatgtatctttgatcttgtgacaaaccaagcattcgacatctccatcatggttctaatctgcttgaatatggttacaatgatggtagaaaaggagggtcagtcccagcacatgactgaagtactttactggatcaatgtggtcttcatcatcctgttcactggcgagtgcgtattgaagctgatctcccttagacattactatttcacagttgggtggaacatctttgactttgtcgtcgtcataatatccattgtggggatgttcctagcagatttgatcgagacttattttgtaagccccacacttttccgtgtcatacgtttggcccgaatcggtagaatcctgaggcttgtgaagggcgccaagggcatcagaacattgcttttcgccctcatgatgtcgcttccagcattgtttaacatagggcttctactctttctggtgatgttcatctatgcaatcttcggcatgtccaatttcgcctatgtgaaaaaggaagatggaatcaatgacatgtttaatttcgaaaccttcgggaattcaatgatatgcctattccagatcacaacaagcgctgggtgggacgggctactcgctcccatcctcaacagtaaaccaccagactgcgatccgaagaaggtccaccctggatctagtgtggagggtgattgcggaaaccctagtgtgggtattttttacttcgtctcatacatcattatcagtttcttggtggtggtgaatatgtatatcgcagtaattcttgaaaacttctctgtggctacggaggagagtaccgaacccttgtcagaagatgacttcgagatgttctatgaggtctgggagaagttcgaccctgacgcaacccagtttatagagttcagtaaattatctgactttgctgcagccctcgatccacctcttctgatcgctaagccaaataaggttcagctgatcgctatggatctccccatggtgtccggcgacagaatccactgcctcgacattttgttcgcctttacaaaaagagttctcggcgagagtggagaaatggattccctgcgctcccagatggaggaaaggttcatgtccgcaaacccctcaaaagtgagctatgaacctatcactaccactttaaagagaaagcaggaggacgtatctgctaccgtaattcaacgggcctatagacgctatcgactgcgtcagaatgttaagaatatctccagcatatacattaaggacggggacagagatgacgatctgctgaataagaaagatatggccttcgataacgtaaacgagaattcctcccccgaaaagaccgacgccaccagctccaccacatctcctccatcatatgatagcgtgaccaaacccgataaggaaaaatatgaacaggatcgcaccgagaaggaggacaaaggaaaggactcaaaggaaagcaagaagtag

SEQ ID NO: 300508 - DNA, 5970 bp, Artificial Sequence
  derived and/or modified sequence
atggccatgctgcccccacctggcccccagagctttgtgcacttcaccaagcagagcctggccctgattgagcagagaattgctgagaggaagagcaaggagcccaaggaggagaagaaggatgatgatgaggaggcccccaagcccagcagtgacctggaggccggcaagcagctgcccttcatctatggagacatccccccaggcatggtgtctgagcccctggaggacctggacccctactatgctgacaagaagaccttcatcgtgctgaacaagggcaagaccatcttccgcttcaatgccaccccagccctgtacatgctgagccccttcagccccctgcggcgcatcagcatcaagatcctggtgcacagcaccctcttctccatgctgatcatgtgcaccatcctgaccaactgcatcttcatgaccatgaacaaccccccagactggaccaagaatgtggagtacaccttcaccggcatctacacctttgagagcctggtgaagatcctggcccggggcttctgtgtgggggagttcaccttcctgcgggacccctggaactggctggactttgtggtgattgtgtttgcctacctgacagaatttgtgaacctgggcaatgtgtctgccctgcggaccttccgggtgctgcgggccctgaagaccatcagcgtcatccctggcctgaagaccatcgtgggcgccctgatccagagcgtgaagaagctgagtgatgtgatgatcctgactgtgttctgcctgtctgtgtttgccctgattggcctgcagctgttcatgggcaacctgaagcacaagtgcttcaggaacagcctggagaacaatgagaccctggagagcatcatgaacaccctggagagcgaggaggacttcaggaagtacttctactacctggagggcagcaaggatgccctgctgtgtggcttcagcacagacagcggccagtgcccagagggctacacctgtgtgaagattggaagaaatccagactatggctacaccagctttgacaccttctcctgggccttcctggccctcttccggctgatgacccaggactactgggagaacctgtaccagcagaccctgcgggctgctgggaagacctacatgatcttctttgtggtggtgatcttcctgggcagcttctacctgatcaacctgatcctggccgtggtggccatggcctatgaggagcagaaccaggccaacatcgaggaggccaagcagaaggagctggagttccagcagatgctggaccggctgaagaaggagcaggaggaggccgaggccatcgctgctgctgctgctgagtacaccagcatccgccgcagccgcatcatgggcctgtctgagagcagcagcgagaccagcaagctgagcagcaagagcgccaaggagaggaggaacagaaggaagaagaagaaccagaagaagctgagcagtggagaggagaagggagatgctgagaagctgagcaagtctgagagtgaagattccatccggaggaagagcttccacctgggcgtggagggccacagaagagcccacgagaagaggctgagcacccccaaccagagccccctgagcatccggggcagcctcttcagcgcccggcgcagcagcaggaccagcctcttctccttcaagggccggggccgggacatcggcagcgagacagaatttgctgatgatgagcacagcatctttggagacaatgaaagcagaagaggcagcctgtttgtgccccaccggccccaggagcggcgcagcagcaacatcagccaggccagccgcagcccccccatgctgcctgtgaatggcaagatgcacagcgctgtggactgcaatggagtggtgtccctggtggatggccgcagcgccctgatgctgcccaacggccagctgctgcctgaggtgatcatcgacaaggccaccagtgatgattctggcaccaccaaccagatccacaagaagaggcgctgcagcagctacctgctgtctgaggacatgctgaatgaccccaacctgcggcagagggccatgagccgggccagcatcctgaccaacacagtggaggagctggaggagagccggcagaagtgccccccctggtggtacagatttgcccacaagttcctgatctggaactgcagcccctactggatcaagttcaagaagtgcatctacttcatcgtgatggacccctttgtggacctggccatcaccatctgcatcgtgctgaacaccctcttcatggccatggagcaccaccccatgacagaggagttcaagaatgtgctggccatcggcaacctggtgttcaccggcatctttgctgctgagatggtgctgaagctgattgccatggacccctatgagtacttccaggtgggctggaacatctttgacagcctcatcgtgaccctgagcctggtggagctgttcctggctgatgtggagggcctgtctgtgctgcgctccttccggctgctgcgggtcttcaagctggccaagtcctggcccaccctgaacatgctgatcaagatcatcggcaacagcgtgggcgccctgggcaacctgaccctggtgctggccatcatcgtgttcatctttgctgtggtgggcatgcagctgtttgggaagagctacaaggaatgtgtgtgcaagatcaatgatgactgcaccctgccccgctggcacatgaatgacttcttccacagcttcctgattgtgttccgggtgctgtgtggggagtggattgagaccatgtgggactgcatggaggtggccggccaggccatgtgcctgattgtgtacatgatggtgatggtgattggcaacctggtggtgctgaacctcttcctggccctgctgctgagcagcttcagcagtgacaacctgacagccatcgaggaggaccctgatgccaacaacctgcagattgctgtgacccgcatcaagaagggcatcaactacgtgaagcagaccctgcgggagttcatcctgaaggccttcagcaagaagcccaagatcagccgggagatccggcaggccgaggacctgaacaccaagaaggagaactacatcagcaaccacaccctggccgagatgagcaagggccacaacttcctgaaggagaaggacaagatcagcggcttcggcagctctgtggacaagcacctgatggaggacagtgatggccagagcttcatccacaaccccagcctgactgtgacagtgcccatcgcccctggagagagtgacctggagaacatgaatgctgaggagctgagcagtgacagcgacagcgagtacagcaaggtgcggctgaacagaagcagcagcagtgaatgttccacagtggacaaccccctgcccggggagggggaggaggccgaggccgagcccatgaacagtgatgagcctgaggcctgcttcacagatggctgtgtgtggaggttcagctgctgccaggtgaacattgaaagtggcaagggcaagatctggtggaacatcaggaagacctgctacaagatcgtggagcacagctggtttgagagcttcatcgtgctgatgatcctgctgagcagcggggccctggcctttgaggacatctacattgaaaggaagaagaccatcaagatcatcctggagtatgctgacaagatcttcacctacatcttcatcctggagatgctgctgaagtggatcgcctacggctacaagacctacttcaccaatgcctggtgctggctggacttcctgattgtggatgtgtccctggtgaccctggtggccaacaccctgggctacagcgacctgggccccatcaagagcctgcggaccctgcgggccctgcggcccctgcgggccctgagcagatttgagggcatgagggtggtggtgaatgccctgattggagccatccccagcatcatgaatgtgctgctggtgtgcctgatcttctggctgatcttcagcatcatgggcgtgaacctgtttgctgggaagttctatgagtgcatcaacaccacagatggcagccgcttccctgccagccaggtgcccaacagaagtgagtgctttgccctgatgaatgtgtcccagaatgtgcgctggaagaacctgaaggtgaactttgacaacgtgggcctgggctacctgagcctgctgcaggtggccaccttcaagggctggaccatcatcatgtatgctgctgtggacagcgtgaatgtggacaagcagcccaagtatgagtacagcctgtacatgtacatctactttgtggtgttcatcatcttcggcagcttcttcaccctgaacctcttcatcggggtcatcatcgacaacttcaaccagcagaagaagaagctgggcggccaggacatcttcatgacagaggagcagaagaagtactacaatgccatgaagaagctgggcagcaagaagccccagaagcccatccccaggcctggcaacaagatccagggctgcatctttgacctggtgaccaaccaggcctttgacatcagcatcatggtgctgatctgcctgaacatggtgaccatgatggtggagaaggagggccagagccagcacatgacagaggtgctgtactggatcaacgtggtgttcatcatcctcttcaccggggagtgtgtgctgaagctgatcagcctgcggcactactacttcaccgtgggctggaacatctttgattttgtggtggtgatcatcagcatcgtgggcatgttcctggccgacctgattgagacctactttgtgagccccaccctcttccgggtcatccggctggcccgcatcggccgcatcctgcggctggtgaagggggccaagggcatccgcaccctgctgtttgccctgatgatgagcctgcctgccctcttcaacatcggcctgctgctcttcctggtgatgttcatctatgccatcttcggcatgagcaactttgcctacgtgaagaaggaggatggcatcaatgacatgttcaactttgagacctttggaaacagcatgatctgcctcttccagatcaccaccagcgctggctgggatggcctgctggcccccatcctgaacagcaagcccccagactgtgaccccaagaaggtgcaccctggcagctctgtggagggggactgtggcaaccccagcgtgggcatcttctactttgtgtcctacatcatcatctccttcctggtggtggtgaacatgtacatcgccgtcatcctggagaacttctctgtggccacagaggagagcacagagcccctgtctgaagatgactttgagatgttttatgaggtgtgggagaagtttgatcctgatgccacccagttcatcgagttcagcaagctgagtgactttgctgctgccctggacccccccctgctgattgccaagcccaacaaggtgcagctgattgccatggacctgcccatggtgtctggggaccgcatccactgcctggacatcctgtttgccttcaccaagagggtgctgggggagagcggggagatggacagcctgcggagccagatggaggagcgcttcatgtctgccaaccccagcaaggtgtcctatgagcccatcaccaccaccctgaagaggaagcaggaggatgtgtctgccaccgtcatccagagggcctaccgccgctaccgcctgcggcagaatgtgaagaacatcagcagcatctacatcaaggatggagacagagatgatgacctgctgaacaagaaggacatggcctttgacaacgtgaatgaaaacagcagccctgagaagacagatgccaccagcagcaccaccagcccccccagctatgattctgtgaccaagccagacaaggagaagtatgagcaggacagaacagagaaggaggacaagggcaaggacagcaaggagagcaagaagtag

SEQ ID NO: 300509 - DNA, 5967 bp, Artificial Sequence
  derived and/or modified sequence
atggccatgctgcccccacctggcccccagagctttgtgcacttcaccaagcagagcctggccctgattgagcagagaattgctgagaggaagagcaaggagcccaaggaggagaagaaggatgatgatgaggaggcccccaagcccagcagtgacctggaggccggcaagcagctgcccttcatctatggagacatccccccaggcatggtgtctgagcccctggaggacctggacccctactatgctgacaagaagaccttcatcgtgctgaacaagggcaagaccatcttccgcttcaatgccaccccagccctgtacatgctgagccccttcagccccctgcggcgcatcagcatcaagatcctggtgcacagcctcttctccatgctgatcatgtgcaccatcctgaccaactgcatcttcatgaccatgaacaaccccccagactggaccaagaatgtggagtacaccttcaccggcatctacacctttgagagcctggtgaagatcctggcccggggcttctgtgtgggggagttcaccttcctgcgggacccctggaactggctggactttgtggtgattgtgtttgcctacctgacagaatttgtgaacctgggcaatgtgtctgccctgcggaccttccgggtgctgcgggccctgaagaccatcagcgtcatccctggcctgaagaccatcgtgggcgccctgatccagagcgtgaagaagctgagtgatgtgatgatcctgaccgtcttctgcctgtctgtgtttgccctgattggcctgcagctgttcatgggcaacctgaagcacaagtgcttcaggaacagcctggagaacaatgagaccctggagagcatcatgaacaccctggagagcgaggaggacttcaggaagtacttctactacctggagggcagcaaggatgccctgctgtgtggcttcagcacagattctggccagtgcccagagggctacacctgtgtgaagattggaagaaatccagactatggctacaccagctttgacaccttctcctgggccttcctggccctcttccggctgatgacccaggactactgggagaacctgtaccagcagaccctgcgggccgccggcaagacctacatgatcttctttgtggtggtgatcttcctgggcagcttctacctgatcaacctgatcctggccgtggtggccatggcctatgaggagcagaaccaggccaacatcgaggaggccaagcagaaggagctggagttccagcagatgctggaccggctgaagaaggagcaggaggaggccgaggccatcgctgctgctgctgctgagtacaccagcatcagaagaagccgcatcatgggcctgtctgagagcagcagcgagaccagcaagctgagcagcaagagcgccaaggagaggaggaacagaaggaagaagaagaaccagaagaagctgagcagcggggaggagaagggagatgctgagaagctgagcaagtctgagagcgaggacagcatccggaggaagagcttccacctgggcgtggagggccaccggcgggcccacgagaagaggctgagcacccccaaccagagccccctgagcatccggggcagcctcttcagcgcccggcgcagcagcaggaccagcctcttctccttcaagggccggggccgggacatcggcagcgagacagaatttgctgatgatgagcacagcatctttggagacaatgaaagccggcggggcagcctgtttgtgccccaccggccccaggagaggaggagcagcaacatcagccaggccagccgcagcccccccatgctgcctgtgaatggcaagatgcacagcgctgtggactgcaatggagtggtgtccctggtggatggccgcagcgccctgatgctgcccaacggccagctgctgcctgaggtgatcatcgacaaggccaccagtgatgacagcggcaccaccaaccagatccacaagaagaggcgctgcagcagctacctgctgtctgaggacatgctgaatgaccccaacctgcggcagagggccatgagccgggccagcatcctgaccaacacagtggaggagctggaggagagccggcagaagtgccccccctggtggtacagatttgcccacaagttcctgatctggaactgcagcccctactggatcaagttcaagaagtgcatctacttcatcgtgatggacccctttgtggacctggccatcaccatctgcatcgtgctgaacaccctcttcatggccatggagcaccaccccatgacagaggagttcaagaatgtgctggccatcggcaacctggtgttcaccggcatctttgctgctgagatggtgctgaagctgattgccatggacccctatgagtacttccaggtgggctggaacatctttgacagcctgattgtgaccctgagcctggtggagctgttcctggctgatgtggagggcctgtctgtgctgcggagcttccggctgctgcgggtcttcaagctggccaagtcctggcccaccctgaacatgctgatcaagatcatcggcaacagcgtgggcgccctgggcaacctgaccctggtgctggccatcatcgtgttcatctttgctgtggtgggcatgcagctgtttgggaagagctacaaggaatgtgtgtgcaagatcaatgatgactgcaccctgccccgctggcacatgaatgacttcttccacagcttcctgattgtgttccgggtgctgtgtggggagtggattgagaccatgtgggactgcatggaggtggccggccaggccatgtgcctgattgtgtacatgatggtgatggtgattggcaacctggtggtgctgaacctcttcctggccctgctgctgagcagcttcagcagtgacaacctgacagccattgaagaagatcctgatgccaacaacctgcagattgctgtgacccgcatcaagaagggcatcaactacgtgaagcagaccctgcgggagttcatcctgaaggccttcagcaagaagcccaagatcagccgggagatccggcaggccgaggacctgaacaccaagaaggagaactacatcagcaaccacaccctggccgagatgagcaagggccacaacttcctgaaggagaaggacaagatcagcggcttcggcagctctgtggacaagcacctgatggaggacagtgatggccagagcttcatccacaaccccagcctgactgtgacagtgcccatcgcccctggagagagtgacctggagaacatgaatgctgaggagctgagcagtgacagcgacagcgagtacagcaaggtgcggctgaacagaagcagcagcagcgagtgcagcacagtggacaaccccctgcctggagagggggaggaggccgaggccgagcccatgaacagtgatgagcctgaggcctgcttcacagatggctgtgtgtggaggttcagctgctgccaggtgaacatcgagagcggcaagggcaagatctggtggaacatcaggaagacctgctacaagatcgtggagcacagctggtttgagagcttcatcgtgctgatgatcctgctgagcagcggggccctggcctttgaggacatctacatcgagaggaagaagaccatcaagatcatcctggagtatgctgacaagatcttcacctacatcttcatcctggagatgctgctgaagtggatcgcctacggctacaagacctacttcaccaatgcctggtgctggctggacttcctgattgtggatgtgtccctggtgaccctggtggccaacaccctgggctacagcgacctgggccccatcaagagcctgcggaccctgcgggccctgcggcccctgcgggccctgagcagatttgagggcatgagggtggtggtgaatgccctgattggagccatccccagcatcatgaatgtgctgctggtgtgcctgatcttctggctgatcttcagcatcatgggcgtgaacctgtttgctgggaagttctatgagtgcatcaacaccacagatggcagccgcttccctgccagccaggtgcccaacagaagtgaatgttttgccctgatgaatgtgtcccagaatgtgcgctggaagaacctgaaggtgaactttgacaacgtgggcctgggctacctgagcctgctgcaggtggccaccttcaagggctggaccatcatcatgtatgctgctgtggacagcgtgaatgtggacaagcagcccaagtatgagtacagcctgtacatgtacatctactttgtggtgttcatcatcttcggcagcttcttcaccctgaacctcttcatcggggtcatcatcgacaacttcaaccagcagaagaagaagctgggcggccaggacatcttcatgacagaggagcagaagaagtactacaatgccatgaagaagctgggcagcaagaagccccagaagcccatcccccggcccggcaacaagatccagggctgcatctttgacctggtgaccaaccaggcctttgacatcagcatcatggtgctgatctgcctgaacatggtgaccatgatggtggagaaggagggccagagccagcacatgacagaggtgctgtactggatcaacgtggtgttcatcatcctcttcaccggagaatgtgtgctgaagctgatcagcctgcggcactactacttcaccgtgggctggaacatctttgattttgtggtggtgatcatcagcatcgtgggcatgttcctggccgacctgattgagacctactttgtgagccccaccctcttccgggtcatccggctggccagaattggccgcatcctgcggctggtgaagggggccaagggcatccgcaccctgctgtttgccctgatgatgagcctgcctgccctcttcaacatcggcctgctgctcttcctggtgatgttcatctatgccatcttcggcatgagcaactttgcctacgtgaagaaggaggatggcatcaatgacatgttcaactttgagaccttcggcaacagcatgatctgcctcttccagatcaccaccagcgctggctgggatggcctgctggcccccatcctgaacagcaagcccccagactgtgaccccaagaaggtgcaccctggcagctctgtggagggggactgtggcaaccccagcgtgggcatcttctactttgtgtcctacatcatcatctccttcctggtggtggtgaacatgtacatcgctgtgatcctggagaacttctctgtggccacagaggagagcacagagcccctgtctgaagatgactttgagatgttttatgaggtgtgggagaagtttgatcctgatgccacccagttcatcgagttcagcaagctgagtgactttgctgctgccctggacccccccctgctgattgccaagcccaacaaggtgcagctgattgccatggacctgcccatggtgtctggggaccgcatccactgcctggacatcctgtttgccttcaccaagagggtgctgggggagagcggggagatggacagcctgcggagccagatggaggagcgcttcatgtctgccaaccccagcaaggtgtcctatgagcccatcaccaccaccctgaagaggaagcaggaggatgtgtctgccaccgtcatccagagggcctaccgccgctaccgcctgcggcagaatgtgaagaacatcagcagcatctacatcaaggatggagacagagatgatgacctgctgaacaagaaggacatggcctttgacaacgtgaatgaaaacagcagccctgagaagacagatgccaccagcagcaccaccagccccccatcctatgacagcgtgaccaagccagacaaggagaagtatgagcaggacagaacagagaaggaggacaagggcaaggacagcaaggagagcaagaagtag

SEQ ID NO: 300510 - DNA, 5970 bp, Artificial Sequence
  derived and/or modified sequence
atggccatgctgcccccccccggcccccagagcttcgtgcacttcaccaaacagtctcttgccctgatcgaacagcgaattgcagagcggaagtccaaagagcctaaagaggaaaagaaggatgacgatgaagaggcacctaaaccaagctcagatttggaggccggaaaacaactcccatttatttacggtgacataccaccagggatggtgtctgaaccacttgaggacctggatccatattacgctgataagaaaacattcattgtcctcaataagggaaaaaccatcttcaggttcaacgctactccagccttgtatatgttgtctccttttagtcctctacgtaggatctcaatcaagatcttagtgcacagtaccctattttcgatgcttatcatgtgtaccatcctcaccaattgcattttcatgaccatgaacaaccctcctgactggactaaaaacgtggagtacacatttaccggcatctatacatttgaaagtcttgtgaagattttggcacgtggtttctgcgttggtgagtttacatttcttcgagatccttggaattggctggacttcgtcgtaatcgtattcgcttatctgacggaattcgtgaacctagggaatgtgagtgctctcagaacgtttagagtgcttagagctctgaagacaatcagcgtcattcctgggctcaaaactattgtgggcgcactgatccaatccgtgaaaaaactgagcgatgtgatgatactcaccgttttttgcttatctgtgtttgcactgataggactgcagctttttatgggaaatctgaagcacaagtgctttaggaacagcctcgagaataatgagactctcgagagtatcatgaacacccttgaatcggaagaggacttcagaaaatacttctattatctggaaggcagcaaggacgccctgttatgcggcttctctacagacagtggccagtgccccgagggatacacctgcgtgaaaattgggaggaatcccgactatggctatacttctttcgacacattctcatgggcatttctggccctctttcgcctgatgacccaggattactgggagaatctctaccagcagactttaagggctgccggtaagacttatatgattttcttcgttgtggtcattttcctgggctcattttatctcataaacttgatactcgccgtcgttgcgatggcctacgaggaacagaaccaggcgaatattgaggaagcaaagcagaaagaactggagtttcaacagatgcttgatcggctgaagaaggagcaagaagaagctgaggccatcgctgccgcggcagctgagtacacatccattagacgctctcggataatgggactttctgagtctagcagtgagacaagtaagcttagctccaagagcgccaaagagagaaggaaccgacggaagaaaaagaatcagaaaaaactaagttcaggagaagagaagggtgatgctgagaaactcagtaaatcagagtcagaggactctatacgtaggaagtcctttcacttgggtgtcgaaggccacaggcgggcacacgaaaaacggttatccacaccaaatcagtcccctctcagcatcagaggctccctattcagcgcccgccgatccagtagaacgtcattgttcagttttaagggaaggggcagagatattgggtcagagaccgagttcgctgatgatgaacacagtatctttggcgataacgaatcacgtaggggatctctatttgtgcctcatcggccccaagaacgcaggtcgagtaacataagccaggctagccgcagtccgccaatgctccctgtcaacggaaagatgcattccgccgtggattgtaatggggtagtgtctctcgtcgacggccgatctgcccttatgctgcctaatggtcagctgctgccagaggtgatcattgacaaagcaacaagcgacgactctggaaccaccaaccagatacacaagaaaagacggtgttcttcatatttgttatcggaggatatgctgaacgatcccaatttacgacagagggccatgagccgcgcctctatcctaacaaatacagtggaagagctggaggaatctaggcagaagtgtccgccctggtggtatcggtttgcacacaaattcctgatctggaactgcagtccatattggatcaaattcaagaagtgtatttactttatcgtgatggaccccttcgtggaccttgcaataacaatttgtatcgtgcttaacactttattcatggccatggaacaccacccgatgactgaagagttcaagaatgttctggctattgggaatctcgtttttactgggattttcgctgccgagatggttctgaaacttattgccatggacccgtatgaatattttcaggtgggctggaacattttcgactcactgattgtcaccttgagtttagtcgagctgttccttgctgatgttgaaggtctatcagtattgaggtctttccggcttctgagggtgttcaaactggcaaagagttggcccactctgaacatgctcattaagattatcggaaactcagttggagcgctggggaacctgactttggtcctagcgattatcgtgttcatttttgcagtagtcggcatgcaactctttggaaagtcttacaaagagtgtgtttgcaagataaacgatgactgcactctcccgaggtggcatatgaatgactttttccactcatttttaattgtcttccgagtcctgtgcggtgaatggattgagacaatgtgggactgcatggaagttgcagggcaggccatgtgcttaatcgtctacatgatggtcatggttatcggcaatcttgtagtactgaacttgttcctggcgttactgctgtcaagcttctcttccgacaacctgaccgctattgaagaggatcccgacgctaataacttgcagatcgcagttacccgaatcaaaaaggggattaattacgtgaagcaaactttgcgagagttcattctcaaggccttcagcaagaaaccaaagatcagccgggaaatccgacaggccgaggacttgaataccaaaaaggagaactatatatcaaaccatactctggctgaaatgtctaaagggcacaactttctgaaagagaaagataagataagcggatttggttcaagcgtggacaagcaccttatggaagactctgacgggcagtcattcattcacaacccgagcctgacagttactgtccctattgcccccggagaatccgacctggagaacatgaatgccgaggaactgagcagcgacagcgatagtgaatacagcaaagtccgcttaaatcgctcttcttcctcagagtgctcaaccgtggacaatcccctcccaggggaaggggaggaggccgaggccgagccaatgaatagtgatgaacccgaagcatgcttcactgacggctgcgtgtggaggttcagctgttgtcaggtcaacatcgaaagtggcaagggcaagatttggtggaatattcgaaaaacgtgctataagatagtggagcatagctggttcgagagcttcatcgttttgatgatcctgctgtcctcgggcgcgttggcctttgaggacatttacatagagagaaaaaagacaatcaaaattattctggagtacgcggataagatttttacttacattttcatcttagagatgcttctaaagtggatcgcctacggctataaaacatacttcaccaacgcgtggtgctggttggatttcctaatagtggatgtgtctcttgttactctggtggcaaacacactgggctactccgacctgggtcccataaaaagcctgcggaccctccgggcgctaaggcccttgcgcgctctctccaggtttgaaggcatgcgcgtggtggtgaacgcattgattggtgctattcctagcatcatgaacgtcctgctggtgtgcctgatcttctggctaatctttagtatcatgggcgttaatctatttgccggcaaattttatgaatgtataaataccactgacggcagccgctttcccgcctctcaagtaccaaatcggtcagaatgtttcgctttaatgaatgtcagccaaaacgtgcggtggaaaaacttgaaagtgaatttcgacaacgtggggctgggatatttgtccttactccaggttgcaacttttaaggggtggactatcattatgtacgctgctgtggacagtgttaacgtggacaagcagcctaagtacgagtactcactctatatgtacatatatttcgttgtcttcattatcttcggaagtttctttactctcaatctgtttatcggtgtaatcatcgacaatttcaaccaacaaaagaaaaagctgggcggtcaggatatatttatgaccgaagaacagaaaaagtattacaatgcaatgaaaaaactcggcagcaagaaaccacagaaacctatcccgaggccaggtaataaaattcagggctgtatatttgaccttgtcactaaccaggcctttgatataagcatcatggtgttgatctgtctgaacatggtgacaatgatggtggagaaagagggccagagccagcacatgactgaagtcctttattggattaatgtggtgttcataattctcttcactggtgagtgcgttttaaagctcatcagcttgcgccattactatttcacagtgggatggaacatttttgactttgtcgttgtgatcatctccattgtgggtatgttcctggcagatttgatagagacctattttgtctctcctactttattccgtgtcataagattggctagaatcggccggattttgagactggtgaagggggctaaggggatccggacccttctgtttgcccttatgatgtctctgcccgcgctgtttaacatcggcctgttgttgttcttagttatgtttatttacgccatttttggaatgagtaacttcgcatacgtgaaaaaggaggatgggatcaacgatatgttcaacttcgagaccttcggaaattccatgatttgcctgttccagattactacctcagccggttgggatggcctcctagcacctattttgaattcaaagccacccgactgtgatccaaaaaaggtccatcccggttcaagcgtggagggagattgcgggaacccaagtgtgggcatcttttacttcgtctcctacattataatatcatttctcgtggtggtaaatatgtatatcgctgtcatattggaaaacttctccgttgctacagaggaatctactgaaccgctgagcgaggatgactttgagatgttttatgaagtttgggagaaattcgatccagacgcgacccagtttatagagttcagtaagctcagcgatttcgccgcggccctagacccccccttgctgatcgccaagccaaataaagtgcaactcatagcgatggacctgccaatggtgagcggagatagaatccactgtctagatatcctgttcgctttcactaagcgggtcctcggggagtctggggagatggattctttgcgctctcagatggaggaaagattcatgtcagcgaacccctccaaagtctcttatgaaccaattactaccaccctgaagcgaaagcaagaggacgtttcggccacagtgatccaacgcgcgtaccggagatatcgcctgaggcaaaacgtgaagaatatcagctcaatttacatcaaagatggagaccgagatgatgatttgctgaataagaaggacatggcgttcgataacgttaatgaaaattcttcccctgaaaagactgacgccacttcctccacaacatcccccccctcctatgactccgttacaaagccagataaagagaaatatgagcaagaccgcacagagaaggaagacaagggaaaagatagcaaggagtccaagaagtag

SEQ ID NO: 300511 - DNA, 5967 bp, Artificial Sequence
  derived and/or modified sequence
atggccatgctgcccccccccggcccccagagcttcgtgcacttcacaaagcagtcccttgcactgattgaacagcgcatcgccgagcgtaaatctaaagagccaaaggaggagaaaaaagatgacgacgaggaggctccgaagccctcttctgacctcgaggcagggaaacagctgcctttcatctacggtgacatcccaccaggcatggttagtgaacccttggaggacctcgacccctattacgctgataaaaagacttttattgttcttaataagggcaaaacgatattcagattcaacgccacaccggctctttacatgctcagcccgttttccccactgagacgcatctccatcaagattctcgtgcacagcctgttttcgatgctgataatgtgtactatcctcaccaattgtatattcatgacgatgaataaccccccagactggacaaagaatgttgaatatacctttacaggaatatataccttcgagtctctggtcaagatcttggcgcgtggcttctgtgtgggggagttcacctttttgcgcgacccttggaattggctagatttcgtcgtgatcgtgtttgcctacttgacagaattcgttaatctgggcaacgtgtctgcgctgagaaccttccgggtcctgcgcgccctgaagacaataagcgtgattcctggcctgaagactattgtgggcgccctcatccagagtgtaaaaaagctgtcagacgtcatgatactgactgttttttgcctgtccgtgtttgctcttatcgggttgcagctgttcatgggcaacctgaaacataagtgcttcaggaactcgctcgagaataacgagaccctggaatccattatgaatacgctagagagtgaagaggattttcggaaatacttttactacctggagggctccaaggacgccctcctgtgcggattctcgacagatagtggacagtgccccgaagggtacacctgcgtcaaaatcggacgcaatcccgactacggttatacatctttcgacacatttagctgggccttcttagctctgttccggcttatgacccaggactactgggaaaatctttaccagcagacattaagggctgccggcaaaacttatatgatcttttttgtcgtggtcatcttcctgggatcattctatctgataaacctgatactggctgttgtggcaatggcgtacgaagaacagaatcaggcaaacattgaggaagcgaaacaaaaggaactggaattccagcagatgttggataggctgaagaaggagcaggaggaagccgaggccattgctgccgcagccgctgagtatacaagcattcgtcgctcccggattatgggcctctctgaatcctcctctgaaaccagtaagctgtcctcaaagtccgccaaggagcgcaggaatcgccgtaaaaaaaagaatcagaaaaaactgtccagcggagaggaaaaaggggacgcagaaaaactgtctaagagtgaatccgaggactcaattcgacggaaatcctttcacctcggagttgaagggcaccggcgcgcccacgaaaaacgtctgtctacccccaaccagagcccgctctctatcaggggatcgctgtttagcgcacgccgcagctctaggacttctctgttcagctttaagggacggggcagggacatcggcagcgaaaccgaatttgctgatgatgagcactccatctttggggacaacgagtctcgtcgtggcagcttattcgtaccccatagacctcaagaaagaagatcctccaatatctcacaggcttcccgctccccaccgatgttgccggtgaacgggaagatgcacagcgcagttgactgcaacggagtcgtgtcgctggtcgacggacgttctgcattaatgttgcctaatggccagctgctgccagaggtcataatcgataaggctacatccgacgactccgggaccactaaccagatccacaagaaaagacggtgttccagctacctcttatccgaggacatgttgaacgacccaaacctcagacagcgcgctatgtcacgggctagcattcttactaatactgtggaggagttggaggagagccgtcagaaatgcccgccgtggtggtacagattcgcccataaattcctgatttggaattgcagcccctattggattaagtttaagaaatgtatctactttatcgtgatggatccatttgtcgatttggctattacaatctgtatcgtgttgaatacgctatttatggcaatggagcatcatccgatgaccgaggaatttaagaatgtgcttgcgatcggcaatcttgtattcaccgggatattcgccgccgagatggtgctgaagctcatcgcaatggatccgtacgagtacttccaggtcgggtggaacatttttgatagcctgattgttacactgagtctagtcgagctattcctggccgacgttgaaggtctgtcagtacttcggagctttcgcttattgagggtcttcaagctcgctaaatcctggccaacgttaaacatgctgatcaagatcatcggcaattcagtgggcgcgctcggtaacttgacattagtacttgctataatcgtcttcatctttgcagtagtgggtatgcagcttttcggtaagagctataaagagtgtgtgtgtaagatcaacgacgattgcaccttacccaggtggcatatgaatgatttctttcactctttcctgatcgtcttcagggtgctctgcggtgagtggattgaaaccatgtgggactgtatggaagtagcagggcaggccatgtgccttattgtctacatgatggttatggtgatagggaatttagttgtgctcaacttgtttttggccttgttactctcctctttctcatcggataacctcactgcaattgaggaggacccagacgccaataatctgcagattgcagttacccgcatcaaaaagggaatcaattacgtcaaacagacactcagagagttcatcctgaaggcattttccaaaaaaccaaagatctcgagggagatacggcaagccgaagacctgaataccaaaaaggaaaactatatctccaatcatactctcgctgaaatgtctaaagggcacaattttctcaaagaaaaggacaaaatcagtggtttcggtagctcggttgataaacacttaatggaagactcagatggtcagagttttatccacaacccttctctgacagttaccgtgccaatcgctcctggagaaagcgacttggagaacatgaatgccgaggagctgtcatccgactccgactccgagtatagcaaggtccgtttaaacaggtcttccagctcagagtgcagtactgtggacaaccctctccccggagagggcgaagaagcagaagccgagcctatgaattcagacgagccagaggcctgcttcacggacggatgtgtgtggagattttcctgttgtcaggttaatatcgagagcggtaagggaaaaatctggtggaacatcaggaaaacctgctacaagatcgtagagcattcctggtttgaaagttttattgtactgatgattttgctgtcctctggggcgctggcatttgaggacatctacattgagcggaagaaaacaataaagattatcctggagtatgctgataaaatcttcacatacatctttatcttggaaatgctgctgaaatggattgcatacggttacaaaacctactttaccaacgcatggtgctggctggatttccttatcgtggacgttagcctggtgaccctggtcgcgaatacgcttggatactctgatcttgggcccatcaagtctctgagaaccttacgcgcccttcggcctctgagggcactctctcgatttgaggggatgagggtagtcgtcaacgctctgatcggagccattccgagcataatgaatgtcttactcgtatgccttattttctggctaatcttctcaatcatgggtgttaatctgttcgccggaaagttctatgagtgcatcaacacaactgacggatcccggttcccagcgagccaggtgcctaacaggagcgagtgcttcgctcttatgaatgtaagccagaacgtcagatggaagaacctcaaggtgaacttcgacaacgtgggcctcggctatctgagtctactgcaggtcgccactttcaaaggatggacaatcataatgtatgcagcagtggatagtgtgaatgttgacaaacagcccaagtacgaatacagtctgtatatgtacatctactttgtggtcttcattatcttcgggtctttctttacacttaacctctttatcggtgtaattatcgataatttcaaccagcagaagaagaagctgggaggccaggacatttttatgaccgaagagcagaagaaatattacaacgcgatgaaaaagctgggtagtaagaaaccccagaaaccgattccacgtccaggcaacaagatacaaggctgtattttcgatctcgtcacaaatcaggcgtttgacattagcatcatggtcctaatctgcttgaacatggtgaccatgatggtggagaaagaggggcagtcccagcatatgaccgaggtactatactggataaatgtcgtcttcattatactgtttacgggtgagtgtgtcctgaaacttattagcctgcggcactattacttcaccgtcgggtggaatatatttgatttcgtcgtggttattattagcatcgtcgggatgtttttggctgatctgatagaaacctacttcgtttctcctaccctgttcagggtgatccgccttgcgagaattggacgaattctcaggttagtaaaaggcgctaaaggcatcaggacactcctctttgccctcatgatgagtctgcctgccctgttcaatatcgggcttctgctgttcttggttatgttcatttacgccatatttggcatgtcgaacttcgcgtacgttaaaaaggaagatgggatcaatgatatgtttaatttcgagaccttcggaaactccatgatttgcctttttcaaattactacatctgcaggatgggacgggctcctggcccctatcttaaactccaaaccccccgactgtgacccaaaaaaggtgcacccaggttcatcagtagaaggcgattgcggaaatcccagcgtgggaattttctacttcgtaagctacatcataatctctttcctcgtcgtcgtcaacatgtacatagccgtgattcttgagaatttttctgttgcaaccgaagaaagcactgagcctctttctgaggatgatttcgagatgttctacgaagtctgggaaaaatttgaccctgacgccactcagttcattgaattttccaagttgtccgactttgcagcagccctagacccaccactgctgattgccaaaccaaacaaggtgcagctcatagctatggacttgccaatggtgtcaggtgacaggatccactgtctggatatactattcgctttcacaaaaagagtgcttggcgaaagcggggagatggactcactgagaagccagatggaagagcgtttcatgtctgccaaccctagcaaagtgtcatatgagccgatcacgaccacccttaagagaaaacaggaagacgtttcagctactgtcattcaacgggcttataggcggtataggctgcgccagaacgtaaaaaatatttcatcaatctacataaaggatggggatcgagatgacgacttgctcaataaaaaagatatggcctttgataacgttaacgagaactctagcccagaaaagacggacgcgacctcctctaccacctcccctccttcttacgattcggtaacaaagcccgacaaagagaagtacgagcaggatcgaactgagaaagaagataaggggaaagatagcaaggaatccaaaaaatag

SEQ ID NO: 300512 - DNA, 5970 bp, Artificial Sequence
  derived and/or modified sequence
atggccatgctacctcctccagggccacagtcttttgtgcattttacaaaacagagcctggctttgatcgaacaacgtattgcagagaggaagtcaaaggaaccaaaggaagaaaagaaggacgatgacgaggaggctcccaaaccctcctccgaccttgaggccggaaagcagctcccatttatatatggcgacattcccccaggcatggtgtcagagcccctggaagatttggatccatactacgcggataagaaaacatttattgtgctgaataaaggtaagacaatcttccgcttcaacgcaactccagcactgtatatgttgtcaccttttagccccctgcggaggatcagcattaaaatcctggtgcacagcaccctgttctccatgctcatcatgtgtaccatcctcaccaattgcatattcatgacgatgaacaatccccctgattggacaaaaaatgtggagtacacattcactggcatctatacgttcgagagtctcgtgaagattttggctaggggcttttgtgtgggggagttcacgttcctcagagatccctggaactggttggactttgttgtcatcgtcttcgcctaccttacagagttcgtcaacctgggcaacgtatcagctttaagaacttttagggttctccgtgctttgaagactatctctgtcattcccggacttaagactattgttggggcacttatacaatctgtcaagaagctgtcagacgtgatgatcctcactgtcttctgcttgtcagttttcgcacttattggactccagctgtttatgggcaatttaaagcacaagtgttttagaaactctctggagaataacgagacgctggagagtatcatgaatactctggagagcgaggaggatttccggaagtatttttattatctcgaggggtcaaaggatgcccttctgtgcggatttagcacagattccggccagtgcccagaggggtacacttgcgtaaaaataggcagaaaccctgactatggctatacgtcatttgacaccttctcctgggccttcctggctctgttccgattgatgactcaggattactgggaaaatctgtatcagcagacactgcgggcagctggaaagacatacatgatcttctttgtggttgtgatcttccttggttcgttttacttgatcaatctcatacttgccgtggtggccatggcatatgaagaacagaatcaagcaaatattgaggaggctaagcagaaggagctggagtttcagcaaatgctggatagactgaagaaggaacaggaggaggccgaagcgatcgcagcagcagccgctgaatatacaagcatcaggaggtcccggatcatgggacttagtgagagcagcagcgagactagcaagctcagctcaaaaagcgcaaaagagagaaggaatagaagaaaaaagaaaaatcagaaaaaactatcttccggtgaagaaaagggggatgccgaaaagctaagcaaaagcgaatccgaagactctatcaggaggaaaagctttcatcttggggtggagggtcacagacgcgcacacgagaagcggttatcaacacctaatcagtctcccctgtccattcgtggctcattatttagcgccagacggagtagtcgcacaagcctattctcttttaagggtcggggacgggacattgggagtgaaaccgagttcgccgacgacgaacactccatctttggggacaacgaatccaggcgcggatccctgtttgtgccacatcgtccccaagagaggcgttctagtaatatctcccaggcgtcccgatcccccccaatgctcccagttaacgggaagatgcactcagctgtggactgcaatggagtggtgtctcttgtcgatggtcggtccgctcttatgttgccaaacggccagctgctgccagaagtgatcatcgataaggctacttctgacgattctggcacaacaaatcagatccacaagaaacggcgatgttccagttacctgctgagcgaggatatgttgaacgacccaaaccttaggcaacgcgctatgagccgagcctccatactgactaacaccgtggaggaactggaggaaagcagacaaaagtgccctccctggtggtatcgattcgcccataagttcctcatctggaattgctctccgtactggattaaattcaagaaatgcatctacttcatcgttatggacccttttgttgatctggcaataactatttgtatcgtattgaacacactctttatggctatggaacaccatcccatgactgaggaattcaagaatgttctcgcaatcgggaacttggtctttacgggcatcttcgccgctgaaatggtgctgaaactgatcgcaatggacccatatgaatatttccaggtcggttggaacatcttcgactcactgatagtgacactgagtctggttgagttattcctcgcggacgtggaggggctgtccgtcctgcggagcttcaggctgctgagggtcttcaagctggctaagagctggcctaccttgaacatgcttataaaaatcattggaaattctgttggcgcactaggcaacctgacactggtcctggcaatcatcgtcttcatctttgccgtggtcgggatgcagctgttcggcaaatcatataaagagtgtgtgtgtaaaatcaacgatgattgcacactcccgagatggcacatgaacgacttttttcacagcttcttgatcgtattccgagtcctatgcggagagtggattgagaccatgtgggattgtatggaggtggccggtcaggctatgtgtcttatcgtttatatgatggtaatggtgatcggcaatctggtggtgctcaatctctttcttgcattacttctgtcgtcattctctagcgacaacttgaccgcaatcgaagaagacccggatgccaacaatctgcagatagccgtaacgcgaatcaaaaaaggaataaattacgttaaacaaaccctacgagaatttatcctaaaagccttctccaaaaagccaaaaatctcccgcgaaatacgtcaagccgaggacctgaacaccaagaaggagaattatatctctaatcacacccttgctgaaatgtcaaaaggtcacaacttcttgaaagagaaagacaagataagcggattcggatccagtgtcgacaagcacctcatggaagactcagacggccagtcttttattcacaatccaagcttgacggttactgtgcccatcgcccctggtgaaagcgaccttgagaacatgaacgccgaggagctctcctcggacagtgattcggagtacagcaaggtgagactcaacagatcctcctcttccgagtgctccaccgtcgacaatcccctgcctggggaaggagaggaggctgaggccgagccgatgaattccgacgagccggaggcctgcttcacggacggatgcgtttggagattttcgtgttgtcaagtcaacattgaatcaggcaagggcaagatttggtggaatatccgcaagacttgttacaagattgtcgaacacagctggttcgaatcattcatcgtactgatgatacttctgagctctggggctctggctttcgaagacatctacattgaaagaaaaaaaacaattaagattattctggagtacgctgataagattttcacttacatcttcatcctggagatgctcctcaagtggattgcttacggttacaagacctatttcacaaatgcctggtgctggctcgactttctgatcgttgatgtcagcctggttaccctcgttgcaaatacccttggctatagtgatctggggcctataaagtccttgcggaccttacgggctctgagacctctgagggccctatctcgcttcgagggcatgagagtggtcgttaatgccctgatcggagctattccctcaataatgaacgtattactcgtctgcttgatcttctggttgatcttctccataatgggcgtaaatctgttcgcaggcaaattttacgaatgcatcaataccaccgatggaagtcgcttccccgcttcccaggtgcccaaccgatctgagtgtttcgctctgatgaatgtaagtcagaacgtgcgttggaagaacctcaaagtcaatttcgataatgttggcttaggttacctctctcttcttcaggtggctacttttaagggatggaccattatcatgtacgcagcagtggactctgtgaacgtagacaagcaacccaagtacgagtatagtctttacatgtacatttattttgtcgtgttcatcatcttcggcagcttctttactcttaacctgtttattggcgtgatcattgataacttcaaccagcaaaagaaaaagctcgggggacaggatatctttatgaccgaggagcaaaaaaaatattacaatgcaatgaagaagcttggatcgaaaaagccacagaagccaatccctaggcctggaaacaagatccaggggtgtatatttgatctggtgaccaatcaagccttcgatatctcaataatggtcttgatctgcctgaatatggtgaccatgatggtggagaaagagggccagtctcagcacatgacagaggtgctgtattggataaatgttgtgttcatcattttgtttaccggggagtgcgtattgaaattaataagcctgcgccattattatttcaccgtgggatggaacattttcgactttgtggttgtgatcattagcatagtgggaatgttcctggccgatctcatcgaaacatacttcgtgtcaccgaccttatttagagtaatccgccttgccaggataggcagaattttgcgactagtcaagggcgcaaaaggaatccgcaccctgctcttcgccttgatgatgtcccttccagccctctttaacatcggtctgctgctgtttttggtgatgtttatttatgctatctttggcatgtctaatttcgcctacgtgaaaaaggaagacggcattaacgatatgttcaacttcgagacttttggaaacagtatgatctgtctgtttcagattacgacctcggcgggttgggatggactcctcgcgccaatattgaactccaaacccccagattgtgatcccaagaaagtacaccctggctcttctgtggagggggactgcggcaatccgagcgtgggaatcttttattttgtttcctacatcataatttcttttttagtggtcgttaatatgtatattgcggtgatcctggagaacttttcagtagctacagaggaatccaccgaacctcttagtgaagacgacttcgaaatgttttatgaggtctgggaaaaattcgatcccgacgcaacccagtttattgagttttctaagttatccgactttgcagctgcactggacccaccgctgctgatcgctaagccaaataaggtgcaactgattgcaatggaccttccgatggtctcaggagacaggatccactgtctcgatatcttatttgcttttaccaagcgtgtgttgggcgagagcggggagatggacagcctgcgaagtcagatggaggagcgctttatgagcgccaacccatctaaggttagttacgagcccataacaacgaccctcaaacgtaaacaagaggacgtgtctgctactgtcatacagcgcgcttataggcgctacaggctgagacagaacgtgaaaaatatctccagtatatatatcaaggacggggatcgcgacgacgatctactgaataaaaaggacatggcttttgataacgtgaatgagaattcctcacccgaaaaaactgacgctacatcctctactacttctcctccctcttacgattcagtgaccaaaccggataaagagaaatatgaacaggaccgcaccgagaaggaggacaagggcaaggatagcaaggagagcaaaaagtag

SEQ ID NO: 300513 - DNA, 5966 bp, Artificial Sequence
  derived and/or modified sequence
atggctatgttgccccctccagggccacagtccttcgtccactttaccaaacaatccctggctttgatcgaacagcgcatagctgaaagaaaaagtaaagaaccaaaggaagaaaagaaagacgacgacgaggaagcacccaagccatcctccgatctggaagcagggaagcagctgcctttcatttatggagacataccacctggaatggtgtcagagccactggaggacctggatccatattatgctgataagaagacatttatcgttttaaacaagggcaaaacaatcttccgttttaacgccacacccgcactttacatgttgtctcctttttcacccctgaggcggataagtattaagatcttggttcacagcctgttttcaatgttaataatgtgcaccatcctgacaaactgcatttttatgacaatgaacaaccctccggattggactaaaaacgtggagtataccttcacaggcatctatacattcgagagcttggtaaagatcctggccagaggattttgtgtgggggaatttacatttctgagagatccttggaactggctcgattttgttgtaattgttttcgcctatcttacagaattcgtcaacctgggaaatgtgtccgctcttaggacttttcgtgtcctgcgcgcactaaagactatttccgtaatcccaggtctcaaaacaatcgtgggtgctctgattcagagcgttaaaaaacttagtgacgttatgatccttacagttttctgcctttccgtgtttgccctgatcggactgcagctgttcatgggtaatctcaaacacaaatgcttcaggaatagtctcgaaaacaatgagaccctggaatccataatgaacacactggagagcgaggaggattttagaaaatatttctactatctggaaggcagtaaagatgcacttctgtgtggtttctccaccgattcaggccagtgccctgaagggtatacctgcgtcaaaataggtcgaaacccagactatggctacacatcatttgacaccttctcctgggcgtttctggctctattcaggctgatgacgcaagactattgggagaacctatatcagcagaccctgcgggctgctggaaaaacttatatgatcttcttcgtcgtcgtcatctttctcggcagtttctaccttatcaatctgatcctggccgtggtggcaatggcttacgaggaacaaaaccaggctaatattgaggaagcgaagcagaaagaactggaattccaacaaatgcttgatcggctgaagaaggaacaggaagaagctgaggctatcgcagctgcagctgctgagtacacctctatcaggaggtcacggataatgggcctgtcagaatcgtcctccgaaacatccaaactcagttccaaaagtgcaaaggagcggagaaaccggaggaagaagaagaatcagaaaaagctgagcagtggcgaagaaaaaggagatgcggagaaactctccaaatctgaatccgaagactcaattcgcagaaaaagcttccacttaggcgtagagggccataggagagcccacgaaaagaggttgtctactcctaaccagtcccccctgagcatcagaggtagcctttttagcgcaaggagatctagcagaactagccttttttcttttaaaggtagaggtcgcgacatcggaagcgagaccgaatttgccgacgacgagcactcaatattcggcgataatgagagccgcaggggctccctgtttgttccccaccgccctcaagaacggagatcgtcgaacatctcacaggctagtcggagcccccctatgctgccagtcaacggcaagatgcacagtgcggtggactgcaacggtgttgtgagcttggtcgacggtaggtcagcactgatgctgcccaacggccagctgctgcctgaagtcatcatagataaagcgacctcagatgactctgggaccacaaaccagattcataagaaaagacgctgcagctcctatttgctgtcagaagatatgctgaacgatcccaacctgcgccagcgtgctatgtctagagctagcatccttactaataccgtggaggagctggaggaaagtcgccagaaatgccctccctggtggtaccgttttgcccacaaattccttatctggaattgttcgccgtactggataaaatttaaaaaatgcatttacttcattgtcatggaccctttcgtcgatctggccatcaccatttgcattgtgctgaacaccctattcatggcaatggaacatcacccaatgaccgaggaatttaagaacgtcctggctatcggaaatctggttttcaccggaattttcgcagcggaaatggtgctgaaactgattgcaatggatccatatgagtatttccaggtagggtggaatatttttgactctctcattgtgaccctaagtctggttgagctttttctggccgacgtggaaggtctaagcgttctacgctccttcaggctgctgcgggtgttcaaattggctaagagctggccaactctgaacatgctcattaagatcattggcaacagtgtcggtgctcttggcaaccttacattagtccttgccatcatagtcttcatctttgcagtagtgggcatgcagctgttcgggaaatcatataaggaatgtgtatgtaaaattaatgatgactgcactttacccaggtggcacatgaatgacttctttcattcatttctgattgtgtttcgagttttgtgtggcgaatggattgaaaccatgtgggactgcatggaggtcgccggacaagccatgtgcctcattgtttatatgatggttatggtcatagggaaccttgttgtgttaaacttgttcttggctctactcctctcctctttctctagtgataacctgaccgccattgaagaagacccggatgctaataacttgcagattgcggtgactagaattaaaaagggtattaattatgtcaaacaaaccctccgggagtttatactgaaagcattcagcaagaaacccaaaattagccgggaaatccgccaggcagaggaccttaatactaaaaaggagaattacattagtaaccacactttggccgagatgtctaagggccataactttcttaaagaaaaggacaagattagcgggtttggcagtagcgtcgacaagcatctgatggaggacagcgatgggcaatcctttattcataacccttccctgacggtgaccgtccccatcgctccaggggaatccgacctggagaatatgaacgcagaggaactctcatcagacagtgattctgaatatagtaaggtcaggctgaaccgatcctccagtagtgagtgctctaccgtggacaacccgttgccaggtgagggagaagaggctgaggctgagcccatgaatagcgacgaacccgaggcatgttttacagatggatgtgtgtggcggttttcctgttgtcaagtcaatatagagagcgggaagggaaaaatctggtggaatattcgaaagacatgctacaaaattgtagagcacagttggttcgaaagctttatcgtcctcatgattctcctctcctccggcgcattggctttcgaggatatatacatcgagagaaaaaagaccatcaagataattcttgaatacgccgataagatcttcacctatatctttatcctggaaatgttgcttaagtggatcgcgtatgggtataagacttatttcaccaacgcctggtgctggctggacttccttatcgtggatgtgagtttggtcactctggtcgctaatacactggggtacagcgacctcggaccgatcaaaagtctgcgaacccttagggcccttagaccactgcgggctttaagcagatttgaggggatgcgtgtcgtcgtgaacgcattaatcggagccatcccatcgatcatgaatgtcttactggtgtgcctcattttctggttaatcttttctatcatgggagtgaacctgttcgctggaaagttttacgagtgtatcaacaccaccgacggctcaagatttcccgcatcccaagtgcctaaccgcagcgaatgcttcgccctgatgaacgttagtcagaacgtgcgctggaagaatctcaaagttaacttcgataatgtcggtctgggctacttaagtctcctgcaggtggcgaccttcaaggggtggaccatcatcatgtacgccgcagtcgactctgtcaacgtggacaaacagcccaagtacgagtattccttatatatgtatatctactttgttgtctttatcattttcggttctttcttcacactgaatctgtttataggcgtgattattgataattttaatcagcagaaaaaaaaacttggcggtcaggacattttcatgactgaagagcagaagaaatattataatgctatgaaaaaactcggctccaagaagccacaaaagcccattcccaggcctggaaacaaaattcagggttgtatttttgacctggtgaccaaccaggccttcgacatctccatcatggtattaatttgcttgaacatggtgacgatgatggttgagaaagagggtcagtcccagcacatgactgaggtgctatattggataaatgttgtgtttattattctatttacgggagagtgcgtgctgaagctgatttcgttgcgacactattatttcactgtgggctggaatatctttgactttgtggtggtaatcatctcaatcgttggcatgttcctggcagatctgatcgagacctattttgttagcccgacgctgttcagagttattagactggcccgaattggacgtattctccgcctagtgaagggggctaaggggataagaactctcctgtttgccctgatgatgtcactgccagccctgttcaacattggccttctcctatttttggtgatgtttatctacgcaatcttcggcatgagcaattttgcatacgtgaagaaggaggatggaattaacgacatgttcaattttgagacatttgggaacagcatgatctgtctgttccagatcaccacatctgccggttgggacgggctactggcaccaatactaaactctaagccaccagattgtgatccaaagaaagtgcaccctggctcctctgtagagggagattgcggtaatccatctgtcggaattttctatttcgtttcatatattataatatcgtttctggtcgtggtgaacatgtatatcgccgtgatcctggagaacttttccgtggctaccgaggagtcaacagagcccctgtcggaagacgattttgagatgttttacgaagtctgggaaaaattcgatcctgacgctacccagttcatagagttttccaagctaagcgactttgctgccgctctggacccacccctcctcatcgccaagccaaacaaggtccagctaatcgccatggatctgcccatggtttccggtgaccggatccactgcctggatatcctatttgcgttcaccaagagagttctgggagaaagtggcgagatggacagtctgcgcagccagatggaggagagatttatgtccgcaaacccttccaaggtgagttatgaacccatcacaaccacgctgaagcggaagcaggaagacgtcagcgccaccgtaatccaacgggcttaccggagatatcgcctaaggcagaacgtcaaaaatataagcagcatctacattaaagatggagatagggacgatgacttactcaataaaaaggacatggccttcgacaacgtaaatgagaacagcagtccagaaaagaccgatgcgacaagcagcactacatccccaccttcatacgactccgtgacaaagcccgacaaggaaaagtatgaacaagaccggaccgagaaggaagataagggcaaggattccaaggagtccaagaagta

SEQ ID NO: 300514 - DNA, 9787 bp, Artificial Sequence
  derived and/or modified sequence
cggggctgctacctccacgggcgcgccctggcaggaggggcgcagtctgcttgcaggcggtcgccagcgctccagcggcggctgtcggctttccaattccgccagctcggctgaggctgggctagcctgggtgccagtggctgctagcggcaggcgtcccctgagcaacaggagcccagagaaaaagaagcagccctgagagagcgccggggaaggagaggcccgcgccctctcctggagccagattctgcaggtgcactgggtggggatgatcggcgggctaggttgcaagcctcttatgtgaggagctgaagaggaattaaaatatacaggatgaaaagatggcaatgttgcctcccccaggacctcagagctttgtccatttcacaaaacagtctcttgccctcattgaacaacgcattgctgaaagaaaatcaaaggaacccaaagaagaaaagaaagatgatgatgaagaagccccaaagccaagcagtgacttggaagctggcaaacagctgcccttcatctatggggacattcctcccggcatggtgtcagagcccctggaggacttggacccctactatgcagacaaaaagactttcatagtattgaacaaagggaaaacaatcttccgtttcaatgccacacctgctttatatatgctttctcctttcagtcctctaagaagaatatctattaagattttagtacactctaccttattcagcatgctcatcatgtgcactattctgacaaactgcatatttatgaccatgaataacccaccggactggaccaaaaatgtcgagtacacttttactggaatatatacttttgaatcacttgtaaaaatccttgcaagaggcttctgtgtaggagaattcacttttcttcgtgacccgtggaactggctggattttgtcgtcattgtttttgcgtatttaacagaatttgtaaacctaggcaatgtttcagctcttcgaactttcagagtattgagagctttgaaaactatttctgtaatcccaggcctgaagacaattgtaggggctttgatccagtcagtgaagaagctttctgatgtcatgatcctgactgtgttctgtctgagtgtgtttgcactaattggactacagctgttcatgggaaacctgaagcataaatgttttcgaaattcacttgaaaataatgaaacattagaaagcataatgaataccctagagagtgaagaagactttagaaaatatttttattacttggaaggatccaaagatgctctcctttgtggtttcagcacagattcaggtcagtgtccagaggggtacacctgtgtgaaaattggcagaaaccctgattatggctacacgagctttgacactttcagctgggccttcttagccttgtttaggctaatgacccaagattactgggaaaacctttaccaacagacgctgcgtgctgctggcaaaacctacatgatcttctttgtcgtagtgattttcctgggctccttttatctaataaacttgatcctggctgtggttgccatggcatatgaagaacagaaccaggcaaacattgaagaagctaaacagaaagaattagaatttcaacagatgttagaccgtcttaaaaaagagcaagaagaagctgaggcaattgcagcggcagcggctgaatatacaagtattaggagaagcagaattatgggcctctcagagagttcttctgaaacatccaaactgagctctaaaagtgctaaagaaagaagaaacagaagaaagaaaaagaatcaaaagaagctctccagtggagaggaaaagggagatgctgagaaattgtcgaaatcagaatcagaggacagcatcagaagaaaaagtttccaccttggtgtcgaagggcataggcgagcacatgaaaagaggttgtctacccccaatcagtcaccactcagcattcgtggctccttgttttctgcaaggcgaagcagcagaacaagtctttttagtttcaaaggcagaggaagagatataggatctgagactgaatttgccgatgatgagcacagcatttttggagacaatgagagcagaaggggctcactgtttgtgccccacagaccccaggagcgacgcagcagtaacatcagccaagccagtaggtccccaccaatgctgccggtgaacgggaaaatgcacagtgctgtggactgcaacggtgtggtctccctggttgatggacgctcagccctcatgctccccaatggacagcttctgccagaggtgataatagataaggcaacttctgatgacagcggcacgaccaatcaaatacacaagaaaaggcgttgtagttcctatctcctttcagaggatatgctgaatgatcccaacctcagacagagagcaatgagtagagcaagcatattaacaaacactgtggaagaacttgaagagtccagacaaaaatgtccaccttggtggtacagatttgcacacaaattcttgatctggaattgctctccatattggataaaattcaaaaagtgtatctattttattgtaatggatccttttgtagatcttgcaattaccatttgcatagttttaaacacattatttatggctatggaacaccacccaatgactgaggaattcaaaaatgtacttgctataggaaatttggtctttactggaatctttgcagctgaaatggtattaaaactgattgccatggatccatatgagtatttccaagtaggctggaatatttttgacagccttattgtgactttaagtttagtggagctctttctagcagatgtggaaggattgtcagttctgcgatcattcagactgctccgagtcttcaagttggcaaaatcctggccaacattgaacatgctgattaagatcattggtaactcagtaggggctctaggtaacctcaccttagtgttggccatcatcgtcttcatttttgctgtggtcggcatgcagctctttggtaagagctacaaagaatgtgtctgcaagatcaatgatgactgtacgctcccacggtggcacatgaacgacttcttccactccttcctgattgtgttccgcgtgctgtgtggagagtggatagagaccatgtgggactgtatggaggtcgctggtcaagctatgtgccttattgtttacatgatggtcatggtcattggaaacctggtggtcctaaacctatttctggccttattattgagctcatttagttcagacaatcttacagcaattgaagaagaccctgatgcaaacaacctccagattgcagtgactagaattaaaaagggaataaattatgtgaaacaaaccttacgtgaatttattctaaaagcattttccaaaaagccaaagatttccagggagataagacaagcagaagatctgaatactaagaaggaaaactatatttctaaccatacacttgctgaaatgagcaaaggtcacaatttcctcaaggaaaaagataaaatcagtggttttggaagcagcgtggacaaacacttgatggaagacagtgatggtcaatcatttattcacaatcccagcctcacagtgacagtgccaattgcacctggggaatccgatttggaaaatatgaatgctgaggaacttagcagtgattcggatagtgaatacagcaaagtgagattaaaccggtcaagctcctcagagtgcagcacagttgataaccctttgcctggagaaggagaagaagcagaggctgaacctatgaattccgatgagccagaggcctgtttcacagatggttgtgtatggaggttctcatgctgccaagttaacatagagtcagggaaaggaaaaatctggtggaacatcaggaaaacctgctacaagattgttgaacacagttggtttgaaagcttcattgtcctcatgatcctgctcagcagtggtgccctggcttttgaagatatttatattgaaaggaaaaagaccattaagattatcctggagtatgcagacaagatcttcacttacatcttcattctggaaatgcttctaaaatggatagcatatggttataaaacatatttcaccaatgcctggtgttggctggatttcctaattgttgatgtttctttggttactttagtggcaaacactcttggctactcagatcttggccccattaaatcccttcggacactgagagctttaagacctctaagagccttatctagatttgaaggaatgagggtcgttgtgaatgcactcataggagcaattccttccatcatgaatgtgctacttgtgtgtcttatattctggctgatattcagcatcatgggagtaaatttgtttgctggcaagttctatgagtgtattaacaccacagatgggtcacggtttcctgcaagtcaagttccaaatcgttccgaatgttttgcccttatgaatgttagtcaaaatgtgcgatggaaaaacctgaaagtgaactttgataatgtcggacttggttacctatctctgcttcaagttgcaacttttaagggatggacgattattatgtatgcagcagtggattctgttaatgtagacaagcagcccaaatatgaatatagcctctacatgtatatttattttgtcgtctttatcatctttgggtcattcttcactttgaacttgttcattggtgtcatcatagataatttcaaccaacagaaaaagaagcttggaggtcaagacatctttatgacagaagaacagaagaaatactataatgcaatgaaaaagctggggtccaagaagccacaaaagccaattcctcgaccagggaacaaaatccaaggatgtatatttgacctagtgacaaatcaagcctttgatattagtatcatggttcttatctgtctcaacatggtaaccatgatggtagaaaaggagggtcaaagtcaacatatgactgaagttttatattggataaatgtggtttttataatccttttcactggagaatgtgtgctaaaactgatctccctcagacactactacttcactgtaggatggaatatttttgattttgtggttgtgattatctccattgtaggtatgtttctagctgatttgattgaaacgtattttgtgtcccctaccctgttccgagtgatccgtcttgccaggattggccgaatcctacgtctagtcaaaggagcaaaggggatccgcacgctgctctttgctttgatgatgtcccttcctgcgttgtttaacatcggcctcctgctcttcctggtcatgttcatctacgccatctttggaatgtccaactttgcctatgttaaaaaggaagatggaattaatgacatgttcaattttgagacctttggcaacagtatgatttgcctgttccaaattacaacctctgctggctgggatggattgctagcacctattcttaacagtaagccacccgactgtgacccaaaaaaagttcatcctggaagttcagttgaaggagactgtggtaacccatctgttggaatattctactttgttagttatatcatcatatccttcctggttgtggtgaacatgtacattgcagtcatactggagaattttagtgttgccactgaagaaagtactgaacctctgagtgaggatgactttgagatgttctatgaggtttgggagaagtttgatcccgatgcgacccagtttatagagttctctaaactctctgattttgcagctgccctggatcctcctcttctcatagcaaaacccaacaaagtccagctcattgccatggatctgcccatggttagtggtgaccggatccattgtcttgacatcttatttgcttttacaaagcgtgttttgggtgagagtggggagatggattctcttcgttcacagatggaagaaaggttcatgtctgcaaatccttccaaagtgtcctatgaacccatcacaaccacactaaaacggaaacaagaggatgtgtctgctactgtcattcagcgtgcttatagacgttaccgcttaaggcaaaatgtcaaaaatatatcaagtatatacataaaagatggagacagagatgatgatttactcaataaaaaagatatggcttttgataatgttaatgagaactcaagtccagaaaaaacagatgccacttcatccaccacctctccaccttcatatgatagtgtaacaaagccagacaaagagaaatatgaacaagacagaacagaaaaggaagacaaagggaaagacagcaaggaaagcaaaaaatagagcttcatttttgatatattgtttacagcctgtgaaagtgatttatttgtgttaataaaactcttttgaggaagtctatgccaaaatcctttttatcaaaatattctcgaaggcagtgcagtcactaactctgatttcctaagaaaggtgggcagcattagcagatggttatttttgcactgatgattctttaagaatcgtaagagaactctgtaggaattattgattatagcatacaaaagtgattcagttttttggtttttaataaatcagaagaccatgtagaaaacttttacatctgccttgtcatcttttcacaggattgtaattagtcttgtttcccatgtaaataaacaacacacgcatacagaaaaatctattatttatctattatttggaaatcaacaaaagtatttgccttggctttgcaatgaaatgcttgatagaagtaatggacattagttatgaatgtttagttaaaatgcattattagggagcttgactttttatcaatgtacagaggttattctatattttgaggtgcttaaatttattctacattgcatcagaaccaatttatatgtgcctataaaatgccatgggattaaaaatatatgtaggctattcatttctacaaatgtttttcattcatcttgactcacatgccaacaaggataagacttacctttagagtattgtgtttcatagcctttcttctttcatatccctttttgttcatagaataaccacagaacttgaaaaattattctaagtacatattacactcctcaaaaaaaacaaagataactgagaaaaaagttattgacagaagttctatttgctattatttacatagcctaacatttgactgtgctgcccaaaatactgataatagtctcttaaactcttttgtcaaattttcctgctttcttatgcagtattgtttagtcatcctttcgctgtaagcaaagttgatgaaatccttcctgatatgcagttagttgtttgaccacggtacatacttgagcagataataacttgggcacagtatttattgcatcacttgtatacaatcccgtgtttggcaagctttcaaatcatgtaatatgacagactttacacagatatgtgtttagtatgaataaaaaagcattgaaatagggattcttgccaacttgctctcttgccaccaacttactttcctaaattatggaagtaatcttttttggatatacttcaatgtatacaatgaggaagatgtcaccttctccttaaaattctatgatgtgaaatatattttgcctcaatcaacacagtaccatgggcttctaatttatcaagcacatattcattttgcattagctgtagacatctagttttttgaaaacacctattaatagtaatttgaaaagaaataaccataatgctttttttcgtgagtttatttcaggaatatgagatctttcttctataaagttattcatgcacaggcaaaaattgagctacacaggtagaatgtagttttacttagaagatttttgtgggaggttttgaagcaaatatataaaacaactttcactaatttgctttccatatttaaaaaataataaattacatttatataataaatgtttaaagcacatattttttgttgttctggcaatttaaaaagaaagaggatttaaacgtacctatagaaacaaagatttatggttaaagaatgagatcagaagtctagaatgtttttaaattgtgatatattttacaacatccgttattactttgagacatttgtcctaatctacgtataaaactcaatctagggctaaagattctttataccatcttaggttcattcatcttaggctatttgaaccactttttaatttaatatgaaagacaccatgcagtgttttccgagactacatagatcattttatcacatacctaccaagcctgttggaaataggttttgataatttaagtagggacctatacaaaatatattacatttatcagatttttaaatacattcaattaagaatttaacatcaccttaaatttgaattcaatctaccgttatttcaaactcacaaatataactgcattatgaatacttacataatgtagtaagacaagatgtttgacaggttcgtgtgtaattttctattaatgtttttacattgccttgtttttatgtaaaataaaaaatatgggcaactggtttgttaacaacacaatttcttcttagcatttcaaaaatatatataaagttgttctttttcctatttcatgaactatgtttttttttaaaataacatggttaagttttatatatatttacgtttgtttcaggaatgtctacttgtgactttttatcaattaaaaataatatttggaagaaagagcttattaagtataagcttgaagtaaaattagacctctctttccatgtagattactgtttgtactgatggtttcacccttcagaaggcactgtcatattaatatttaaattttataatcgctgaacttattacacccaacaatacagaaaggcagttacactgaagaacttaacttagaataaaatggaagcaaacaggttttctaaaaacttttttaagtgaccaggtctcgctctgtcacccaggctagagtgcaatggcatgatcatagctctctgcagcctcaactctgggctcaagcaaccctcctgcctcagcctcccaagtagctaagactacaggtacatgccaccatgcctggctaatatttaaatttttgtagataaggggtcttgctatgttgcccaggctagtctcaaactcctggcttcaagtgttcctactgtcatgacctgccaacatgctggggttacaggcatgagccaccatgccccaaacaggtttgaacacaaatctttcggatgaaaattagagaacctaattttagctttttgatagttacctagtttgcaaaagatttgggtgacttgtgagctgtttttaaatgctgattgttgaacatcacaacccaaaatacttagcatgattttatagagttttgatagctttattaaaaagagtgaaaataaaatgcatatgtaaataaagcagttctaaatagctatttcagagaaatgttaatagaagtgctgaaagaagggccaactaaattaggatggccagggaattggcctgggtttaggacctatgtatgaaggccaccaattttttaaaaatatctgtggtttattatgttattatcttcttgaggaaaacaatcaagaattgcttcatgaaaataaataaatagccatgaatatcataaagctgtttacataggattctttacaaatttcatagatctatgaatgctcaaaatgtttgagtttgccataaattatattgtagttatattgtagttatacttgagactgacacattgtaatataatctaagaataaaagttat

SEQ ID NO: 300515 - DNA, 5967 bp, Artificial Sequence
  derived and/or modified sequence
atggcaatgttgcctcccccaggacctcagagctttgtccatttcacaaaacagtctcttgccctcattgaacaacgcattgctgaaagaaaatcaaaggaacccaaagaagaaaagaaagatgatgatgaagaagccccaaagccaagcagtgacttggaagctggcaaacagctgcccttcatctatggggacattcctcccggcatggtgtcagagcccctggaggacttggacccctactatgcagacaaaaagactttcatagtattgaacaaagggaaaacaatcttccgtttcaatgccacacctgctttatatatgctttctcctttcagtcctctaagaagaatatctattaagattttagtacactccttattcagcatgctcatcatgtgcactattctgacaaactgcatatttatgaccatgaataacccaccggactggaccaaaaatgtcgagtacacttttactggaatatatacttttgaatcacttgtaaaaatccttgcaagaggcttctgtgtaggagaattcacttttcttcgtgacccgtggaactggctggattttgtcgtcattgtttttgcgtatttaacagaatttgtaaacctaggcaatgtttcagctcttcgaactttcagagtattgagagctttgaaaactatttctgtaatcccaggcctgaagacaattgtaggggctttgatccagtcagtgaagaagctttctgatgtcatgatcctgactgtgttctgtctgagtgtgtttgcactaattggactacagctgttcatgggaaacctgaagcataaatgttttcgaaattcacttgaaaataatgaaacattagaaagcataatgaataccctagagagtgaagaagactttagaaaatatttttattacttggaaggatccaaagatgctctcctttgtggtttcagcacagattcaggtcagtgtccagaggggtacacctgtgtgaaaattggcagaaaccctgattatggctacacgagctttgacactttcagctgggccttcttagccttgtttaggctaatgacccaagattactgggaaaacctttaccaacagacgctgcgtgctgctggcaaaacctacatgatcttctttgtcgtagtgattttcctgggctccttttatctaataaacttgatcctggctgtggttgccatggcatatgaagaacagaaccaggcaaacattgaagaagctaaacagaaagaattagaatttcaacagatgttagaccgtcttaaaaaagagcaagaagaagctgaggcaattgcagcggcagcggctgaatatacaagtattaggagaagcagaattatgggcctctcagagagttcttctgaaacatccaaactgagctctaaaagtgctaaagaaagaagaaacagaagaaagaaaaagaatcaaaagaagctctccagtggagaggaaaagggagatgctgagaaattgtcgaaatcagaatcagaggacagcatcagaagaaaaagtttccaccttggtgtcgaagggcataggcgagcacatgaaaagaggttgtctacccccaatcagtcaccactcagcattcgtggctccttgttttctgcaaggcgaagcagcagaacaagtctttttagtttcaaaggcagaggaagagatataggatctgagactgaatttgccgatgatgagcacagcatttttggagacaatgagagcagaaggggctcactgtttgtgccccacagaccccaggagcgacgcagcagtaacatcagccaagccagtaggtccccaccaatgctgccggtgaacgggaaaatgcacagtgctgtggactgcaacggtgtggtctccctggttgatggacgctcagccctcatgctccccaatggacagcttctgccagaggtgataatagataaggcaacttctgatgacagcggcacgaccaatcaaatacacaagaaaaggcgttgtagttcctatctcctttcagaggatatgctgaatgatcccaacctcagacagagagcaatgagtagagcaagcatattaacaaacactgtggaagaacttgaagagtccagacaaaaatgtccaccttggtggtacagatttgcacacaaattcttgatctggaattgctctccatattggataaaattcaaaaagtgtatctattttattgtaatggatccttttgtagatcttgcaattaccatttgcatagttttaaacacattatttatggctatggaacaccacccaatgactgaggaattcaaaaatgtacttgctataggaaatttggtctttactggaatctttgcagctgaaatggtattaaaactgattgccatggatccatatgagtatttccaagtaggctggaatatttttgacagccttattgtgactttaagtttagtggagctctttctagcagatgtggaaggattgtcagttctgcgatcattcagactgctccgagtcttcaagttggcaaaatcctggccaacattgaacatgctgattaagatcattggtaactcagtaggggctctaggtaacctcaccttagtgttggccatcatcgtcttcatttttgctgtggtcggcatgcagctctttggtaagagctacaaagaatgtgtctgcaagatcaatgatgactgtacgctcccacggtggcacatgaacgacttcttccactccttcctgattgtgttccgcgtgctgtgtggagagtggatagagaccatgtgggactgtatggaggtcgctggtcaagctatgtgccttattgtttacatgatggtcatggtcattggaaacctggtggtcctaaacctatttctggccttattattgagctcatttagttcagacaatcttacagcaattgaagaagaccctgatgcaaacaacctccagattgcagtgactagaattaaaaagggaataaattatgtgaaacaaaccttacgtgaatttattctaaaagcattttccaaaaagccaaagatttccagggagataagacaagcagaagatctgaatactaagaaggaaaactatatttctaaccatacacttgctgaaatgagcaaaggtcacaatttcctcaaggaaaaagataaaatcagtggttttggaagcagcgtggacaaacacttgatggaagacagtgatggtcaatcatttattcacaatcccagcctcacagtgacagtgccaattgcacctggggaatccgatttggaaaatatgaatgctgaggaacttagcagtgattcggatagtgaatacagcaaagtgagattaaaccggtcaagctcctcagagtgcagcacagttgataaccctttgcctggagaaggagaagaagcagaggctgaacctatgaattccgatgagccagaggcctgtttcacagatggttgtgtatggaggttctcatgctgccaagttaacatagagtcagggaaaggaaaaatctggtggaacatcaggaaaacctgctacaagattgttgaacacagttggtttgaaagcttcattgtcctcatgatcctgctcagcagtggtgccctggcttttgaagatatttatattgaaaggaaaaagaccattaagattatcctggagtatgcagacaagatcttcacttacatcttcattctggaaatgcttctaaaatggatagcatatggttataaaacatatttcaccaatgcctggtgttggctggatttcctaattgttgatgtttctttggttactttagtggcaaacactcttggctactcagatcttggccccattaaatcccttcggacactgagagctttaagacctctaagagccttatctagatttgaaggaatgagggtcgttgtgaatgcactcataggagcaattccttccatcatgaatgtgctacttgtgtgtcttatattctggctgatattcagcatcatgggagtaaatttgtttgctggcaagttctatgagtgtattaacaccacagatgggtcacggtttcctgcaagtcaagttccaaatcgttccgaatgttttgcccttatgaatgttagtcaaaatgtgcgatggaaaaacctgaaagtgaactttgataatgtcggacttggttacctatctctgcttcaagttgcaacttttaagggatggacgattattatgtatgcagcagtggattctgttaatgtagacaagcagcccaaatatgaatatagcctctacatgtatatttattttgtcgtctttatcatctttgggtcattcttcactttgaacttgttcattggtgtcatcatagataatttcaaccaacagaaaaagaagcttggaggtcaagacatctttatgacagaagaacagaagaaatactataatgcaatgaaaaagctggggtccaagaagccacaaaagccaattcctcgaccagggaacaaaatccaaggatgtatatttgacctagtgacaaatcaagcctttgatattagtatcatggttcttatctgtctcaacatggtaaccatgatggtagaaaaggagggtcaaagtcaacatatgactgaagttttatattggataaatgtggtttttataatccttttcactggagaatgtgtgctaaaactgatctccctcagacactactacttcactgtaggatggaatatttttgattttgtggttgtgattatctccattgtaggtatgtttctagctgatttgattgaaacgtattttgtgtcccctaccctgttccgagtgatccgtcttgccaggattggccgaatcctacgtctagtcaaaggagcaaaggggatccgcacgctgctctttgctttgatgatgtcccttcctgcgttgtttaacatcggcctcctgctcttcctggtcatgttcatctacgccatctttggaatgtccaactttgcctatgttaaaaaggaagatggaattaatgacatgttcaattttgagacctttggcaacagtatgatttgcctgttccaaattacaacctctgctggctgggatggattgctagcacctattcttaacagtaagccacccgactgtgacccaaaaaaagttcatcctggaagttcagttgaaggagactgtggtaacccatctgttggaatattctactttgttagttatatcatcatatccttcctggttgtggtgaacatgtacattgcagtcatactggagaattttagtgttgccactgaagaaagtactgaacctctgagtgaggatgactttgagatgttctatgaggtttgggagaagtttgatcccgatgcgacccagtttatagagttctctaaactctctgattttgcagctgccctggatcctcctcttctcatagcaaaacccaacaaagtccagctcattgccatggatctgcccatggttagtggtgaccggatccattgtcttgacatcttatttgcttttacaaagcgtgttttgggtgagagtggggagatggattctcttcgttcacagatggaagaaaggttcatgtctgcaaatccttccaaagtgtcctatgaacccatcacaaccacactaaaacggaaacaagaggatgtgtctgctactgtcattcagcgtgcttatagacgttaccgcttaaggcaaaatgtcaaaaatatatcaagtatatacataaaagatggagacagagatgatgatttactcaataaaaaagatatggcttttgataatgttaatgagaactcaagtccagaaaaaacagatgccacttcatccaccacctctccaccttcatatgatagtgtaacaaagccagacaaagagaaatatgaacaagacagaacagaaaaggaagacaaagggaaagacagcaaggaaagcaaaaaatag

SEQ ID NO: 300516 - DNA, 5970 bp, Artificial Sequence
  derived and/or modified sequence
atggccatgctgcccccccccggcccccagagcttcgtgcacttcaccaagcagagcctggccctgatcgagcagagaatcgccgagagaaagagcaaggagcccaaggaggagaagaaggacgacgacgaggaggcccccaagcccagcagcgacctggaggccggcaagcagctgcccttcatctacggcgacatcccccccggcatggtgagcgagcccctggaggacctggacccctactacgccgacaagaagaccttcatcgtgctgaacaagggcaagaccatcttcagattcaacgccacccccgccctgtacatgctgagccccttcagccccctgagaagaatcagcatcaagatcctggtgcacagcaccctgttcagcatgctgatcatgtgcaccatcctgaccaactgcatcttcatgaccatgaacaacccccccgactggaccaagaacgtggagtacaccttcaccggcatctacaccttcgagagcctggtgaagatcctggccagaggcttctgcgtgggcgagttcaccttcctgagagacccctggaactggctggacttcgtggtgatcgtgttcgcctacctgaccgagttcgtgaacctgggcaacgtgagcgccctgagaaccttcagagtgctgagagccctgaagaccatcagcgtgatccccggcctgaagaccatcgtgggcgccctgatccagagcgtgaagaagctgagcgacgtgatgatcctgaccgtgttctgcctgagcgtgttcgccctgatcggcctgcagctgttcatgggcaacctgaagcacaagtgcttcagaaacagcctggagaacaacgagaccctggagagcatcatgaacaccctggagagcgaggaggacttcagaaagtacttctactacctggagggcagcaaggacgccctgctgtgcggcttcagcaccgacagcggccagtgccccgagggctacacctgcgtgaagatcggcagaaaccccgactacggctacaccagcttcgacaccttcagctgggccttcctggccctgttcagactgatgacccaggactactgggagaacctgtaccagcagaccctgagagccgccggcaagacctacatgatcttcttcgtggtggtgatcttcctgggcagcttctacctgatcaacctgatcctggccgtggtggccatggcctacgaggagcagaaccaggccaacatcgaggaggccaagcagaaggagctggagttccagcagatgctggacagactgaagaaggagcaggaggaggccgaggccatcgccgccgccgccgccgagtacaccagcatcagaagaagcagaatcatgggcctgagcgagagcagcagcgagaccagcaagctgagcagcaagagcgccaaggagagaagaaacagaagaaagaagaagaaccagaagaagctgagcagcggcgaggagaagggcgacgccgagaagctgagcaagagcgagagcgaggacagcatcagaagaaagagcttccacctgggcgtggagggccacagaagagcccacgagaagagactgagcacccccaaccagagccccctgagcatcagaggcagcctgttcagcgccagaagaagcagcagaaccagcctgttcagcttcaagggcagaggcagagacatcggcagcgagaccgagttcgccgacgacgagcacagcatcttcggcgacaacgagagcagaagaggcagcctgttcgtgccccacagaccccaggagagaagaagcagcaacatcagccaggccagcagaagcccccccatgctgcccgtgaacggcaagatgcacagcgccgtggactgcaacggcgtggtgagcctggtggacggcagaagcgccctgatgctgcccaacggccagctgctgcccgaggtgatcatcgacaaggccaccagcgacgacagcggcaccaccaaccagatccacaagaagagaagatgcagcagctacctgctgagcgaggacatgctgaacgaccccaacctgagacagagagccatgagcagagccagcatcctgaccaacaccgtggaggagctggaggagagcagacagaagtgccccccctggtggtacagattcgcccacaagttcctgatctggaactgcagcccctactggatcaagttcaagaagtgcatctacttcatcgtgatggaccccttcgtggacctggccatcaccatctgcatcgtgctgaacaccctgttcatggccatggagcaccaccccatgaccgaggagttcaagaacgtgctggccatcggcaacctggtgttcaccggcatcttcgccgccgagatggtgctgaagctgatcgccatggacccctacgagtacttccaggtgggctggaacatcttcgacagcctgatcgtgaccctgagcctggtggagctgttcctggccgacgtggagggcctgagcgtgctgagaagcttcagactgctgagagtgttcaagctggccaagagctggcccaccctgaacatgctgatcaagatcatcggcaacagcgtgggcgccctgggcaacctgaccctggtgctggccatcatcgtgttcatcttcgccgtggtgggcatgcagctgttcggcaagagctacaaggagtgcgtgtgcaagatcaacgacgactgcaccctgcccagatggcacatgaacgacttcttccacagcttcctgatcgtgttcagagtgctgtgcggcgagtggatcgagaccatgtgggactgcatggaggtggccggccaggccatgtgcctgatcgtgtacatgatggtgatggtgatcggcaacctggtggtgctgaacctgttcctggccctgctgctgagcagcttcagcagcgacaacctgaccgccatcgaggaggaccccgacgccaacaacctgcagatcgccgtgaccagaatcaagaagggcatcaactacgtgaagcagaccctgagagagttcatcctgaaggccttcagcaagaagcccaagatcagcagagagatcagacaggccgaggacctgaacaccaagaaggagaactacatcagcaaccacaccctggccgagatgagcaagggccacaacttcctgaaggagaaggacaagatcagcggcttcggcagcagcgtggacaagcacctgatggaggacagcgacggccagagcttcatccacaaccccagcctgaccgtgaccgtgcccatcgcccccggcgagagcgacctggagaacatgaacgccgaggagctgagcagcgacagcgacagcgagtacagcaaggtgagactgaacagaagcagcagcagcgagtgcagcaccgtggacaaccccctgcccggcgagggcgaggaggccgaggccgagcccatgaacagcgacgagcccgaggcctgcttcaccgacggctgcgtgtggagattcagctgctgccaggtgaacatcgagagcggcaagggcaagatctggtggaacatcagaaagacctgctacaagatcgtggagcacagctggttcgagagcttcatcgtgctgatgatcctgctgagcagcggcgccctggccttcgaggacatctacatcgagagaaagaagaccatcaagatcatcctggagtacgccgacaagatcttcacctacatcttcatcctggagatgctgctgaagtggatcgcctacggctacaagacctacttcaccaacgcctggtgctggctggacttcctgatcgtggacgtgagcctggtgaccctggtggccaacaccctgggctacagcgacctgggccccatcaagagcctgagaaccctgagagccctgagacccctgagagccctgagcagattcgagggcatgagagtggtggtgaacgccctgatcggcgccatccccagcatcatgaacgtgctgctggtgtgcctgatcttctggctgatcttcagcatcatgggcgtgaacctgttcgccggcaagttctacgagtgcatcaacaccaccgacggcagcagattccccgccagccaggtgcccaacagaagcgagtgcttcgccctgatgaacgtgagccagaacgtgagatggaagaacctgaaggtgaacttcgacaacgtgggcctgggctacctgagcctgctgcaggtggccaccttcaagggctggaccatcatcatgtacgccgccgtggacagcgtgaacgtggacaagcagcccaagtacgagtacagcctgtacatgtacatctacttcgtggtgttcatcatcttcggcagcttcttcaccctgaacctgttcatcggcgtgatcatcgacaacttcaaccagcagaagaagaagctgggcggccaggacatcttcatgaccgaggagcagaagaagtactacaacgccatgaagaagctgggcagcaagaagccccagaagcccatccccagacccggcaacaagatccagggctgcatcttcgacctggtgaccaaccaggccttcgacatcagcatcatggtgctgatctgcctgaacatggtgaccatgatggtggagaaggagggccagagccagcacatgaccgaggtgctgtactggatcaacgtggtgttcatcatcctgttcaccggcgagtgcgtgctgaagctgatcagcctgagacactactacttcaccgtgggctggaacatcttcgacttcgtggtggtgatcatcagcatcgtgggcatgttcctggccgacctgatcgagacctacttcgtgagccccaccctgttcagagtgatcagactggccagaatcggcagaatcctgagactggtgaagggcgccaagggcatcagaaccctgctgttcgccctgatgatgagcctgcccgccctgttcaacatcggcctgctgctgttcctggtgatgttcatctacgccatcttcggcatgagcaacttcgcctacgtgaagaaggaggacggcatcaacgacatgttcaacttcgagaccttcggcaacagcatgatctgcctgttccagatcaccaccagcgccggctgggacggcctgctggcccccatcctgaacagcaagccccccgactgcgaccccaagaaggtgcaccccggcagcagcgtggagggcgactgcggcaaccccagcgtgggcatcttctacttcgtgagctacatcatcatcagcttcctggtggtggtgaacatgtacatcgccgtgatcctggagaacttcagcgtggccaccgaggagagcaccgagcccctgagcgaggacgacttcgagatgttctacgaggtgtgggagaagttcgaccccgacgccacccagttcatcgagttcagcaagctgagcgacttcgccgccgccctggacccccccctgctgatcgccaagcccaacaaggtgcagctgatcgccatggacctgcccatggtgagcggcgacagaatccactgcctggacatcctgttcgccttcaccaagagagtgctgggcgagagcggcgagatggacagcctgagaagccagatggaggagagattcatgagcgccaaccccagcaaggtgagctacgagcccatcaccaccaccctgaagagaaagcaggaggacgtgagcgccaccgtgatccagagagcctacagaagatacagactgagacagaacgtgaagaacatcagcagcatctacatcaaggacggcgacagagacgacgacctgctgaacaagaaggacatggccttcgacaacgtgaacgagaacagcagccccgagaagaccgacgccaccagcagcaccaccagcccccccagctacgacagcgtgaccaagcccgacaaggagaagtacgagcaggacagaaccgagaaggaggacaagggcaaggacagcaaggagagcaagaagtag

SEQ ID NO: 300517 - DNA, 5967 bp, Artificial Sequence
  derived and/or modified sequence
atggccatgctgcccccccccggcccccagagcttcgtgcacttcaccaagcagagcctggccctgatcgagcagagaatcgccgagagaaagagcaaggagcccaaggaggagaagaaggacgacgacgaggaggcccccaagcccagcagcgacctggaggccggcaagcagctgcccttcatctacggcgacatcccccccggcatggtgagcgagcccctggaggacctggacccctactacgccgacaagaagaccttcatcgtgctgaacaagggcaagaccatcttcagattcaacgccacccccgccctgtacatgctgagccccttcagccccctgagaagaatcagcatcaagatcctggtgcacagcctgttcagcatgctgatcatgtgcaccatcctgaccaactgcatcttcatgaccatgaacaacccccccgactggaccaagaacgtggagtacaccttcaccggcatctacaccttcgagagcctggtgaagatcctggccagaggcttctgcgtgggcgagttcaccttcctgagagacccctggaactggctggacttcgtggtgatcgtgttcgcctacctgaccgagttcgtgaacctgggcaacgtgagcgccctgagaaccttcagagtgctgagagccctgaagaccatcagcgtgatccccggcctgaagaccatcgtgggcgccctgatccagagcgtgaagaagctgagcgacgtgatgatcctgaccgtgttctgcctgagcgtgttcgccctgatcggcctgcagctgttcatgggcaacctgaagcacaagtgcttcagaaacagcctggagaacaacgagaccctggagagcatcatgaacaccctggagagcgaggaggacttcagaaagtacttctactacctggagggcagcaaggacgccctgctgtgcggcttcagcaccgacagcggccagtgccccgagggctacacctgcgtgaagatcggcagaaaccccgactacggctacaccagcttcgacaccttcagctgggccttcctggccctgttcagactgatgacccaggactactgggagaacctgtaccagcagaccctgagagccgccggcaagacctacatgatcttcttcgtggtggtgatcttcctgggcagcttctacctgatcaacctgatcctggccgtggtggccatggcctacgaggagcagaaccaggccaacatcgaggaggccaagcagaaggagctggagttccagcagatgctggacagactgaagaaggagcaggaggaggccgaggccatcgccgccgccgccgccgagtacaccagcatcagaagaagcagaatcatgggcctgagcgagagcagcagcgagaccagcaagctgagcagcaagagcgccaaggagagaagaaacagaagaaagaagaagaaccagaagaagctgagcagcggcgaggagaagggcgacgccgagaagctgagcaagagcgagagcgaggacagcatcagaagaaagagcttccacctgggcgtggagggccacagaagagcccacgagaagagactgagcacccccaaccagagccccctgagcatcagaggcagcctgttcagcgccagaagaagcagcagaaccagcctgttcagcttcaagggcagaggcagagacatcggcagcgagaccgagttcgccgacgacgagcacagcatcttcggcgacaacgagagcagaagaggcagcctgttcgtgccccacagaccccaggagagaagaagcagcaacatcagccaggccagcagaagcccccccatgctgcccgtgaacggcaagatgcacagcgccgtggactgcaacggcgtggtgagcctggtggacggcagaagcgccctgatgctgcccaacggccagctgctgcccgaggtgatcatcgacaaggccaccagcgacgacagcggcaccaccaaccagatccacaagaagagaagatgcagcagctacctgctgagcgaggacatgctgaacgaccccaacctgagacagagagccatgagcagagccagcatcctgaccaacaccgtggaggagctggaggagagcagacagaagtgccccccctggtggtacagattcgcccacaagttcctgatctggaactgcagcccctactggatcaagttcaagaagtgcatctacttcatcgtgatggaccccttcgtggacctggccatcaccatctgcatcgtgctgaacaccctgttcatggccatggagcaccaccccatgaccgaggagttcaagaacgtgctggccatcggcaacctggtgttcaccggcatcttcgccgccgagatggtgctgaagctgatcgccatggacccctacgagtacttccaggtgggctggaacatcttcgacagcctgatcgtgaccctgagcctggtggagctgttcctggccgacgtggagggcctgagcgtgctgagaagcttcagactgctgagagtgttcaagctggccaagagctggcccaccctgaacatgctgatcaagatcatcggcaacagcgtgggcgccctgggcaacctgaccctggtgctggccatcatcgtgttcatcttcgccgtggtgggcatgcagctgttcggcaagagctacaaggagtgcgtgtgcaagatcaacgacgactgcaccctgcccagatggcacatgaacgacttcttccacagcttcctgatcgtgttcagagtgctgtgcggcgagtggatcgagaccatgtgggactgcatggaggtggccggccaggccatgtgcctgatcgtgtacatgatggtgatggtgatcggcaacctggtggtgctgaacctgttcctggccctgctgctgagcagcttcagcagcgacaacctgaccgccatcgaggaggaccccgacgccaacaacctgcagatcgccgtgaccagaatcaagaagggcatcaactacgtgaagcagaccctgagagagttcatcctgaaggccttcagcaagaagcccaagatcagcagagagatcagacaggccgaggacctgaacaccaagaaggagaactacatcagcaaccacaccctggccgagatgagcaagggccacaacttcctgaaggagaaggacaagatcagcggcttcggcagcagcgtggacaagcacctgatggaggacagcgacggccagagcttcatccacaaccccagcctgaccgtgaccgtgcccatcgcccccggcgagagcgacctggagaacatgaacgccgaggagctgagcagcgacagcgacagcgagtacagcaaggtgagactgaacagaagcagcagcagcgagtgcagcaccgtggacaaccccctgcccggcgagggcgaggaggccgaggccgagcccatgaacagcgacgagcccgaggcctgcttcaccgacggctgcgtgtggagattcagctgctgccaggtgaacatcgagagcggcaagggcaagatctggtggaacatcagaaagacctgctacaagatcgtggagcacagctggttcgagagcttcatcgtgctgatgatcctgctgagcagcggcgccctggccttcgaggacatctacatcgagagaaagaagaccatcaagatcatcctggagtacgccgacaagatcttcacctacatcttcatcctggagatgctgctgaagtggatcgcctacggctacaagacctacttcaccaacgcctggtgctggctggacttcctgatcgtggacgtgagcctggtgaccctggtggccaacaccctgggctacagcgacctgggccccatcaagagcctgagaaccctgagagccctgagacccctgagagccctgagcagattcgagggcatgagagtggtggtgaacgccctgatcggcgccatccccagcatcatgaacgtgctgctggtgtgcctgatcttctggctgatcttcagcatcatgggcgtgaacctgttcgccggcaagttctacgagtgcatcaacaccaccgacggcagcagattccccgccagccaggtgcccaacagaagcgagtgcttcgccctgatgaacgtgagccagaacgtgagatggaagaacctgaaggtgaacttcgacaacgtgggcctgggctacctgagcctgctgcaggtggccaccttcaagggctggaccatcatcatgtacgccgccgtggacagcgtgaacgtggacaagcagcccaagtacgagtacagcctgtacatgtacatctacttcgtggtgttcatcatcttcggcagcttcttcaccctgaacctgttcatcggcgtgatcatcgacaacttcaaccagcagaagaagaagctgggcggccaggacatcttcatgaccgaggagcagaagaagtactacaacgccatgaagaagctgggcagcaagaagccccagaagcccatccccagacccggcaacaagatccagggctgcatcttcgacctggtgaccaaccaggccttcgacatcagcatcatggtgctgatctgcctgaacatggtgaccatgatggtggagaaggagggccagagccagcacatgaccgaggtgctgtactggatcaacgtggtgttcatcatcctgttcaccggcgagtgcgtgctgaagctgatcagcctgagacactactacttcaccgtgggctggaacatcttcgacttcgtggtggtgatcatcagcatcgtgggcatgttcctggccgacctgatcgagacctacttcgtgagccccaccctgttcagagtgatcagactggccagaatcggcagaatcctgagactggtgaagggcgccaagggcatcagaaccctgctgttcgccctgatgatgagcctgcccgccctgttcaacatcggcctgctgctgttcctggtgatgttcatctacgccatcttcggcatgagcaacttcgcctacgtgaagaaggaggacggcatcaacgacatgttcaacttcgagaccttcggcaacagcatgatctgcctgttccagatcaccaccagcgccggctgggacggcctgctggcccccatcctgaacagcaagccccccgactgcgaccccaagaaggtgcaccccggcagcagcgtggagggcgactgcggcaaccccagcgtgggcatcttctacttcgtgagctacatcatcatcagcttcctggtggtggtgaacatgtacatcgccgtgatcctggagaacttcagcgtggccaccgaggagagcaccgagcccctgagcgaggacgacttcgagatgttctacgaggtgtgggagaagttcgaccccgacgccacccagttcatcgagttcagcaagctgagcgacttcgccgccgccctggacccccccctgctgatcgccaagcccaacaaggtgcagctgatcgccatggacctgcccatggtgagcggcgacagaatccactgcctggacatcctgttcgccttcaccaagagagtgctgggcgagagcggcgagatggacagcctgagaagccagatggaggagagattcatgagcgccaaccccagcaaggtgagctacgagcccatcaccaccaccctgaagagaaagcaggaggacgtgagcgccaccgtgatccagagagcctacagaagatacagactgagacagaacgtgaagaacatcagcagcatctacatcaaggacggcgacagagacgacgacctgctgaacaagaaggacatggccttcgacaacgtgaacgagaacagcagccccgagaagaccgacgccaccagcagcaccaccagcccccccagctacgacagcgtgaccaagcccgacaaggagaagtacgagcaggacagaaccgagaaggaggacaagggcaaggacagcaaggagagcaagaagtag

SEQ ID NO: 300518 - protein, 1989 aa, Artificial Sequence
  derived and/or modified sequence
MAMLPPPGPQSFVHFTKQSLALIEQRIAERKSKEPKEEKKDDDEEAPKPSSDLEAGKQLPFIYGDIPPGMVSEPLEDLDPYYADKKTFIVLNKGKTIFRFNATPALYMLSPFSPLRRISIKILVHSTLFSMLIMCTILTNCIFMTMNNPPDWTKNVEYTFTGIYTFESLVKILARGFCVGEFTFLRDPWNWLDFVVIVFAYVTEFVDLGNVSALRTFRVLRALKTISVIPGLKTIVGALIQSVKKLSDVMILTVFCLSVFALIGLQLFMGNLKHKCFRNSLENNETLESIMNTLESEEDFRKYFYYLEGSKDALLCGFSTDSGQCPEGYTCVKIGRNPDYGYTSFDTFSWAFLALFRLMTQDYWENLYQQTLRAAGKTYMIFFVVVIFLGSFYLINLILAVVAMAYEEQNQANIEEAKQKELEFQQMLDRLKKEQEEAEAIAAAAAEYTSIRRSRIMGLSESSSETSKLSSKSAKERRNRRKKKNQKKLSSGEEKGDAEKLSKSESEDSIRRKSFHLGVEGHRRAHEKRLSTPNQSPLSIRGSLFSARRSSRTSLFSFKGRGRDIGSETEFADDEHSIFGDNESRRGSLFVPHRPQERRSSNISQASRSPPMLPVNGKMHSAVDCNGVVSLVDGRSALMLPNGQLLPEVIIDKATSDDSGTTNQIHKKRRCSSYLLSEDMLNDPNLRQRAMSRASILTNTVEELEESRQKCPPWWYRFAHKFLIWNCSPYWIKFKKCIYFIVMDPFVDLAITICIVLNTLFMAMEHHPMTEEFKNVLAIGNLVFTGIFAAEMVLKLIAMDPYEYFQVGWNIFDSLIVTLSLVELFLADVEGLSVLRSFRLLRVFKLAKSWPTLNMLIKIIGNSVGALGNLTLVLAIIVFIFAVVGMQLFGKSYKECVCKINDDCTLPRWHMNDFFHSFLIVFRVLCGEWIETMWDCMEVAGQAMCLIVYMMVMVIGNLVVLNLFLALLLSSFSSDNLTAIEEDPDANNLQIAVTRIKKGINYVKQTLREFILKAFSKKPKISREIRQAEDLNTKKENYISNHTLAEMSKGHNFLKEKDKISGFGSSVDKHLMEDSDGQSFIHNPSLTVTVPIAPGESDLENMNAEELSSDSDSEYSKVRLNRSSSSECSTVDNPLPGEGEEAEAEPMNSDEPEACFTDGCVWRFSCCQVNIESGKGKIWWNIRKTCYKIVEHSWFESFIVLMILLSSGALAFEDIYIERKKTIKIILEYADKIFTYIFILEMLLKWIAYGYKTYFTNAWCWLDFLIVDVSLVTLVANTLGYSDLGPIKSLRTLRALRPLRALSRFEGMRVVVNALIGAIPSIMNVLLVCLIFWLIFSIMGVNLFAGKFYECINTTDGSRFPASQVPNRSECFALMNVSQNVRWKNLKVNFDNVGLGYLSLLQVATFKGWTIIMYAAVDSVNVDKQPKYEYSLYMYIYFVVFIIFGSFFTLNLFIGVIIDNFNQQKKKLGGQDIFMTEEQKKYYNAMKKLGSKKPQKPIPRPGNKIQGCIFDLVTNQAFDISIMVLICLNMVTMMVEKEGQSQHMTEVLYWINVVFIILFTGECVLKLISLRHYYFTVGWNIFDFVVVIISIVGMFLADLIETYFVSPTLFRVIRLARIGRILRLVKGAKGIRTLLFALMMSLPALFNIGLLLFLVMFIYAIFGMSNFAYVKKEDGINDMFNFETFGNSMICLFQITTSAGWDGLLAPILNSKPPDCDPKKVHPGSSVEGDCGNPSVGIFYFVSYIIISFLVVVNMYIAVILENFSVATEESTEPLSEDDFEMFYEVWEKFDPDATQFIEFSKLSDFAAALDPPLLIAKPNKVQLIAMDLPMVSGDRIHCLDILFAFTKRVLGESGEMDSLRSQMEERFMSANPSKVSYEPITTTLKRKQEDVSATVIQRAYRRYRLRQNVKNISSIYIKDGDRDDDLLNKKDMAFDNVNENSSPEKTDATSSTTSPPSYDSVTKPDKEKYEQDRTEKEDKGKDSKESKK

SEQ ID NO: 300519 - protein, 539 aa, Artificial Sequence
  derived and/or modified sequence
ILTNCIFMTMNNPPDWTKNVEYTFTGIYTFESLVKILARGFCVGEFTFLRDPWNWLDFVVIVFAYVTEFVDLGNVSALRTFRVLRALKTISVIPGLKTIVGALIQSVKKLSDVMILTVFCLSVFALIGLQLFMGNLKHKCFRNSLENNETLESIMNTLESEEDFRKYFYYLEGSKDALLCGFSTDSGQCPEGYTCVKIGRNPDYGYTSFDTFSWAFLALFRLMTQDYWENLYQQTLRAAGKTYMIFFVVVIFLGSFYLINLILAVVAMAYEEQNQANIEEAKQKELEFQQMLDRLKKEQEEAEAIAAAAAEYTSIRRSRIMGLSESSSETSKLSSKSAKERRNRRKKKNQKKLSSGEEKGDAEKLSKSESEDSIRRKSFHLGVEGHRRAHEKRLSTPNQSPLSIRGSLFSARRSSRTSLFSFKGRGRDIGSETEFADDEHSIFGDNESRRGSLFVPHRPQERRSSNISQASRSPPMLPVNGKMHSAVDCNGVVSLVDGRSALMLPNGQLLPEVIIDKATSDDSGTTNQIHKKRRCSSYL

SEQ ID NO: 300520 - DNA, 5970 bp, Artificial Sequence
  derived and/or modified sequence
atggccatgttaccaccgcctggtcctcagtcttttgtgcacttcactaaacagtcccttgctctcattgaacagcggatcgcagagcgcaagagcaaagaaccaaaagaagaaaagaaagatgacgatgaggaagctccaaaaccctccagcgacctggaggctggaaagcagctccccttcatctacggcgatattccaccggggatggtttctgagccccttgaggacttggatccttattatgccgataaaaagactttcattgtgttgaacaagggtaagactatcttccggttcaacgccacacccgccctctacatgctgagcccattttcccctctccggaggatttctattaagatcctggtgcactccacgttgttttcaatgctgattatgtgcacaattctgacgaactgtatcttcatgaccatgaacaaccccccggattggacaaagaatgtggaatacacgttcacagggatctatacgttcgagagcctggtaaagattctggcccgggggttttgtgtgggagagttcacgtttctgcgagatccttggaattggctggacttcgtggtgatcgtctttgcttatgtcacagaattcgttgacctcgggaacgtgagcgctcttagaacatttagagtcctgagggctctcaaaacgatatcagtgattccggggctgaagactatagttggggccttgatccagtctgtcaaaaaactgagcgatgtcatgatcctgactgtgttttgcctcagtgtcttcgccctcatcggcttgcaattgttcatgggaaacctcaagcataagtgctttagaaattcccttgagaataatgagacactagagtcaattatgaatactttggaaagcgaggaggactttaggaaatacttttattatctagagggctctaaggacgccttactgtgcggcttcagcactgattccggccagtgccccgaggggtacacttgcgtgaaaatcggacggaatcctgattatggatacactagctttgacacattttcttgggcatttctggctctctttcggcttatgacccaggactattgggaaaatctttaccagcaaaccttacgggccgccggtaaaacttacatgatcttctttgtcgtggtgattttcctggggtcattctatctgatcaatttaatccttgcggtcgtggcgatggcctatgaggaacagaatcaggcaaacattgaggaagctaagcagaaggagctggagttccagcagatgctggaccgcttaaaaaaggagcaggaggaggccgaggcaatcgccgctgctgccgctgagtatacctctatcagacggagtaggatcatgggcctgagcgaatcttccagcgagaccagcaagctgtcgtcaaagtctgccaaagaaagaagaaacaggcgaaaaaagaaaaaccaaaaaaagctaagttctggagaagaaaagggagacgcggagaaactatcaaagtcggaatcagaagacagcattcgtaggaaaagctttcacctcggggtggaggggcacaggcgagcacacgaaaagaggctgtctacgcctaaccagtcccctttatccatccgcggaagcctattttccgccaggcgcagctcgcgaaccagtctgttctcgtttaaaggcagaggtcgcgacatcgggagtgaaaccgagtttgccgacgatgaacattccatcttcggcgacaacgaatcacggaggggctccctgtttgtgccgcaccgccctcaggagcgacgttccagtaacatttcacaggcgagtcgatcccctcctatgttgcccgttaacggcaagatgcacagcgctgtcgattgcaacggagtggtaagcctggtcgacggaagatctgccctcatgctgcccaatgggcaactcttaccagaagtcatcattgacaaggcaaccagtgatgacagcgggactaccaaccagattcataaaaagagaagatgtagctcgtaccttcttagcgaagatatgcttaatgaccccaatctgaggcagagggctatgagccgggcttcgattctgactaatactgtcgaggagctggaagagtccaggcaaaagtgtcctccttggtggtatcgattcgcacacaagtttctgatctggaactgctcaccttactggatcaagttcaagaaatgtatctatttcatcgtcatggatccatttgtcgatctggccatcacgatctgtatcgtgttgaacactctctttatggccatggagcatcatcctatgaccgaggagttcaaaaatgtgctagccatcggtaacctggtcttcacgggtatctttgccgctgaaatggtactcaagttgatagcgatggacccttatgagtatttccaggttggctggaatattttcgatagtttgatcgtgactctttcacttgtggagttgttcctggcagacgtcgaaggtctaagcgtgctgaggtctttccgcttgttgagagtgtttaagcttgcgaagagctggcctactctgaatatgctgatcaagatcatcggaaacagcgtgggggcgcttggaaatctcaccctcgtcctggccatcatcgtttttattttcgcggtggtcggtatgcaactgtttggaaagtcttataaagagtgtgtgtgcaaaatcaatgacgattgcacgcttccacggtggcacatgaacgatttttttcactccttcctcattgtgtttcgggtgttgtgcggggagtggatagaaacaatgtgggattgtatggaggtcgcaggacaggcaatgtgcctgattgtgtacatgatggtgatggtgataggtaatctggtggtactgaatcttttcttggctctgctgttgtctagcttttcatccgacaacctgactgcaatcgaggaggaccctgacgcgaataacttacaaatcgccgtgaccaggatcaaaaaggggatcaactatgtgaagcaaactttacgggagttcatccttaaggcttttagcaagaagccaaaaatatctagagagatccgacaggcggaagatctaaatactaagaaggagaattacatttctaatcacaccctcgctgaaatgtcaaaaggccacaactttcttaaggagaaggataaaattagtggcttcgggtcttcagtggataaacacctcatggaggactctgacggacagtcctttatccataacccatccctgaccgtcactgtgccgatagccccaggcgagtctgaccttgagaatatgaacgctgaagagctgagctcagattctgactctgagtattctaaggtaagactgaatcgctccagcagttctgagtgtagtacagtcgacaacccattgcctggagaaggggaagaagctgaggctgaacccatgaactccgacgagccggaggcttgcttcaccgatggttgcgtgtggagattttcttgctgccaggtgaacattgaatcaggtaagggcaaaatctggtggaatatcagaaagacctgctataaaatcgtggaacacagttggtttgagtcattcattgtactgatgatcctcctgagttcaggtgcacttgctttcgaggatatctacattgagcgaaagaaaactattaagatcatcttggagtacgcagataagatttttacctacatttttattctggagatgctgcttaagtggatagcctatggctataagacgtatttcacaaacgcctggtgctggttagatttcctgatagtagatgtttcattagtgactctggtggctaatacgttagggtattccgacctggggccaatcaagtcactgcgcactcttagggctctccggcccctcagagccttgtctcggttcgagggaatgagggttgtggttaatgccctgatcggtgccatcccaagcattatgaacgtgctgctggtgtgcttgatcttctggctcatattcagtataatgggggtgaacttattcgctggcaaattctacgaatgcatcaacactacggacggctctaggtttccagctagtcaagtacctaatcggtcagagtgtttcgcccttatgaacgtgtctcagaatgtacgatggaaaaacctcaaagtcaactttgacaacgtcggattgggctacttatcgctactccaggtcgccacctttaagggatggacaattataatgtatgcagcggtggactcggtgaatgtagacaaacagccaaaatacgagtattccttgtatatgtacatttactttgtggtcttcataatctttggctccttttttaccttaaatcttttcattggcgtgatcatcgacaattttaaccagcagaagaagaaactgggggggcaagacatatttatgactgaagaacagaaaaagtactataacgccatgaagaaactgggctcaaagaaacctcaaaaacctatccctagacccggcaataagattcaagggtgcatcttcgatctggtaacaaaccaggccttcgatatctcaatcatggtccttatctgtctaaatatggtgactatgatggtggagaaagagggacagtcacagcacatgacagaggtgctgtattggattaacgtggtctttatcatattatttacaggggagtgcgtcctcaagcttatttcattgcgtcactactacttcacagtaggctggaacatctttgactttgtcgtggtgattatctccattgtcgggatgtttctggccgatctgatcgagacctattttgtgtccccaactttatttagagttattcggctagcccgtataggtcgcattcttcgacttgtgaagggcgctaaaggaattagaactcttttatttgcccttatgatgtctctccccgcactgtttaatatcggcttattgctgtttctggtgatgttcatctatgcaattttcggaatgtcgaattttgcatatgtcaagaaggaagacggtatcaacgatatgtttaatttcgagacttttgggaattctatgatctgtctcttccaaataacaacctcagctggctgggatgggcttctggccccaatacttaactcgaagccgccagattgcgaccctaaaaaggtgcatccaggttcctctgtggaaggggactgtggcaacccttcagttgggatcttttacttcgtctcctacattataattagcttcctagttgtagttaatatgtacatcgccgtgattttggagaatttcagcgtggccactgaagagtccaccgagcccctttcagaggatgattttgagatgttctatgaggtttgggagaaatttgaccccgacgctactcagtttatagagttctcaaaattatccgattttgctgcggcgctggaccctccgctgctgatcgctaagcctaacaaagtacagctaattgctatggacctcccaatggtgagtggagacagaatccattgccttgacatcctatttgcctttaccaagcgggtgctcggggaaagcggagaaatggacagcctccggagtcagatggaggaaagattcatgtccgctaacccttcaaaggtttcttacgagcccattacaaccacgttgaaacgcaaacaagaggacgtaagcgctactgtgatccaaagggcctataggagatataggctgagacagaatgtgaagaatattagctcaatctacatcaaggatggagacagagatgacgacctcctcaacaaaaaagacatggcattcgacaacgtgaacgagaactccagccccgaaaagaccgatgctacctcttccaccacatccccacccagctacgatagtgttacgaaacccgacaaagagaagtacgagcaggatagaacggaaaaagaagacaaggggaaggactccaaagagtcgaaaaaatag

SEQ ID NO: 300521 - DNA, 1620 bp, Artificial Sequence
  derived and/or modified sequence
atcctaacgaattgcattttcatgacaatgaacaaccccccggactggaccaaaaacgtagagtacacttttaccgggatatacacgtttgagtccctggtgaaaatcctggcacgcgggttctgcgtgggggagttcactttcttaagagatccttggaactggctcgactttgtggtcatcgtcttcgcatacgtgacagaatttgtcgacctcggcaacgtctccgcgctgcgcacattcagggtattacgggctctgaagactattagtgtcatccccggcttgaaaaccatcgtgggtgcgctgatacagtctgtcaagaagttatccgacgtaatgatactgacagtgttttgcctctccgtttttgcccttatagggctacagcttttcatgggtaacctgaagcacaaatgtttcagaaacagcctagagaacaatgaaacactggagtcaatcatgaacaccctggagagtgaagaggatttccgaaaatacttctactacttggaggggtccaaagatgctctcttgtgcgggtttagcaccgattcgggtcaatgccccgaaggctacacttgcgtcaaaattggccgtaatccggactacggctacacatcctttgatacattttcctgggcgttcctcgccttattccgtctaatgactcaggactactgggaaaacctatatcaacaaaccctgagggccgccggcaaaacttacatgatcttctttgtggtcgtgattttcttggggtccttctatctgattaatctgattctggcagtggttgcaatggcatacgaagagcagaaccaggccaacatagaagaggccaagcagaaggagttggagttccaacagatgttagatagactgaagaaagagcaagaggaagctgaggcgattgctgcggctgctgccgagtacacttctattagaaggtcaagaattatgggactttcagagtcatccagcgaaacgagcaagctctcaagcaaatccgctaaagagaggcgtaatcggaggaagaaaaagaaccagaaaaagctctcttccggtgaagagaagggcgacgccgaaaagctttcaaaatccgaatccgaggatagcatcaggcgaaaaagcttccacctgggcgtagaagggcatcgaagagctcatgagaagcgactctccactcctaatcagtctcctctcagtatacgtggttcacttttttctgccagacgtagctctcggacatctcttttctccttcaaggggcgcggaagggatatcgggtccgaaacagagtttgcggacgacgaacactctatctttggggacaatgaatcgcgccggggctcgctcttcgtcccacatagaccacaggagcgcaggagttcaaacatcagccaagccagcagaagtcctcctatgctccctgttaatggaaagatgcatagcgccgtcgactgcaacggggtcgtctcgttggtcgacgggcgttctgcactgatgctgccaaacggccaactccttcccgaagtgattattgataaagccaccagtgacgatagcggcaccaccaaccagattcataagaaaagaagatgtagctcctatctgtag

SEQ ID NO: 300522 - DNA, 5970 bp, Artificial Sequence
  derived and/or modified sequence
atggccatgctgcccccacctggcccccagagctttgtgcacttcaccaagcagagcctggccctgattgagcagagaattgctgagaggaagagcaaggagcccaaggaggagaagaaggatgatgatgaggaggcccccaagcccagcagtgacctggaggccggcaagcagctgcccttcatctatggagacatccccccaggcatggtgtctgagcccctggaggacctggacccctactatgctgacaagaagaccttcatcgtgctgaacaagggcaagaccatcttccgcttcaatgccaccccagccctgtacatgctgagccccttcagccccctgcggcgcatcagcatcaagatcctggtgcacagcaccctcttctccatgctgatcatgtgcaccatcctgaccaactgcatcttcatgaccatgaacaaccccccagactggaccaagaatgtggagtacaccttcaccggcatctacacctttgagagcctggtgaagatcctggcccggggcttctgtgtgggggagttcaccttcctgcgggacccctggaactggctggactttgtggtgattgtgtttgcctacgtgacagaatttgtggacctgggcaatgtgtctgccctgcggaccttccgggtgctgcgggccctgaagaccatcagcgtcatccctggcctgaagaccatcgtgggcgccctgatccagagcgtgaagaagctgagtgatgtgatgatcctgactgtgttctgcctgtctgtgtttgccctgattggcctgcagctgttcatgggcaacctgaagcacaagtgcttcaggaacagcctggagaacaatgagaccctggagagcatcatgaacaccctggagagcgaggaggacttcaggaagtacttctactacctggagggcagcaaggatgccctgctgtgtggcttcagcacagacagcggccagtgcccagagggctacacctgtgtgaagattggaagaaatccagactatggctacaccagctttgacaccttctcctgggccttcctggccctcttccggctgatgacccaggactactgggagaacctgtaccagcagaccctgcgggctgctgggaagacctacatgatcttctttgtggtggtgatcttcctgggcagcttctacctgatcaacctgatcctggccgtggtggccatggcctatgaggagcagaaccaggccaacatcgaggaggccaagcagaaggagctggagttccagcagatgctggaccggctgaagaaggagcaggaggaggccgaggccatcgctgctgctgctgctgagtacaccagcatccgccgcagccgcatcatgggcctgtctgagagcagcagcgagaccagcaagctgagcagcaagagcgccaaggagaggaggaacagaaggaagaagaagaaccagaagaagctgagcagtggagaggagaagggagatgctgagaagctgagcaagtctgagagtgaagattccatccggaggaagagcttccacctgggcgtggagggccacagaagagcccacgagaagaggctgagcacccccaaccagagccccctgagcatccggggcagcctcttcagcgcccggcgcagcagcaggaccagcctcttctccttcaagggccggggccgggacatcggcagcgagacagaatttgctgatgatgagcacagcatctttggagacaatgaaagcagaagaggcagcctgtttgtgccccaccggccccaggagcggcgcagcagcaacatcagccaggccagccgcagcccccccatgctgcctgtgaatggcaagatgcacagcgctgtggactgcaatggagtggtgtccctggtggatggccgcagcgccctgatgctgcccaacggccagctgctgcctgaggtgatcatcgacaaggccaccagtgatgattctggcaccaccaaccagatccacaagaagaggcgctgcagcagctacctgctgtctgaggacatgctgaatgaccccaacctgcggcagagggccatgagccgggccagcatcctgaccaacacagtggaggagctggaggagagccggcagaagtgccccccctggtggtacagatttgcccacaagttcctgatctggaactgcagcccctactggatcaagttcaagaagtgcatctacttcatcgtgatggacccctttgtggacctggccatcaccatctgcatcgtgctgaacaccctcttcatggccatggagcaccaccccatgacagaggagttcaagaatgtgctggccatcggcaacctggtgttcaccggcatctttgctgctgagatggtgctgaagctgattgccatggacccctatgagtacttccaggtgggctggaacatctttgacagcctcatcgtgaccctgagcctggtggagctgttcctggctgatgtggagggcctgtctgtgctgcgctccttccggctgctgcgggtcttcaagctggccaagtcctggcccaccctgaacatgctgatcaagatcatcggcaacagcgtgggcgccctgggcaacctgaccctggtgctggccatcatcgtgttcatctttgctgtggtgggcatgcagctgtttgggaagagctacaaggaatgtgtgtgcaagatcaatgatgactgcaccctgccccgctggcacatgaatgacttcttccacagcttcctgattgtgttccgggtgctgtgtggggagtggattgagaccatgtgggactgcatggaggtggccggccaggccatgtgcctgattgtgtacatgatggtgatggtgattggcaacctggtggtgctgaacctcttcctggccctgctgctgagcagcttcagcagtgacaacctgacagccatcgaggaggaccctgatgccaacaacctgcagattgctgtgacccgcatcaagaagggcatcaactacgtgaagcagaccctgcgggagttcatcctgaaggccttcagcaagaagcccaagatcagccgggagatccggcaggccgaggacctgaacaccaagaaggagaactacatcagcaaccacaccctggccgagatgagcaagggccacaacttcctgaaggagaaggacaagatcagcggcttcggcagctctgtggacaagcacctgatggaggacagtgatggccagagcttcatccacaaccccagcctgactgtgacagtgcccatcgcccctggagagagtgacctggagaacatgaatgctgaggagctgagcagtgacagcgacagcgagtacagcaaggtgcggctgaacagaagcagcagcagtgaatgttccacagtggacaaccccctgcccggggagggggaggaggccgaggccgagcccatgaacagtgatgagcctgaggcctgcttcacagatggctgtgtgtggaggttcagctgctgccaggtgaacattgaaagtggcaagggcaagatctggtggaacatcaggaagacctgctacaagatcgtggagcacagctggtttgagagcttcatcgtgctgatgatcctgctgagcagcggggccctggcctttgaggacatctacattgaaaggaagaagaccatcaagatcatcctggagtatgctgacaagatcttcacctacatcttcatcctggagatgctgctgaagtggatcgcctacggctacaagacctacttcaccaatgcctggtgctggctggacttcctgattgtggatgtgtccctggtgaccctggtggccaacaccctgggctacagcgacctgggccccatcaagagcctgcggaccctgcgggccctgcggcccctgcgggccctgagcagatttgagggcatgagggtggtggtgaatgccctgattggagccatccccagcatcatgaatgtgctgctggtgtgcctgatcttctggctgatcttcagcatcatgggcgtgaacctgtttgctgggaagttctatgagtgcatcaacaccacagatggcagccgcttccctgccagccaggtgcccaacagaagtgagtgctttgccctgatgaatgtgtcccagaatgtgcgctggaagaacctgaaggtgaactttgacaacgtgggcctgggctacctgagcctgctgcaggtggccaccttcaagggctggaccatcatcatgtatgctgctgtggacagcgtgaatgtggacaagcagcccaagtatgagtacagcctgtacatgtacatctactttgtggtgttcatcatcttcggcagcttcttcaccctgaacctcttcatcggggtcatcatcgacaacttcaaccagcagaagaagaagctgggcggccaggacatcttcatgacagaggagcagaagaagtactacaatgccatgaagaagctgggcagcaagaagccccagaagcccatccccaggcctggcaacaagatccagggctgcatctttgacctggtgaccaaccaggcctttgacatcagcatcatggtgctgatctgcctgaacatggtgaccatgatggtggagaaggagggccagagccagcacatgacagaggtgctgtactggatcaacgtggtgttcatcatcctcttcaccggggagtgtgtgctgaagctgatcagcctgcggcactactacttcaccgtgggctggaacatctttgattttgtggtggtgatcatcagcatcgtgggcatgttcctggccgacctgattgagacctactttgtgagccccaccctcttccgggtcatccggctggcccgcatcggccgcatcctgcggctggtgaagggggccaagggcatccgcaccctgctgtttgccctgatgatgagcctgcctgccctcttcaacatcggcctgctgctcttcctggtgatgttcatctatgccatcttcggcatgagcaactttgcctacgtgaagaaggaggatggcatcaatgacatgttcaactttgagacctttggaaacagcatgatctgcctcttccagatcaccaccagcgctggctgggatggcctgctggcccccatcctgaacagcaagcccccagactgtgaccccaagaaggtgcaccctggcagctctgtggagggggactgtggcaaccccagcgtgggcatcttctactttgtgtcctacatcatcatctccttcctggtggtggtgaacatgtacatcgccgtcatcctggagaacttctctgtggccacagaggagagcacagagcccctgtctgaagatgactttgagatgttttatgaggtgtgggagaagtttgatcctgatgccacccagttcatcgagttcagcaagctgagtgactttgctgctgccctggacccccccctgctgattgccaagcccaacaaggtgcagctgattgccatggacctgcccatggtgtctggggaccgcatccactgcctggacatcctgtttgccttcaccaagagggtgctgggggagagcggggagatggacagcctgcggagccagatggaggagcgcttcatgtctgccaaccccagcaaggtgtcctatgagcccatcaccaccaccctgaagaggaagcaggaggatgtgtctgccaccgtcatccagagggcctaccgccgctaccgcctgcggcagaatgtgaagaacatcagcagcatctacatcaaggatggagacagagatgatgacctgctgaacaagaaggacatggcctttgacaacgtgaatgaaaacagcagccctgagaagacagatgccaccagcagcaccaccagcccccccagctatgattctgtgaccaagccagacaaggagaagtatgagcaggacagaacagagaaggaggacaagggcaaggacagcaaggagagcaagaagtag

SEQ ID NO: 300523 - DNA, 1620 bp, Artificial Sequence
  derived and/or modified sequence
atcctgaccaactgcatcttcatgaccatgaacaaccccccagactggaccaagaatgtggagtacaccttcaccggcatctacacctttgagagcctggtgaagatcctggcccggggcttctgtgtgggggagttcaccttcctgcgggacccctggaactggctggactttgtggtgattgtgtttgcctacgtgacagaatttgtggacctgggcaatgtgtctgccctgcggaccttccgggtgctgcgggccctgaagaccatcagcgtcatccctggcctgaagaccatcgtgggcgccctgatccagagcgtgaagaagctgagtgatgtgatgatcctgactgtgttctgcctgtctgtgtttgccctgattggcctgcagctgttcatgggcaacctgaagcacaagtgcttcaggaacagcctggagaacaatgagaccctggagagcatcatgaacaccctggagagcgaggaggacttcaggaagtacttctactacctggagggcagcaaggatgccctgctgtgtggcttcagcacagacagcggccagtgcccagagggctacacctgtgtgaagattggaagaaatccagactatggctacaccagctttgacaccttctcctgggccttcctggccctcttccggctgatgacccaggactactgggagaacctgtaccagcagaccctgcgggctgctgggaagacctacatgatcttctttgtggtggtgatcttcctgggcagcttctacctgatcaacctgatcctggccgtggtggccatggcctatgaggagcagaaccaggccaacatcgaggaggccaagcagaaggagctggagttccagcagatgctggaccggctgaagaaggagcaggaggaggccgaggccatcgctgctgctgctgctgagtacaccagcatccgccgcagccgcatcatgggcctgtctgagagcagcagcgagaccagcaagctgagcagcaagagcgccaaggagaggaggaacagaaggaagaagaagaaccagaagaagctgagcagtggagaggagaagggagatgctgagaagctgagcaagtctgagagtgaagattccatccggaggaagagcttccacctgggcgtggagggccacagaagagcccacgagaagaggctgagcacccccaaccagagccccctgagcatccggggcagcctcttcagcgcccggcgcagcagcaggaccagcctcttctccttcaagggccggggccgggacatcggcagcgagacagaatttgctgatgatgagcacagcatctttggagacaatgaaagcagaagaggcagcctgtttgtgccccaccggccccaggagcggcgcagcagcaacatcagccaggccagccgcagcccccccatgctgcctgtgaatggcaagatgcacagcgctgtggactgcaatggagtggtgtccctggtggatggccgcagcgccctgatgctgcccaacggccagctgctgcctgaggtgatcatcgacaaggccaccagtgatgattctggcaccaccaaccagatccacaagaagaggcgctgcagcagctacctgtag

SEQ ID NO: 300524 - DNA, 5970 bp, Artificial Sequence
  derived and/or modified sequence
atggccatgctgcccccccccggcccccagagcttcgtgcacttcactaagcagagcttggcactgatcgagcaaagaatagccgaacgtaagagtaaggaaccaaaagaggagaaaaaggacgacgacgaggaagctcctaaacctagctctgacctagaagcaggtaagcagctcccgtttatttacggcgatatcccaccaggcatggtgtcagagcccctcgaggatctggatccatactacgcagacaagaaaaccttcatagtgctgaacaaaggcaaaacgatatttaggttcaacgcaactcctgctctctacatgttgtccccattctctcccctgcgccggatatccatcaagatcctggttcattccacactgttcagcatgttaataatgtgcaccatcttgaccaattgtatcttcatgaccatgaacaaccccccagactggacgaaaaatgtggaatatacgtttaccggaatatacacgttcgagtctctggtgaagattctcgcccggggattctgtgtgggcgaattcacttttctgcgggatccttggaactggttggactttgttgtgatagtattcgcatatgtgacagagtttgtggatctgggtaatgtgagcgccctacgaaccttcagagttctccgggctctgaaaaccatctccgtcattccaggcctgaagactatcgtcggagccctgatccaatcggtaaagaagctatctgacgtgatgatactcaccgtgttctgcctcagcgtgtttgcactgattggccttcagttgtttatgggaaacctaaagcacaaatgttttcgtaacagcttggagaataatgaaaccctggagagcataatgaacacactggagtcagaggaagattttagaaagtatttctactacctcgaaggatctaaagatgcgctcttgtgcggtttctccacggacagcggccagtgtccagaaggatacacctgcgtgaaaatcggacgcaaccccgattatggatataccagctttgatactttcagctgggcctttttggcactttttaggctcatgacgcaggactactgggagaacctctatcaacagaccctccgcgcagcaggcaagacatatatgatcttttttgtggtggtgatctttctggggagtttctatctcatcaacctgattctcgctgttgtggccatggcatatgaggaacagaaccaggccaatattgaggaagccaaacagaaggaactagaatttcaacagatgctggaccgactcaaaaaagagcaagaagaagccgaggcaatcgctgccgccgctgcagaatacaccagtatccgcagatcccggattatgggactctcggaatcttcttccgaaacatccaagttatcttcgaaatcagcgaaagagaggcggaatcgacgaaagaagaagaatcagaagaaactctccagcggcgaggagaaaggcgatgccgaaaagctctctaagtctgaaagcgaagattccatacggagaaaatctttccatctgggagttgagggacacagacgcgcccatgagaaaagactaagcaccccaaaccaatctccactgtcaattcggggttccctgtttagcgcaaggcgttctagccgcacctccctcttttcattcaaaggaagagggagggatattggttcagagaccgaattcgcagatgacgaacattccatttttggcgacaatgagtctcgccggggttctctatttgttcctcacaggcctcaggaacgccggagcagcaacatctcccaagcgtcgcggtctccgcctatgctcccggtgaatggaaaaatgcactccgccgtggactgtaatggcgtcgtgtcattagtagacggcagaagcgctttgatgctcccaaatggtcagcttctgccggaggtaatcatcgacaaagccactagcgatgatagtggcaccaccaaccagatccacaagaagcgacggtgctcttcatacctgctgtctgaagatatgttgaatgaccccaaccttaggcagcgagcaatgtcccgggcttcgatcctcacgaatactgtcgaggaactggaggagtccagacaaaaatgccccccttggtggtaccgcttcgcgcacaaattcctcatctggaactgctcaccatactggataaaattcaagaagtgtatctactttatcgtgatggaccccttcgtggacctggctattactatatgcattgtactcaacacccttttcatggctatggagcaccaccccatgactgaggaatttaaaaatgtcttggctatcgggaaccttgtgtttaccggcatcttcgccgcggagatggtcctgaaactcatcgctatggacccatacgaatactttcaggtcggttggaacatattcgatagcctcatcgtcactttgtccctcgtagaattgtttttggcagatgtcgaaggcctgtccgtactgagatccttccgcctgctgagagtgttcaaactggccaaatcctggcctacattgaacatgctcatcaagatcataggcaattctgttggggcactagggaacctgacgctggttctggccatcatcgtattcattttcgcagtggtgggtatgcagttgttcggtaagtcatacaaggaatgtgtctgtaagatcaacgacgattgcaccctgcctcgttggcatatgaacgacttcttccattccttcttgatcgtgtttcgtgtgctgtgtggtgaatggattgagactatgtgggactgcatggaagtggctggtcaggccatgtgcctaatagtgtatatgatggtgatggttataggaaaccttgtcgttctgaatcttttcctcgcccttcttttaagcagcttctcctcagacaatctgaccgctattgaggaagaccctgacgccaataatctgcaaattgcagtgaccaggattaagaaaggtattaattacgttaaacagactctgagagagtttatccttaaggctttcagtaaaaagcccaagatttctagggaaattaggcaggccgaggatctcaatacgaaaaaagagaactacatctcaaatcatacgctagctgaaatgtccaaagggcacaactttcttaaagagaaggataagatttctggctttggtagttcagttgacaagcacctcatggaagactctgatggccagagcttcatacacaacccctcacttaccgtgacagtcccaatcgcccctggggaaagcgacctcgagaacatgaatgcagaggagttgagctccgatagcgacagcgaatacagcaaggtccgattgaatagaagctcttcatctgagtgcagcaccgtggacaaccccttgcctggtgagggcgaggaggcagaagcggaaccaatgaattctgacgagccggaggcttgttttaccgacggatgcgtttggcgcttttcatgctgtcaagtgaacatcgagtctgggaaaggtaaaatatggtggaatattagaaaaacttgttataagattgtagaacactcttggttcgaatctttcattgttctcatgatcctgctctcctctggcgcactggccttcgaagacatctacatagaacgaaagaagacaatcaagatcattctggagtacgcagataaaatttttacctatatctttattttggaaatgctcttgaaatggattgcctacgggtataaaacctacttcactaacgcatggtgctggttggattttctgatagtggatgtttccctagttaccctggtcgctaataccttgggctattctgatctgggaccaatcaagtctctgcgaaccctccgcgctctgagaccactgcgcgcccttagtaggttcgaggggatgagggtagtcgtgaatgcgctaattggcgcaatcccctctattatgaacgtcttgttggtatgcctgattttctggttaatattctctatcatgggcgtcaatttgtttgctggaaagttctacgagtgtattaatactaccgatggcagcagattccctgcgtctcaagtcccgaatcgctccgaatgttttgctttaatgaatgtgtctcagaacgttaggtggaaaaatctgaaggtcaactttgataacgtcggactgggctacctttccctcctgcaagtcgccactttcaaagggtggaccattatcatgtacgctgccgtggacagcgtgaacgttgacaaacagccaaaatacgagtatagcctgtatatgtatatctacttcgtggtctttatcattttcggcagtttctttactttgaacctatttatcggagtgatcattgataatttcaaccagcagaaaaagaaactgggcggtcaggatatatttatgacagaagaacagaagaagtactacaacgcgatgaagaagttggggagcaagaagcctcagaagccaattccccgaccaggcaataagatccagggatgcattttcgacctcgtgacgaatcaagcttttgacatctcaatcatggtgctcatctgtcttaacatggtgactatgatggttgaaaaagagggacagagtcagcatatgaccgaagttctctactggattaacgtcgttttcatcattctattcactggcgagtgtgttctgaaacttatcagcttgcgacattactatttcacagtgggttggaacatttttgatttcgtcgtggtgattatttcgattgtgggcatgtttttggccgacctaatcgaaacttacttcgtgagcccgaccctgtttcgcgtgatcaggttggcccgaattgggcgcattttacggctcgttaaaggcgccaagggtatcagaacattactcttcgctctgatgatgtcactgcccgccctgttcaacatcgggctgctactgttcctcgttatgtttatctatgctatcttcggcatgagcaatttcgcatacgttaaaaaagaagatggcataaatgacatgttcaactttgaaacttttgggaatagcatgatatgcttgtttcagatcaccactagcgctggctgggacgggctgcttgcccccatcttgaacagcaaaccgccagattgcgaccccaagaaggtgcatccagggtctagtgttgagggtgactgcggaaacccaagcgtgggaattttctacttcgtgagctatattattatttcttttctagtggtcgttaatatgtatatcgcagtcatcttggaaaacttcagtgtggcaactgaggaatctacagagcctctatcagaagacgattttgaaatgttttacgaagtgtgggaaaagtttgaccctgacgcgacacaattcatagaattttccaaacttagcgattttgcagctgccctcgaccctccacttctgatagctaaacccaacaaagtgcagttaatcgccatggatctacctatggtcagcggagatcgcattcattgcttagatatcctgtttgccttcaccaaacgcgtgctgggggagtccggcgagatggatagcttgcgcagccagatggaggagcgctttatgtccgcaaatccatcaaaggtatcttatgagcccatcaccaccacgttgaaaagaaagcaggaggatgtgtcagccacggtgattcagcgcgcttatagacggtaccgactacgccaaaacgtgaagaatatatccagcatctacatcaaggacggcgaccgcgatgatgatttgctgaacaaaaaggatatggccttcgacaatgtaaacgaaaattcttcacccgaaaagacagatgccactagctctactacgtcccctccttcctacgacagcgtgaccaaacccgataaagagaagtatgaacaagacagaaccgaaaaggaggacaaaggtaaagactccaaggaaagcaagaagtag

SEQ ID NO: 300525 - DNA, 1620 bp, Artificial Sequence
  derived and/or modified sequence
atcctgaccaactgcatcttcatgaccatgaacaacccccccgactggaccaaaaacgtggagtacacattcacaggcatctacacatttgagtccctcgtgaaaattctcgcacgcggcttttgtgtaggcgagttcaccttcctacgggacccctggaattggctcgactttgtggttatagtgtttgcctatgtgactgaatttgtggaccttggtaatgtatccgcgctccgcaccttccgcgtgctgcgggcactaaaaactatcagtgttattcctggcctaaagacaatcgtcggagcccttatccagtctgtgaaaaaattgtctgatgtgatgatcctgaccgtcttttgtctgtcagtgtttgcattgattgggctccagctttttatgggtaacctgaaacataagtgctttcgcaacagcctggagaacaacgagactcttgagtccattatgaataccctagaatctgaggaggactttaggaagtacttctattatctggagggctccaaggacgctcttttgtgtgggttcagtaccgattcaggacaatgccccgaaggatatacttgcgttaagataggccgaaatcctgattatggctataccagtttcgatacatttagctgggccttcctggccttatttcggttaatgacccaggactactgggaaaacctgtaccagcagacccttcgggccgccggcaaaacatacatgatatttttcgtcgtcgtcatcttcctgggttctttttatctaatcaatcttatactagccgtcgttgccatggcatacgaggaacagaatcaagctaatatcgaagaggctaagcaaaaggaactggaattccaacagatgctggacagactgaaaaaggagcaagaagaagctgaagccattgcggcggcagcagctgagtacacatcaattaggagaagcaggatcatgggactttctgaatcatctagtgagacatccaagctctcgtctaaatcagctaaagaacgccgcaatcgccgaaaaaagaagaaccagaagaaactcagttcaggtgaggaaaaaggggatgccgaaaaactatccaaaagcgagtctgaagactctattaggcgcaaaagcttccatctgggggtggaaggacaccggagggcccacgagaagcgcctgtctacacctaaccaatcacccctgagcatccgggggagcctgttttccgctcgccggagtagtcggacaagcctattctctttcaagggccgaggtagagatattggtagcgaaaccgaattcgctgacgatgaacactcaatctttggcgacaatgaatctcgccgggggagtctgtttgtcccacatcgcccacaggagcgtcgatcatcaaacattagccaggcctcacggtcacccccaatgctgcccgtgaacggaaaaatgcactccgccgtggactgtaatggcgttgtctccctggtggacggaaggagtgcactgatgcttccaaacggccagcttctgcctgaagtcattatagacaaagccacaagcgacgattccggtaccaccaatcagatacacaaaaagcgaagatgctcgtcttacctgtag

SEQ ID NO: 300526 - DNA, 5969 bp, Artificial Sequence
  derived and/or modified sequence
atggccatgctgcctccccctgggccacagagctttgtgcacttcaccaaacagagcctggcactgatcgagcaacgtattgctgaaagaaaaagcaaggagccgaaggaggagaaaaaagacgacgacgaggaagcgcctaagcccagctcagacctggaagccggaaaacagttgccatttatttacggcgacattcctcccggtatggtgtccgagcccttggaagatttggacccttactacgctgataagaaaacctttatcgtgctaaacaaagggaagactatcttccgctttaatgctacacccgcattatatatgctgtctccattctcccctctgcgtcgcatctctatcaaaatcctggtgcattccacactgttctctatgttaataatgtgtaccatattaaccaattgcatcttcatgacaatgaataacccacctgattggaccaagaacgtggaatacacctttacagggatctatacttttgagagcctggttaagatcttggcaaggggcttctgtgtgggcgagttcacctttcttcgggatccatggaactggcttgacttcgtcgttatcgtctttgcctacgtgacagaatttgtagatctaggcaacgtttctgctctcagaaccttcagagtgctcagagctctaaaaaccattagcgtgatccctggcctcaagactattgtcggcgctttgattcagtcagtcaagaaacttagcgacgtgatgatcttaaccgttttttgtctgtctgtgtttgctttaatcggactgcaattgtttatgggaaatctgaagcacaaatgtttcagaaactctctggagaacaatgagactttagagtccataatgaatacattggagtccgaggaagacttcaggaaatatttctattaccttgagggctccaaggatgctcttctgtgtgggttctctacagattcaggccagtgtcccgaaggatatacctgcgttaagatagggaggaaccctgattacggctacacatctttcgatacattctcctgggcatttctagctttattcagattgatgacccaagactactgggaaaatctctatcaacagaccctgcgggcagcaggaaagacctatatgatcttcttcgtcgttgtcatttttctcgggtccttttacctcatcaacctaattttggctgtcgtcgctatggcctatgaagaacaaaaccaagcgaacatcgaagaggctaaacagaaagaactggagttccagcagatgctcgacaggctgaagaaggaacaggaggaagctgaagccattgctgcagccgcagctgagtatactagcatacgcagatctcgtattatgggcttgtccgaatcatcctcagaaacctcgaagctctcttcgaaaagtgctaaggagcgacgaaaccggaggaagaagaaaaatcagaaaaaactgtcctctggtgaagaaaaaggggacgctgagaagctgtctaaatccgagagcgaggacagtatacgcagaaaatctttccatctgggagtagagggccaccgtagagcccacgagaagcgcctgagcaccccgaaccagagccctctctccatcagaggaagtttgttttcagcaagaaggtctagtcggaccagcttgttttccttcaaggggcgagggagagatatcggttcagaaactgagttcgccgatgacgagcacagcatttttggcgataatgagtcaaggagaggctctctgtttgtccctcaccggccacaggagaggcggagctccaacatttcgcaggcctcccgatcaccaccaatgctaccagtcaacggcaagatgcactctgctgttgactgtaacggagttgtgtctctcgtcgatgggaggagcgctctcatgctcccaaatggtcaactgctgccggaggtcataattgataaggctacttcggacgacagtggtaccacaaaccagatccataaaaaaaggcggtgttcatcctatctgctttcagaggacatgttgaatgatccaaacttgcggcagcgggctatgtctcgcgctagtattctgacaaatactgtggaggagcttgaggagagtcgccagaaatgcccgccttggtggtaccgattcgcacacaaattcttgatctggaactgcagtccatactggataaagtttaaaaagtgtatctatttcattgtgatggaccccttcgtagacctcgcaatcactatctgcattgtgcttaatacactatttatggcaatggagcaccacccaatgacggaagagttcaaaaacgtgctcgccattggcaatttagttttcacaggtatttttgctgccgaaatggtattgaagctgatcgcgatggatccttatgagtacttccaggtgggctggaacatatttgatagtctcatcgtcacgctctcactggtggagctgttcctggccgacgttgaggggctttccgtgctgaggagtttccggctgctgcgggtctttaaattagcaaaatcctggcctacattaaatatgcttataaagattatcggaaactccgtgggggctctcggcaatctgactttggtcctcgctattattgtattcatattcgctgtggtgggaatgcagctgtttggtaaatcttacaaggaatgtgtgtgcaagattaacgacgactgcactctacctagatggcatatgaatgactttttccatagtttcttgatcgtgttccgggttctgtgtggcgagtggatcgagacaatgtgggactgcatggaagtggccggacaggctatgtgcttaattgtgtacatgatggtgatggtaattggaaatctggtggtcttaaacctgtttctggccctgctactcagctccttcagttcagacaacctcaccgctattgaggaagatccagacgcaaataatcttcagatcgctgtgacgaggattaagaaaggcattaattatgtgaagcagacactgcgagaatttattcttaaagctttcagcaaaaagccgaagatttcacgtgagattcgccaggcagaggatctcaacaccaagaaggaaaattatatatcaaaccacacattagctgaaatgagtaagggccacaacttcctcaaggaaaaggacaaaatcagcggtttcggatcctcagttgacaagcaccttatggaggactcagacgggcagtccttcatccataacccgagcctgacagtaacagttcccatcgctcctggcgagagtgacctagagaacatgaacgccgaagaattgtctagcgactccgactccgagtatagcaaagtccgattaaaccgcagcagctcatccgagtgttctacagtggataatcccctgccaggagaaggcgaggaagctgaggccgagcccatgaactctgatgagcccgaggcttgcttcaccgatgggtgtgtgtggcgctttagttgttgtcaggttaacattgaaagtggtaagggcaaaatctggtggaacattcgtaagacctgttacaagatagtggagcattcctggttcgagtcatttatcgtcctcatgatccttctttcctctggcgcacttgctttcgaagatatttacatagagcgaaagaagacaattaagattatcctggagtatgcagataagattttcacatatatttttattctggagatgctactgaaatggatagcgtacggctataagacttatttcaccaatgcctggtgttggcttgactttcttatcgtggacgtcagtctggttacccttgtggccaataccctgggttactcagacctcggcccaatcaagagccttaggaccctgagagcactcagaccgctgagggctctttcacgatttgagggcatgcgagtggttgtgaacgccctcattggcgcaattccgagtattatgaacgtgttactggtatgcctgatcttctggctgatattctccattatgggcgtgaacctttttgccggaaagttttacgagtgtattaacactacggacgggagtagattcccagcttctcaggtgcccaatagatctgaatgctttgctctgatgaatgtgtcccaaaacgtgaggtggaagaacctgaaagtaaacttcgacaatgtcggtctggggtatctgtccttgttgcaggttgcaacattcaaaggttggaccatcattatgtatgctgctgtagactccgtgaatgtcgacaaacagcctaaatatgagtattccctgtacatgtatatttacttcgtcgtattcatcattttcggatccttcttcaccctgaacttgttcatcggagtcattatcgataacttcaaccagcagaaaaagaaactgggaggacaggacatttttatgacagaagagcaaaagaagtactacaatgccatgaagaaacttggttccaaaaaacctcagaagcctattccacgcccaggaaacaagattcaggggtgcatctttgatttggtgacaaaccaggcctttgacatcagcattatggtcttgatttgcctaaacatggtaacaatgatggttgagaaggagggccagtcgcaacatatgaccgaggtcctctattggattaacgtagtgttcataattctgttcacaggtgagtgcgtcctgaaacttatttcactgcggcactactattttacagtaggctggaatatttttgatttcgtggttgtgattatcagtattgtcggcatgtttttagcggacctcattgaaacttatttcgtgtcccctaccttattccgcgtcatacgtttggctcgtattggcaggatactccgcttggttaaaggggctaaagggatcagaaccctgctgttcgccttgatgatgtctcttcccgctcttttcaatattggcttattgttgttcctcgtcatgttcatctatgcaattttcggcatgagcaattttgcatacgtcaaaaaagaagacggtatcaatgacatgtttaatttcgaaacttttgggaatagcatgatctgcctctttcagataacaaccagcgcagggtgggacggactgctcgcccctatactgaatagcaagcccccagactgtgatcctaagaaggtgcaccctggcagctctgtggagggggactgtggcaacccctccgtcggaattttttactttgtgagctacataattatcagcttcctagtcgtggtcaacatgtacatagctgtgatcctggagaatttttctgtcgctactgaagagtcaacagagccactgagcgaagatgacttcgagatgttctacgaagtatgggaaaaatttgatccagacgctactcaattcatcgaattctccaagctctctgatttcgctgccgcattggacccacctcttctcattgctaaacctaataaagtccagctaatcgccatggacctgcccatggtctccggcgatcgcatccattgtctcgacatactctttgcctttacaaagagagttctcggagagagtggtgaaatggatagcctgcggtctcagatggaggaaagatttatgtccgcaaatccaagcaaagttagctacgagcctatcactactaccctgaaaaggaagcaggaagacgtttctgctactgttattcaacgggcatacaggcgctatcggctgcggcagaacgtgaaaaatatatcctctatctatatcaaggatggtgaccgtgacgatgatttattaaataaaaaagatatggccttcgacaatgttaacgagaatagtagccctgaaaaaacagacgccacctcgtccaccacatcacctccttcttacgattcagtgacaaaacctgataaagagaagtacgagcaggataggaccgagaaggaggacaaagggaaagactccaaagaaagcaaaaagta

SEQ ID NO: 300527 - DNA, 1620 bp, Artificial Sequence
  derived and/or modified sequence
atcttgactaactgcatattcatgacaatgaacaaccctcctgactggacgaagaacgtagaatatacatttactggcatctatactttcgaaagcctcgtcaaaatcctagctagaggattttgcgtcggcgaatttacctttctgcgcgatccctggaattggctcgattttgtagtgatcgtcttcgcatacgtgacggagttcgtggatctcggcaacgtgagtgctctccgcacttttcgagtcctgcgggctctgaaaacaatttccgtaatccccggtctgaaaactatcgtcggagcgttgattcagagtgtgaaaaaactcagcgacgtgatgatcctcacagtgttctgcctgagtgtgttcgcactgataggcttacaattgtttatgggaaacttgaaacataaatgttttcgtaactcactggaaaacaatgagaccctggaatcaatcatgaataccctggagagtgaggaggactttcggaaatatttctactaccttgaaggatcgaaggacgccttgctgtgcggcttttcgactgatagcggtcaatgtccagaggggtacacttgcgtgaaaattggaaggaaccccgattatggatacacctcttttgacaccttctcctgggcatttttagccctgtttaggcttatgacacaggattattgggaaaatctgtatcagcagaccctgagagccgcaggtaagacctatatgatcttcttcgtcgttgtcattttcctggggtccttttaccttatcaatctgattctcgccgtggtcgccatggcctatgaggaacagaaccaggccaatatcgaggaggctaagcagaaagagctagaatttcaacagatgctggatagactcaagaaagaacaggaagaggctgaggcaattgctgcagcagccgcagaatacacctcaattcgcaggtctcgcatcatgggtttgtccgagagctccagtgaaacgagtaagctcagtagcaagtctgctaaggagagacggaataggagaaaaaaaaaaaaccagaaaaagctgtcatcaggtgaggagaagggcgatgccgagaagctctccaagtccgaatcagaagactccattcggagaaaaagtttccacctgggggttgagggtcatcgcagggctcacgagaaaaggctctccacgcctaatcagtcacccctctcaattcggggttcccttttttcagccagacgctccagcaggacttctctgttttcgttcaaagggaggggcagagatatcggcagtgaaacggaatttgccgatgatgaacactctattttcggggacaatgagagcagacggggtagcctctttgtgccacaccgccctcaagaacgaaggagtagtaacatttctcaagcctcccggtcaccccctatgctgcccgtgaacgggaagatgcatagcgccgtcgattgtaatggggtggtgagtctggtcgacggacgttcagccctcatgctaccaaacggacaactacttcccgaagtgattatcgataaagctaccagcgacgactccggcactacaaatcagattcacaagaagcgtcgctgttccagttatttgtag

SEQ ID NO: 300528 - DNA, 9787 bp, Artificial Sequence
  derived and/or modified sequence
cggggctgctacctccacgggcgcgccctggcaggaggggcgcagtctgcttgcaggcggtcgccagcgctccagcggcggctgtcggctttccaattccgccagctcggctgaggctgggctagcctgggtgccagtggctgctagcggcaggcgtcccctgagcaacaggagcccagagaaaaagaagcagccctgagagagcgccggggaaggagaggcccgcgccctctcctggagccagattctgcaggtgcactgggtggggatgatcggcgggctaggttgcaagcctcttatgtgaggagctgaagaggaattaaaatatacaggatgaaaagatggcaatgttgcctcccccaggacctcagagctttgtccatttcacaaaacagtctcttgccctcattgaacaacgcattgctgaaagaaaatcaaaggaacccaaagaagaaaagaaagatgatgatgaagaagccccaaagccaagcagtgacttggaagctggcaaacagctgcccttcatctatggggacattcctcccggcatggtgtcagagcccctggaggacttggacccctactatgcagacaaaaagactttcatagtattgaacaaagggaaaacaatcttccgtttcaatgccacacctgctttatatatgctttctcctttcagtcctctaagaagaatatctattaagattttagtacactctaccttattcagcatgctcatcatgtgcactattctgacaaactgcatatttatgaccatgaataacccaccggactggaccaaaaatgtcgagtacacttttactggaatatatacttttgaatcacttgtaaaaatccttgcaagaggcttctgtgtaggagaattcacttttcttcgtgacccgtggaactggctggattttgtcgtcattgtttttgcatatgtgacagagtttgtggacctgggcaatgtctcagcattgagaacattcagagttctccgagcattgaaaacaatttcagtcattccaggcctgaagacaattgtaggggctttgatccagtcagtgaagaagctttctgatgtcatgatcctgactgtgttctgtctgagtgtgtttgcactaattggactacagctgttcatgggaaacctgaagcataaatgttttcgaaattcacttgaaaataatgaaacattagaaagcataatgaataccctagagagtgaagaagactttagaaaatatttttattacttggaaggatccaaagatgctctcctttgtggtttcagcacagattcaggtcagtgtccagaggggtacacctgtgtgaaaattggcagaaaccctgattatggctacacgagctttgacactttcagctgggccttcttagccttgtttaggctaatgacccaagattactgggaaaacctttaccaacagacgctgcgtgctgctggcaaaacctacatgatcttctttgtcgtagtgattttcctgggctccttttatctaataaacttgatcctggctgtggttgccatggcatatgaagaacagaaccaggcaaacattgaagaagctaaacagaaagaattagaatttcaacagatgttagaccgtcttaaaaaagagcaagaagaagctgaggcaattgcagcggcagcggctgaatatacaagtattaggagaagcagaattatgggcctctcagagagttcttctgaaacatccaaactgagctctaaaagtgctaaagaaagaagaaacagaagaaagaaaaagaatcaaaagaagctctccagtggagaggaaaagggagatgctgagaaattgtcgaaatcagaatcagaggacagcatcagaagaaaaagtttccaccttggtgtcgaagggcataggcgagcacatgaaaagaggttgtctacccccaatcagtcaccactcagcattcgtggctccttgttttctgcaaggcgaagcagcagaacaagtctttttagtttcaaaggcagaggaagagatataggatctgagactgaatttgccgatgatgagcacagcatttttggagacaatgagagcagaaggggctcactgtttgtgccccacagaccccaggagcgacgcagcagtaacatcagccaagccagtaggtccccaccaatgctgccggtgaacgggaaaatgcacagtgctgtggactgcaacggtgtggtctccctggttgatggacgctcagccctcatgctccccaatggacagcttctgccagaggtgataatagataaggcaacttctgatgacagcggcacgaccaatcaaatacacaagaaaaggcgttgtagttcctatctcctttcagaggatatgctgaatgatcccaacctcagacagagagcaatgagtagagcaagcatattaacaaacactgtggaagaacttgaagagtccagacaaaaatgtccaccttggtggtacagatttgcacacaaattcttgatctggaattgctctccatattggataaaattcaaaaagtgtatctattttattgtaatggatccttttgtagatcttgcaattaccatttgcatagttttaaacacattatttatggctatggaacaccacccaatgactgaggaattcaaaaatgtacttgctataggaaatttggtctttactggaatctttgcagctgaaatggtattaaaactgattgccatggatccatatgagtatttccaagtaggctggaatatttttgacagccttattgtgactttaagtttagtggagctctttctagcagatgtggaaggattgtcagttctgcgatcattcagactgctccgagtcttcaagttggcaaaatcctggccaacattgaacatgctgattaagatcattggtaactcagtaggggctctaggtaacctcaccttagtgttggccatcatcgtcttcatttttgctgtggtcggcatgcagctctttggtaagagctacaaagaatgtgtctgcaagatcaatgatgactgtacgctcccacggtggcacatgaacgacttcttccactccttcctgattgtgttccgcgtgctgtgtggagagtggatagagaccatgtgggactgtatggaggtcgctggtcaagctatgtgccttattgtttacatgatggtcatggtcattggaaacctggtggtcctaaacctatttctggccttattattgagctcatttagttcagacaatcttacagcaattgaagaagaccctgatgcaaacaacctccagattgcagtgactagaattaaaaagggaataaattatgtgaaacaaaccttacgtgaatttattctaaaagcattttccaaaaagccaaagatttccagggagataagacaagcagaagatctgaatactaagaaggaaaactatatttctaaccatacacttgctgaaatgagcaaaggtcacaatttcctcaaggaaaaagataaaatcagtggttttggaagcagcgtggacaaacacttgatggaagacagtgatggtcaatcatttattcacaatcccagcctcacagtgacagtgccaattgcacctggggaatccgatttggaaaatatgaatgctgaggaacttagcagtgattcggatagtgaatacagcaaagtgagattaaaccggtcaagctcctcagagtgcagcacagttgataaccctttgcctggagaaggagaagaagcagaggctgaacctatgaattccgatgagccagaggcctgtttcacagatggttgtgtatggaggttctcatgctgccaagttaacatagagtcagggaaaggaaaaatctggtggaacatcaggaaaacctgctacaagattgttgaacacagttggtttgaaagcttcattgtcctcatgatcctgctcagcagtggtgccctggcttttgaagatatttatattgaaaggaaaaagaccattaagattatcctggagtatgcagacaagatcttcacttacatcttcattctggaaatgcttctaaaatggatagcatatggttataaaacatatttcaccaatgcctggtgttggctggatttcctaattgttgatgtttctttggttactttagtggcaaacactcttggctactcagatcttggccccattaaatcccttcggacactgagagctttaagacctctaagagccttatctagatttgaaggaatgagggtcgttgtgaatgcactcataggagcaattccttccatcatgaatgtgctacttgtgtgtcttatattctggctgatattcagcatcatgggagtaaatttgtttgctggcaagttctatgagtgtattaacaccacagatgggtcacggtttcctgcaagtcaagttccaaatcgttccgaatgttttgcccttatgaatgttagtcaaaatgtgcgatggaaaaacctgaaagtgaactttgataatgtcggacttggttacctatctctgcttcaagttgcaacttttaagggatggacgattattatgtatgcagcagtggattctgttaatgtagacaagcagcccaaatatgaatatagcctctacatgtatatttattttgtcgtctttatcatctttgggtcattcttcactttgaacttgttcattggtgtcatcatagataatttcaaccaacagaaaaagaagcttggaggtcaagacatctttatgacagaagaacagaagaaatactataatgcaatgaaaaagctggggtccaagaagccacaaaagccaattcctcgaccagggaacaaaatccaaggatgtatatttgacctagtgacaaatcaagcctttgatattagtatcatggttcttatctgtctcaacatggtaaccatgatggtagaaaaggagggtcaaagtcaacatatgactgaagttttatattggataaatgtggtttttataatccttttcactggagaatgtgtgctaaaactgatctccctcagacactactacttcactgtaggatggaatatttttgattttgtggttgtgattatctccattgtaggtatgtttctagctgatttgattgaaacgtattttgtgtcccctaccctgttccgagtgatccgtcttgccaggattggccgaatcctacgtctagtcaaaggagcaaaggggatccgcacgctgctctttgctttgatgatgtcccttcctgcgttgtttaacatcggcctcctgctcttcctggtcatgttcatctacgccatctttggaatgtccaactttgcctatgttaaaaaggaagatggaattaatgacatgttcaattttgagacctttggcaacagtatgatttgcctgttccaaattacaacctctgctggctgggatggattgctagcacctattcttaacagtaagccacccgactgtgacccaaaaaaagttcatcctggaagttcagttgaaggagactgtggtaacccatctgttggaatattctactttgttagttatatcatcatatccttcctggttgtggtgaacatgtacattgcagtcatactggagaattttagtgttgccactgaagaaagtactgaacctctgagtgaggatgactttgagatgttctatgaggtttgggagaagtttgatcccgatgcgacccagtttatagagttctctaaactctctgattttgcagctgccctggatcctcctcttctcatagcaaaacccaacaaagtccagctcattgccatggatctgcccatggttagtggtgaccggatccattgtcttgacatcttatttgcttttacaaagcgtgttttgggtgagagtggggagatggattctcttcgttcacagatggaagaaaggttcatgtctgcaaatccttccaaagtgtcctatgaacccatcacaaccacactaaaacggaaacaagaggatgtgtctgctactgtcattcagcgtgcttatagacgttaccgcttaaggcaaaatgtcaaaaatatatcaagtatatacataaaagatggagacagagatgatgatttactcaataaaaaagatatggcttttgataatgttaatgagaactcaagtccagaaaaaacagatgccacttcatccaccacctctccaccttcatatgatagtgtaacaaagccagacaaagagaaatatgaacaagacagaacagaaaaggaagacaaagggaaagacagcaaggaaagcaaaaaatagagcttcatttttgatatattgtttacagcctgtgaaagtgatttatttgtgttaataaaactcttttgaggaagtctatgccaaaatcctttttatcaaaatattctcgaaggcagtgcagtcactaactctgatttcctaagaaaggtgggcagcattagcagatggttatttttgcactgatgattctttaagaatcgtaagagaactctgtaggaattattgattatagcatacaaaagtgattcagttttttggtttttaataaatcagaagaccatgtagaaaacttttacatctgccttgtcatcttttcacaggattgtaattagtcttgtttcccatgtaaataaacaacacacgcatacagaaaaatctattatttatctattatttggaaatcaacaaaagtatttgccttggctttgcaatgaaatgcttgatagaagtaatggacattagttatgaatgtttagttaaaatgcattattagggagcttgactttttatcaatgtacagaggttattctatattttgaggtgcttaaatttattctacattgcatcagaaccaatttatatgtgcctataaaatgccatgggattaaaaatatatgtaggctattcatttctacaaatgtttttcattcatcttgactcacatgccaacaaggataagacttacctttagagtattgtgtttcatagcctttcttctttcatatccctttttgttcatagaataaccacagaacttgaaaaattattctaagtacatattacactcctcaaaaaaaacaaagataactgagaaaaaagttattgacagaagttctatttgctattatttacatagcctaacatttgactgtgctgcccaaaatactgataatagtctcttaaactcttttgtcaaattttcctgctttcttatgcagtattgtttagtcatcctttcgctgtaagcaaagttgatgaaatccttcctgatatgcagttagttgtttgaccacggtacatacttgagcagataataacttgggcacagtatttattgcatcacttgtatacaatcccgtgtttggcaagctttcaaatcatgtaatatgacagactttacacagatatgtgtttagtatgaataaaaaagcattgaaatagggattcttgccaacttgctctcttgccaccaacttactttcctaaattatggaagtaatcttttttggatatacttcaatgtatacaatgaggaagatgtcaccttctccttaaaattctatgatgtgaaatatattttgcctcaatcaacacagtaccatgggcttctaatttatcaagcacatattcattttgcattagctgtagacatctagttttttgaaaacacctattaatagtaatttgaaaagaaataaccataatgctttttttcgtgagtttatttcaggaatatgagatctttcttctataaagttattcatgcacaggcaaaaattgagctacacaggtagaatgtagttttacttagaagatttttgtgggaggttttgaagcaaatatataaaacaactttcactaatttgctttccatatttaaaaaataataaattacatttatataataaatgtttaaagcacatattttttgttgttctggcaatttaaaaagaaagaggatttaaacgtacctatagaaacaaagatttatggttaaagaatgagatcagaagtctagaatgtttttaaattgtgatatattttacaacatccgttattactttgagacatttgtcctaatctacgtataaaactcaatctagggctaaagattctttataccatcttaggttcattcatcttaggctatttgaaccactttttaatttaatatgaaagacaccatgcagtgttttccgagactacatagatcattttatcacatacctaccaagcctgttggaaataggttttgataatttaagtagggacctatacaaaatatattacatttatcagatttttaaatacattcaattaagaatttaacatcaccttaaatttgaattcaatctaccgttatttcaaactcacaaatataactgcattatgaatacttacataatgtagtaagacaagatgtttgacaggttcgtgtgtaattttctattaatgtttttacattgccttgtttttatgtaaaataaaaaatatgggcaactggtttgttaacaacacaatttcttcttagcatttcaaaaatatatataaagttgttctttttcctatttcatgaactatgtttttttttaaaataacatggttaagttttatatatatttacgtttgtttcaggaatgtctacttgtgactttttatcaattaaaaataatatttggaagaaagagcttattaagtataagcttgaagtaaaattagacctctctttccatgtagattactgtttgtactgatggtttcacccttcagaaggcactgtcatattaatatttaaattttataatcgctgaacttattacacccaacaatacagaaaggcagttacactgaagaacttaacttagaataaaatggaagcaaacaggttttctaaaaacttttttaagtgaccaggtctcgctctgtcacccaggctagagtgcaatggcatgatcatagctctctgcagcctcaactctgggctcaagcaaccctcctgcctcagcctcccaagtagctaagactacaggtacatgccaccatgcctggctaatatttaaatttttgtagataaggggtcttgctatgttgcccaggctagtctcaaactcctggcttcaagtgttcctactgtcatgacctgccaacatgctggggttacaggcatgagccaccatgccccaaacaggtttgaacacaaatctttcggatgaaaattagagaacctaattttagctttttgatagttacctagtttgcaaaagatttgggtgacttgtgagctgtttttaaatgctgattgttgaacatcacaacccaaaatacttagcatgattttatagagttttgatagctttattaaaaagagtgaaaataaaatgcatatgtaaataaagcagttctaaatagctatttcagagaaatgttaatagaagtgctgaaagaagggccaactaaattaggatggccagggaattggcctgggtttaggacctatgtatgaaggccaccaattttttaaaaatatctgtggtttattatgttattatcttcttgaggaaaacaatcaagaattgcttcatgaaaataaataaatagccatgaatatcataaagctgtttacataggattctttacaaatttcatagatctatgaatgctcaaaatgtttgagtttgccataaattatattgtagttatattgtagttatacttgagactgacacattgtaatataatctaagaataaaagttat

SEQ ID NO: 300529 - DNA, 1618 bp, Artificial Sequence
  derived and/or modified sequence
attctgacaaactgcatatttatgaccatgaataacccaccggactggaccaaaaatgtcgagtacacttttactggaatatatacttttgaatcacttgtaaaaatccttgcaagaggcttctgtgtaggagaattcacttttcttcgtgacccgtggaactggctggattttgtcgtcattgtttttgcatatgtgacagagtttgtggacctgggcaatgtctcagcattgagaacattcagagttctccgagcattgaaaacaatttcagtcattccaggcctgaagacaattgtaggggctttgatccagtcagtgaagaagctttctgatgtcatgatcctgactgtgttctgtctgagtgtgtttgcactaattggactacagctgttcatgggaaacctgaagcataaatgttttcgaaattcacttgaaaataatgaaacattagaaagcataatgaataccctagagagtgaagaagactttagaaaatatttttattacttggaaggatccaaagatgctctcctttgtggtttcagcacagattcaggtcagtgtccagaggggtacacctgtgtgaaaattggcagaaaccctgattatggctacacgagctttgacactttcagctgggccttcttagccttgtttaggctaatgacccaagattactgggaaaacctttaccaacagacgctgcgtgctgctggcaaaacctacatgatcttctttgtcgtagtgattttcctgggctccttttatctaataaacttgatcctggctgtggttgccatggcatatgaagaacagaaccaggcaaacattgaagaagctaaacagaaagaattagaatttcaacagatgttagaccgtcttaaaaaagagcaagaagaagctgaggcaattgcagcggcagcggctgaatatacaagtattaggagaagcagaattatgggcctctcagagagttcttctgaaacatccaaactgagctctaaaagtgctaaagaaagaagaaacagaagaaagaaaaagaatcaaaagaagctctccagtggagaggaaaagggagatgctgagaaattgtcgaaatcagaatcagaggacagcatcagaagaaaaagtttccaccttggtgtcgaagggcataggcgagcacatgaaaagaggttgtctacccccaatcagtcaccactcagcattcgtggctccttgttttctgcaaggcgaagcagcagaacaagtctttttagtttcaaaggcagaggaagagatataggatctgagactgaatttgccgatgatgagcacagcatttttggagacaatgagagcagaaggggctcactgtttgtgccccacagaccccaggagcgacgcagcagtaacatcagccaagccagtaggtccccaccaatgctgccggtgaacgggaaaatgcacagtgctgtggactgcaacggtgtggtctccctggttgatggacgctcagccctcatgctccccaatggacagcttctgccagaggtgataatagataaggcaacttctgatgacagcggcacgaccaatcaaatacacaagaaaaggcgttgtagttcctatctcc

SEQ ID NO: 300530 - DNA, 5970 bp, Artificial Sequence
  derived and/or modified sequence
atggccatgctgcccccccccggcccccagagcttcgtgcacttcaccaagcagagcctggccctgatcgagcagagaatcgccgagagaaagagcaaggagcccaaggaggagaagaaggacgacgacgaggaggcccccaagcccagcagcgacctggaggccggcaagcagctgcccttcatctacggcgacatcccccccggcatggtgagcgagcccctggaggacctggacccctactacgccgacaagaagaccttcatcgtgctgaacaagggcaagaccatcttcagattcaacgccacccccgccctgtacatgctgagccccttcagccccctgagaagaatcagcatcaagatcctggtgcacagcaccctgttcagcatgctgatcatgtgcaccatcctgaccaactgcatcttcatgaccatgaacaacccccccgactggaccaagaacgtggagtacaccttcaccggcatctacaccttcgagagcctggtgaagatcctggccagaggcttctgcgtgggcgagttcaccttcctgagagacccctggaactggctggacttcgtggtgatcgtgttcgcctacgtgaccgagttcgtggacctgggcaacgtgagcgccctgagaaccttcagagtgctgagagccctgaagaccatcagcgtgatccccggcctgaagaccatcgtgggcgccctgatccagagcgtgaagaagctgagcgacgtgatgatcctgaccgtgttctgcctgagcgtgttcgccctgatcggcctgcagctgttcatgggcaacctgaagcacaagtgcttcagaaacagcctggagaacaacgagaccctggagagcatcatgaacaccctggagagcgaggaggacttcagaaagtacttctactacctggagggcagcaaggacgccctgctgtgcggcttcagcaccgacagcggccagtgccccgagggctacacctgcgtgaagatcggcagaaaccccgactacggctacaccagcttcgacaccttcagctgggccttcctggccctgttcagactgatgacccaggactactgggagaacctgtaccagcagaccctgagagccgccggcaagacctacatgatcttcttcgtggtggtgatcttcctgggcagcttctacctgatcaacctgatcctggccgtggtggccatggcctacgaggagcagaaccaggccaacatcgaggaggccaagcagaaggagctggagttccagcagatgctggacagactgaagaaggagcaggaggaggccgaggccatcgccgccgccgccgccgagtacaccagcatcagaagaagcagaatcatgggcctgagcgagagcagcagcgagaccagcaagctgagcagcaagagcgccaaggagagaagaaacagaagaaagaagaagaaccagaagaagctgagcagcggcgaggagaagggcgacgccgagaagctgagcaagagcgagagcgaggacagcatcagaagaaagagcttccacctgggcgtggagggccacagaagagcccacgagaagagactgagcacccccaaccagagccccctgagcatcagaggcagcctgttcagcgccagaagaagcagcagaaccagcctgttcagcttcaagggcagaggcagagacatcggcagcgagaccgagttcgccgacgacgagcacagcatcttcggcgacaacgagagcagaagaggcagcctgttcgtgccccacagaccccaggagagaagaagcagcaacatcagccaggccagcagaagcccccccatgctgcccgtgaacggcaagatgcacagcgccgtggactgcaacggcgtggtgagcctggtggacggcagaagcgccctgatgctgcccaacggccagctgctgcccgaggtgatcatcgacaaggccaccagcgacgacagcggcaccaccaaccagatccacaagaagagaagatgcagcagctacctgctgagcgaggacatgctgaacgaccccaacctgagacagagagccatgagcagagccagcatcctgaccaacaccgtggaggagctggaggagagcagacagaagtgccccccctggtggtacagattcgcccacaagttcctgatctggaactgcagcccctactggatcaagttcaagaagtgcatctacttcatcgtgatggaccccttcgtggacctggccatcaccatctgcatcgtgctgaacaccctgttcatggccatggagcaccaccccatgaccgaggagttcaagaacgtgctggccatcggcaacctggtgttcaccggcatcttcgccgccgagatggtgctgaagctgatcgccatggacccctacgagtacttccaggtgggctggaacatcttcgacagcctgatcgtgaccctgagcctggtggagctgttcctggccgacgtggagggcctgagcgtgctgagaagcttcagactgctgagagtgttcaagctggccaagagctggcccaccctgaacatgctgatcaagatcatcggcaacagcgtgggcgccctgggcaacctgaccctggtgctggccatcatcgtgttcatcttcgccgtggtgggcatgcagctgttcggcaagagctacaaggagtgcgtgtgcaagatcaacgacgactgcaccctgcccagatggcacatgaacgacttcttccacagcttcctgatcgtgttcagagtgctgtgcggcgagtggatcgagaccatgtgggactgcatggaggtggccggccaggccatgtgcctgatcgtgtacatgatggtgatggtgatcggcaacctggtggtgctgaacctgttcctggccctgctgctgagcagcttcagcagcgacaacctgaccgccatcgaggaggaccccgacgccaacaacctgcagatcgccgtgaccagaatcaagaagggcatcaactacgtgaagcagaccctgagagagttcatcctgaaggccttcagcaagaagcccaagatcagcagagagatcagacaggccgaggacctgaacaccaagaaggagaactacatcagcaaccacaccctggccgagatgagcaagggccacaacttcctgaaggagaaggacaagatcagcggcttcggcagcagcgtggacaagcacctgatggaggacagcgacggccagagcttcatccacaaccccagcctgaccgtgaccgtgcccatcgcccccggcgagagcgacctggagaacatgaacgccgaggagctgagcagcgacagcgacagcgagtacagcaaggtgagactgaacagaagcagcagcagcgagtgcagcaccgtggacaaccccctgcccggcgagggcgaggaggccgaggccgagcccatgaacagcgacgagcccgaggcctgcttcaccgacggctgcgtgtggagattcagctgctgccaggtgaacatcgagagcggcaagggcaagatctggtggaacatcagaaagacctgctacaagatcgtggagcacagctggttcgagagcttcatcgtgctgatgatcctgctgagcagcggcgccctggccttcgaggacatctacatcgagagaaagaagaccatcaagatcatcctggagtacgccgacaagatcttcacctacatcttcatcctggagatgctgctgaagtggatcgcctacggctacaagacctacttcaccaacgcctggtgctggctggacttcctgatcgtggacgtgagcctggtgaccctggtggccaacaccctgggctacagcgacctgggccccatcaagagcctgagaaccctgagagccctgagacccctgagagccctgagcagattcgagggcatgagagtggtggtgaacgccctgatcggcgccatccccagcatcatgaacgtgctgctggtgtgcctgatcttctggctgatcttcagcatcatgggcgtgaacctgttcgccggcaagttctacgagtgcatcaacaccaccgacggcagcagattccccgccagccaggtgcccaacagaagcgagtgcttcgccctgatgaacgtgagccagaacgtgagatggaagaacctgaaggtgaacttcgacaacgtgggcctgggctacctgagcctgctgcaggtggccaccttcaagggctggaccatcatcatgtacgccgccgtggacagcgtgaacgtggacaagcagcccaagtacgagtacagcctgtacatgtacatctacttcgtggtgttcatcatcttcggcagcttcttcaccctgaacctgttcatcggcgtgatcatcgacaacttcaaccagcagaagaagaagctgggcggccaggacatcttcatgaccgaggagcagaagaagtactacaacgccatgaagaagctgggcagcaagaagccccagaagcccatccccagacccggcaacaagatccagggctgcatcttcgacctggtgaccaaccaggccttcgacatcagcatcatggtgctgatctgcctgaacatggtgaccatgatggtggagaaggagggccagagccagcacatgaccgaggtgctgtactggatcaacgtggtgttcatcatcctgttcaccggcgagtgcgtgctgaagctgatcagcctgagacactactacttcaccgtgggctggaacatcttcgacttcgtggtggtgatcatcagcatcgtgggcatgttcctggccgacctgatcgagacctacttcgtgagccccaccctgttcagagtgatcagactggccagaatcggcagaatcctgagactggtgaagggcgccaagggcatcagaaccctgctgttcgccctgatgatgagcctgcccgccctgttcaacatcggcctgctgctgttcctggtgatgttcatctacgccatcttcggcatgagcaacttcgcctacgtgaagaaggaggacggcatcaacgacatgttcaacttcgagaccttcggcaacagcatgatctgcctgttccagatcaccaccagcgccggctgggacggcctgctggcccccatcctgaacagcaagccccccgactgcgaccccaagaaggtgcaccccggcagcagcgtggagggcgactgcggcaaccccagcgtgggcatcttctacttcgtgagctacatcatcatcagcttcctggtggtggtgaacatgtacatcgccgtgatcctggagaacttcagcgtggccaccgaggagagcaccgagcccctgagcgaggacgacttcgagatgttctacgaggtgtgggagaagttcgaccccgacgccacccagttcatcgagttcagcaagctgagcgacttcgccgccgccctggacccccccctgctgatcgccaagcccaacaaggtgcagctgatcgccatggacctgcccatggtgagcggcgacagaatccactgcctggacatcctgttcgccttcaccaagagagtgctgggcgagagcggcgagatggacagcctgagaagccagatggaggagagattcatgagcgccaaccccagcaaggtgagctacgagcccatcaccaccaccctgaagagaaagcaggaggacgtgagcgccaccgtgatccagagagcctacagaagatacagactgagacagaacgtgaagaacatcagcagcatctacatcaaggacggcgacagagacgacgacctgctgaacaagaaggacatggccttcgacaacgtgaacgagaacagcagccccgagaagaccgacgccaccagcagcaccaccagcccccccagctacgacagcgtgaccaagcccgacaaggagaagtacgagcaggacagaaccgagaaggaggacaagggcaaggacagcaaggagagcaagaagtag

SEQ ID NO: 300531 - DNA, 1620 bp, Artificial Sequence
  derived and/or modified sequence
atcctgaccaactgcatcttcatgaccatgaacaacccccccgactggaccaagaacgtggagtacaccttcaccggcatctacaccttcgagagcctggtgaagatcctggccagaggcttctgcgtgggcgagttcaccttcctgagagacccctggaactggctggacttcgtggtgatcgtgttcgcctacgtgaccgagttcgtggacctgggcaacgtgagcgccctgagaaccttcagagtgctgagagccctgaagaccatcagcgtgatccccggcctgaagaccatcgtgggcgccctgatccagagcgtgaagaagctgagcgacgtgatgatcctgaccgtgttctgcctgagcgtgttcgccctgatcggcctgcagctgttcatgggcaacctgaagcacaagtgcttcagaaacagcctggagaacaacgagaccctggagagcatcatgaacaccctggagagcgaggaggacttcagaaagtacttctactacctggagggcagcaaggacgccctgctgtgcggcttcagcaccgacagcggccagtgccccgagggctacacctgcgtgaagatcggcagaaaccccgactacggctacaccagcttcgacaccttcagctgggccttcctggccctgttcagactgatgacccaggactactgggagaacctgtaccagcagaccctgagagccgccggcaagacctacatgatcttcttcgtggtggtgatcttcctgggcagcttctacctgatcaacctgatcctggccgtggtggccatggcctacgaggagcagaaccaggccaacatcgaggaggccaagcagaaggagctggagttccagcagatgctggacagactgaagaaggagcaggaggaggccgaggccatcgccgccgccgccgccgagtacaccagcatcagaagaagcagaatcatgggcctgagcgagagcagcagcgagaccagcaagctgagcagcaagagcgccaaggagagaagaaacagaagaaagaagaagaaccagaagaagctgagcagcggcgaggagaagggcgacgccgagaagctgagcaagagcgagagcgaggacagcatcagaagaaagagcttccacctgggcgtggagggccacagaagagcccacgagaagagactgagcacccccaaccagagccccctgagcatcagaggcagcctgttcagcgccagaagaagcagcagaaccagcctgttcagcttcaagggcagaggcagagacatcggcagcgagaccgagttcgccgacgacgagcacagcatcttcggcgacaacgagagcagaagaggcagcctgttcgtgccccacagaccccaggagagaagaagcagcaacatcagccaggccagcagaagcccccccatgctgcccgtgaacggcaagatgcacagcgccgtggactgcaacggcgtggtgagcctggtggacggcagaagcgccctgatgctgcccaacggccagctgctgcccgaggtgatcatcgacaaggccaccagcgacgacagcggcaccaccaaccagatccacaagaagagaagatgcagcagctacctgtag

SEQ ID NO: 300532 - DNA, 5934 bp, Artificial Sequence
  derived and/or modified sequence
atggcgatgctccctccaccgggaccgcagtccttcgtacactttactaagcaaagccttgcgctgattgagcagcgtatagccgagcgaaagtctaaagagcccaaagaggagaagaaggatgacgatgaggaagctcccaaaccgagctctgacctagaagcaggtaaacagctgccatttatttatggcgacataccaccagggatggtgtctgagcctctggaggacctcgacccttactatgctgataaaaaaaccttcatagtactgaacaagggcaagaccatttttagattcaacgcgaccccagccctctacatgctgagtccatttagccctctgagacgcatctccattaagattctggtgcacagtctcttttcaatgctcatcatgtgtacaatcttaaccaactgcattttcatgaccatgaataacccccctgactggacaaaaaacgtagaatatacatttactgggatttacactttcgaaagtctggttaaaatcctggcgcggggattctgtgtgggagaatttacttttttgagagatccttggaactggttggacttcgtcgtgatcgtctttgcctatttgacggaatttgtgaaccttggcaacgtttccgctttgagaacattcagggtcctgcgggcactcaaaacgatctctgtgattccggggctgaaaaccattgtgggcgcgctgattcaaagtgtgaagaagctttcagatgtaatgattctgactgtgttttgcctgagcgtttttgcgctgatcggactgcaactttttatgggaaatctaaagcacaagtgtttcaggaatagcctggagaacaacgagacccttgagagcattatgaacaccctggaatcagaagaggattttcgcaaatatttctactatttagaaggctcaaaagacgctctcctctgcggattcagcacggattcgggccagtgcccggagggctatacatgtgtaaagattgggcgcaatcccgactacgggtacacatccttcgacacattcagctgggcttttttggcgctcttccgcctgatgacccaagactactgggagaacttataccagcagacactcagggccgccggcaaaacgtacatgatattcttcgtggtggtgatctttctggggagcttctatcttattaatttgatattagcagtggttgctatggcatatgaagagcagaatcaagccaacatcgaagaggctaaacagaaagagctagagttccagcagatgttggatagactgaagaaggagcaagaagaggccgaggctatcgcggctgccgccgctgagtatactagcattcgacggtcccgcatcatgggcctgagcgagtcttcatctgaaacgtctaagttgagttccaaatctgcgaaggaacggcgcaacaggagaaagaagaagaaccaaaagaaactcagctctggcgaggaaaagggggacgctgaaaaactgtcgaagtcagaatcggaggatagcatacgtcgcaagtcttttcacctcggagtggagggccaccgccgcgcccacgagaagcgactgtcaacaccaaatcagtctcctttatccattagagggtcattgttctccgcccggaggtcaagcagaacatcgctgttctctttcaagggacggggcagagacatcggcagcgaaaccgagttcgccgacgacgaacatagcatctttggtgataatgaatctcgtcgcggcagtctgttcgttcctcaccggcctcaggaaaggcggagttctaatatttcccaggccagtcgcagtccccctatgttgcccgtcaatggcaagatgcactccgccgtggactgtaatggcgttgtctcccttgtcgacggcaggagcgccttaatgctgcccaatgggcaacttctgcccgagggcactacgaaccagatacacaagaaacgcaggtgcagttcgtatctgctgagcgaggatatgctcaacgatcctaacctaaggcagcgcgctatgtcgcgagcctccatcctgacaaacacagttgaagagctcgaggaaagtaggcagaaatgtccgccttggtggtatcggtttgctcacaagttcctgatctggaattgttcaccttactggataaaatttaaaaagtgtatttactttattgtgatggatccttttgtcgatcttgcgatcaccatctgcatcgtgctgaataccctgtttatggctatggaacatcatcctatgacagaggaattcaaaaatgtgctggcaatcggaaatctggtgttcaccgggattttcgcggccgagatggttctcaaactgattgctatggatccttatgaatacttccaggtgggctggaatatcttcgacagcctgatcgtcaccttatcactcgttgagctgtttttggccgacgtcgaaggactcagtgtgctgcggtcctttcgcctgctgcgcgtttttaagctggctaagtcctggcccaccctcaacatgctgattaaaattatcgggaactcagtgggtgctttaggaaatctcaccctggtgctcgctataatagtgttcatctttgctgtggtgggcatgcagctgttcggcaaaagttacaaggaatgcgtttgcaaaataaacgatgactgcacacttccgaggtggcatatgaatgacttctttcactcttttctcatcgtctttcgcgtcttgtgcggtgagtggatcgagaccatgtgggattgcatggaggtggccggacaggccatgtgtttgattgtatatatgatggtgatggtaatcgggaatcttgttgtgttgaatctattcctggcactcctgctgtcttctttctctagtgacaatctgacagccatcgaggaagatcctgatgccaataatcttcaaattgccgtgacacggattaaaaaaggaataaattacgtgaagcagactctgcgggagttcatcctgaaggcttttagcaagaagccaaaaatcagccgcgaaataaggcaggcagaagacctgaatactaagaaggagaactacattagtaatcataccctggcagaaatgagcaaaggccataattttctgaaagagaaagacaagatcagcggattcgggagttccgtcgacaaacacttgatggaagactctgatgggcagagttttatccataacccatccttgacagtgactgtccctatcgccccaggtgaatcagaccttgagaacatgaatgcagaggagctctcctctgattctgacagcgagtactccaaagttagattaaacagatcaagctccagcgaatgttcgacggtcgataatcctttacctggcgaaggcgaagaggccgaggccgagcctatgaattcggatgagccagaggcttgttttaccgatggctgcgtgtggcgattcagttgttgccaggtgaacatagagagcggcaagggaaagatatggtggaacatacgtaagacctgctacaaaatcgtggagcatagttggtttgaatcctttattgtactgatgattcttctgtcaagcggggcactcgcattcgaggacatttacattgaaaggaaaaagaccatcaagataatcttagaatatgctgacaaaattttcacctatatctttatactagaaatgctgctgaaatggatagcctatggatacaaaacatattttactaatgcttggtgctggctcgatttcctcattgtggacgtaagtttggtcaccttggtggctaacacactcggatatagcgatttgggccctattaagagcctcaggactctgagagcgctcagaccacttagagcgctaagtaggttcgaagggatgcgcgtggttgtgaacgccctgatcggcgccattccctctataatgaatgtgctgctggtgtgcctgatcttttggctgatcttcagcattatgggggtcaacctgtttgcgggaaaattctacgaatgcatcaatactacagacgggagcagatttcctgcatcccaggtacccaatcgtagtgagtgttttgctctaatgaacgtctctcagaatgtgagatggaagaatcttaaggttaattttgataatgtgggcctggggtacctgtccctgctgcaggtggccacattcaaaggttggactatcataatgtatgccgctgtagacagtgtaaatgtcgacaagcaacccaaatacgagtacagtctctacatgtatatttacttcgtggtgttcattatctttggctctttttttacgctgaacctcttcattggcgtaatcatcgacaactttaaccagcaaaagaagaagctcggaggtcaggacatcttcatgacagaagaacagaaaaaatactataacgccatgaagaagctaggtagtaaaaagccccagaagccaatcccaagaccaggcaacaagatccagggatgcatctttgatctcgtaaccaatcaggcttttgatattagcattatggttttaatctgtttgaatatggttactatgatggtggagaaagagggtcagtcacaacacatgaccgaggtgctgtactggatcaacgtagtttttatcatcctcttcacaggcgaatgcgtgttgaagctcatcagtctgaggcattactacttcactgtggggtggaacattttcgattttgtggtcgttatcatcagtattgtgggcatgtttcttgcagatctgatcgaaacttactttgtgagtcccacactgtttagggtgatccggctggccaggatcggaaggattcttcggctggttaaaggggccaaaggcatccggacgctgctctttgcactgatgatgtctctgccagctctctttaacataggccttctactttttttggtgatgtttatctatgcaatttttggaatgagcaactttgcatacgttaagaaggaggatggtatcaacgatatgttcaattttgaaacgttcggcaattcgatgatttgcctgttccaaattactacgtccgccggatgggatgggttgctggctccaatcttaaattccaaaccccctgactgtgatcctaaaaaagtgcaccctggctcctcagtggaaggggactgcggcaatcccagcgtgggtatcttctacttcgtttcatacatcatcatctcctttctggttgtggtcaacatgtacatcgccgtgatactagaaaacttcagcgtcgctaccgaagaatctaccgaacccttgtccgaggacgatttcgagatgttttatgaggtgtgggagaagtttgatccggacgccacccagttcattgagttcagcaaactgtccgactttgctgccgctctagatccccctttgctgattgcaaaaccaaataaagtgcagctcattgctatggatctaccgatggtttccggggatcggatccactgtctcgatattctcttcgcatttaccaagagagtgctaggagagtcaggagaaatggactccctccgtagccaaatggaggagaggttcatgagcgctaaccctagcaaagtgtcatacgagcctatcaccaccacgcttaagaggaaacaggaagacgtgagcgccactgtcattcaaagggcctacagacggtacagactgcggcagaatgttaaaaacatttcttcaatatacatcaaagacggggatcgggatgatgatctgcttaacaaaaaagatatggcattcgataatgttaacgaaaactctagcccagagaaaactgatgctaccagctctaccacgagccccccatcctacgattctgtcacaaaacccgacaaagaaaagtatgagcaggatcgaactgagaaagaagacaagggcaaggactcgaaggaatccaaaaagtag

SEQ ID NO: 300533 - DNA, 5934 bp, Artificial Sequence
  derived and/or modified sequence
atggccatgctgcccccacctggcccccagagctttgtgcacttcaccaagcagagcctggccctgattgagcagagaattgctgagaggaagagcaaggagcccaaggaggagaagaaggatgatgatgaggaggcccccaagcccagcagtgacctggaggccggcaagcagctgcccttcatctatggagacatccccccaggcatggtgtctgagcccctggaggacctggacccctactatgctgacaagaagaccttcatcgtgctgaacaagggcaagaccatcttccgcttcaatgccaccccagccctgtacatgctgagccccttcagccccctgcggcgcatcagcatcaagatcctggtgcacagcctcttctccatgctgatcatgtgcaccatcctgaccaactgcatcttcatgaccatgaacaaccccccagactggaccaagaatgtggagtacaccttcaccggcatctacacctttgagagcctggtgaagatcctggcccggggcttctgtgtgggggagttcaccttcctgcgggacccctggaactggctggactttgtggtgattgtgtttgcctacctgacagaatttgtgaacctgggcaatgtgtctgccctgcggaccttccgggtgctgcgggccctgaagaccatcagcgtcatccctggcctgaagaccatcgtgggcgccctgatccagagcgtgaagaagctgagtgatgtgatgatcctgaccgtcttctgcctgtctgtgtttgccctgattggcctgcagctgttcatgggcaacctgaagcacaagtgcttcaggaacagcctggagaacaatgagaccctggagagcatcatgaacaccctggagagcgaggaggacttcaggaagtacttctactacctggagggcagcaaggatgccctgctgtgtggcttcagcacagattctggccagtgcccagagggctacacctgtgtgaagattggaagaaatccagactatggctacaccagctttgacaccttctcctgggccttcctggccctcttccggctgatgacccaggactactgggagaacctgtaccagcagaccctgcgggccgccggcaagacctacatgatcttctttgtggtggtgatcttcctgggcagcttctacctgatcaacctgatcctggccgtggtggccatggcctatgaggagcagaaccaggccaacatcgaggaggccaagcagaaggagctggagttccagcagatgctggaccggctgaagaaggagcaggaggaggccgaggccatcgctgctgctgctgctgagtacaccagcatcagaagaagccgcatcatgggcctgtctgagagcagcagcgagaccagcaagctgagcagcaagagcgccaaggagaggaggaacagaaggaagaagaagaaccagaagaagctgagcagcggggaggagaagggagatgctgagaagctgagcaagtctgagagcgaggacagcatccggaggaagagcttccacctgggcgtggagggccaccggcgggcccacgagaagaggctgagcacccccaaccagagccccctgagcatccggggcagcctcttcagcgcccggcgcagcagcaggaccagcctcttctccttcaagggccggggccgggacatcggcagcgagacagaatttgctgatgatgagcacagcatctttggagacaatgaaagccggcggggcagcctgtttgtgccccaccggccccaggagaggaggagcagcaacatcagccaggccagccgcagcccccccatgctgcctgtgaatggcaagatgcacagcgctgtggactgcaatggagtggtgtccctggtggatggccgcagcgccctgatgctgcccaacggccagctgctgcctgagggcaccaccaaccagatccacaagaagaggcgctgcagcagctacctgctgtctgaggacatgctgaatgaccccaacctgcggcagagggccatgagccgggccagcatcctgaccaacacagtggaggagctggaggagagccggcagaagtgccccccctggtggtacagatttgcccacaagttcctgatctggaactgcagcccctactggatcaagttcaagaagtgcatctacttcatcgtgatggacccctttgtggacctggccatcaccatctgcatcgtgctgaacaccctcttcatggccatggagcaccaccccatgacagaggagttcaagaatgtgctggccatcggcaacctggtgttcaccggcatctttgctgctgagatggtgctgaagctgattgccatggacccctatgagtacttccaggtgggctggaacatctttgacagcctcatcgtgaccctgagcctggtggagctgttcctggctgatgtggagggcctgtctgtgctgcgctccttccggctgctgcgggtcttcaagctggccaagtcctggcccaccctgaacatgctgatcaagatcatcggcaacagcgtgggcgccctgggcaacctgaccctggtgctggccatcatcgtgttcatctttgctgtggtgggcatgcagctgtttgggaagagctacaaggaatgtgtgtgcaagatcaatgatgactgcaccctgccccgctggcacatgaatgacttcttccacagcttcctgattgtgttccgggtgctgtgtggggagtggattgagaccatgtgggactgcatggaggtggccggccaggccatgtgcctgattgtgtacatgatggtgatggtgattggcaacctggtggtgctgaacctcttcctggccctgctgctgagcagcttcagcagtgacaacctgacagccatcgaggaggaccctgatgccaacaacctgcagattgctgtgacccgcatcaagaagggcatcaactacgtgaagcagaccctgcgggagttcatcctgaaggccttcagcaagaagcccaagatcagccgggagatccggcaggccgaggacctgaacaccaagaaggagaactacatcagcaaccacaccctggccgagatgagcaagggccacaacttcctgaaggagaaggacaagatcagcggcttcggcagctctgtggacaagcacctgatggaggacagtgatggccagagcttcatccacaaccccagcctgactgtgacagtgcccatcgcccctggagagagtgacctggagaacatgaatgctgaggagctgagcagtgacagcgacagcgagtacagcaaggtgcggctgaacagaagcagcagcagtgaatgttccacagtggacaaccccctgcccggggagggggaggaggccgaggccgagcccatgaacagtgatgagcctgaggcctgcttcacagatggctgtgtgtggaggttcagctgctgccaggtgaacattgaaagtggcaagggcaagatctggtggaacatcaggaagacctgctacaagatcgtggagcacagctggtttgagagcttcatcgtgctgatgatcctgctgagcagcggggccctggcctttgaggacatctacattgaaaggaagaagaccatcaagatcatcctggagtatgctgacaagatcttcacctacatcttcatcctggagatgctgctgaagtggatcgcctacggctacaagacctacttcaccaatgcctggtgctggctggacttcctgattgtggatgtgtccctggtgaccctggtggccaacaccctgggctacagcgacctgggccccatcaagagcctgcggaccctgcgggccctgcggcccctgcgggccctgagcagatttgagggcatgagggtggtggtgaatgccctgattggagccatccccagcatcatgaatgtgctgctggtgtgcctgatcttctggctgatcttcagcatcatgggcgtgaacctgtttgctgggaagttctatgagtgcatcaacaccacagatggcagccgcttccctgccagccaggtgcccaacagaagtgagtgctttgccctgatgaatgtgtcccagaatgtgcgctggaagaacctgaaggtgaactttgacaacgtgggcctgggctacctgagcctgctgcaggtggccaccttcaagggctggaccatcatcatgtatgctgctgtggacagcgtgaatgtggacaagcagcccaagtatgagtacagcctgtacatgtacatctactttgtggtgttcatcatcttcggcagcttcttcaccctgaacctcttcatcggggtcatcatcgacaacttcaaccagcagaagaagaagctgggcggccaggacatcttcatgacagaggagcagaagaagtactacaatgccatgaagaagctgggcagcaagaagccccagaagcccatccccaggcctggcaacaagatccagggctgcatctttgacctggtgaccaaccaggcctttgacatcagcatcatggtgctgatctgcctgaacatggtgaccatgatggtggagaaggagggccagagccagcacatgacagaggtgctgtactggatcaacgtggtgttcatcatcctcttcaccggggagtgtgtgctgaagctgatcagcctgcggcactactacttcaccgtgggctggaacatctttgattttgtggtggtgatcatcagcatcgtgggcatgttcctggccgacctgattgagacctactttgtgagccccaccctcttccgggtcatccggctggcccgcatcggccgcatcctgcggctggtgaagggggccaagggcatccgcaccctgctgtttgccctgatgatgagcctgcctgccctcttcaacatcggcctgctgctcttcctggtgatgttcatctatgccatcttcggcatgagcaactttgcctacgtgaagaaggaggatggcatcaatgacatgttcaactttgagacctttggaaacagcatgatctgcctcttccagatcaccaccagcgctggctgggatggcctgctggcccccatcctgaacagcaagcccccagactgtgaccccaagaaggtgcaccctggcagctctgtggagggggactgtggcaaccccagcgtgggcatcttctactttgtgtcctacatcatcatctccttcctggtggtggtgaacatgtacatcgccgtcatcctggagaacttctctgtggccacagaggagagcacagagcccctgtctgaagatgactttgagatgttttatgaggtgtgggagaagtttgatcctgatgccacccagttcatcgagttcagcaagctgagtgactttgctgctgccctggacccccccctgctgattgccaagcccaacaaggtgcagctgattgccatggacctgcccatggtgtctggggaccgcatccactgcctggacatcctgtttgccttcaccaagagggtgctgggggagagcggggagatggacagcctgcggagccagatggaggagcgcttcatgtctgccaaccccagcaaggtgtcctatgagcccatcaccaccaccctgaagaggaagcaggaggatgtgtctgccaccgtcatccagagggcctaccgccgctaccgcctgcggcagaatgtgaagaacatcagcagcatctacatcaaggatggagacagagatgatgacctgctgaacaagaaggacatggcctttgacaacgtgaatgaaaacagcagccctgagaagacagatgccaccagcagcaccaccagcccccccagctatgattctgtgaccaagccagacaaggagaagtatgagcaggacagaacagagaaggaggacaagggcaaggacagcaaggagagcaagaagtag

SEQ ID NO: 300534 - DNA, 5934 bp, Artificial Sequence
  derived and/or modified sequence
atggccatgctgcccccccccggcccccagagcttcgtgcacttcaccaagcagtcactggctctgatcgagcagcggattgctgagaggaaaagcaaggaacccaaagaagaaaagaaggacgacgacgaagaagcccccaaacccagtagcgacctagaggctggcaagcagttgcccttcatctatggtgatatcccccctgggatggtgagcgaaccactggaagatctagatccctattacgctgataaaaagacattcatcgtgttaaacaagggcaagacaattttccgcttcaacgccacgcccgctctgtacatgttgtcccccttttccccactccgccgcatcagcatcaaaattcttgtgcatagtctgttttcgatgctgatcatgtgcacaatacttacaaattgcatttttatgactatgaacaaccccccggactggacaaagaacgtcgaatatacattcaccgggatctacacctttgagtccctggtgaaaatcctggcgcggggattttgcgttggcgaattcacatttctgagggatccctggaactggttggactttgtggtaatcgtcttcgcctatcttaccgaatttgtgaatctcggcaacgtgtccgcactcagaactttcagggtactgagagccctcaagaccataagcgtgatccctgggctgaagacgatcgtgggagcacttatccagtctgttaaaaagttgtccgacgtcatgatattgaccgtgttctgcctttccgtatttgcgctcatcggattgcagttgtttatgggtaatttgaagcacaagtgtttcaggaactccctcgaaaacaatgaaaccttggaaagcatcatgaatactctggagtccgaagaggatttcagaaaatacttttattacttggagggttccaaagacgcactgctgtgcgggttttcaaccgactccgggcagtgtccagaaggctacacgtgtgtgaagattggcaggaatccagactacggttatacatctttcgacacattctcttgggccttcttggccctcttccggcttatgacccaggattattgggagaatctctatcaacagactctaagggcagcgggcaaaacttatatgattttttttgtcgtggtaatcttcctcggatcattctatctgattaatttaatcctcgctgtggtggccatggcgtacgaggagcagaaccaggctaacatcgaggaagcgaagcagaaggagctcgaattccagcagatgctagatcgactgaaaaaagaacaagaggaggctgaagcgattgcagcagcagccgccgaatacacatctatccgtcgttcccgcatcatggggttgtccgagtctagctctgagaccagcaaactgagttccaagagcgccaaagaacgccgtaatagacgaaagaagaagaatcagaaaaagctctcctcaggtgaggagaagggagatgccgaaaaactgtccaagtctgaaagcgaggattccattaggagaaagtctttccatctgggcgtggagggacaccggcgcgctcacgaaaagaggctgagcaccccgaaccaatccccactgagtatccggggtagcctcttttccgccaggagatcaagtaggacgagcttgttttctttcaagggacggggtcgggatatcgggtcagagacagaattcgcggatgatgagcattcaatatttggtgacaatgagagtagacgcggctcactcttcgtcccacaccgcccacaggagaggcgctcctccaatatttcacaggcatcccgctcccctccgatgttgcccgtgaacggcaaaatgcacagcgccgtggactgtaacggagtggtgagcttagtggacgggagatcggcgttaatgctcccgaacgggcaacttctgcccgaaggcaccaccaatcagatccacaaaaagcggcgctgttcctcatatttgctgtccgaagacatgctgaacgacccgaatctaaggcagagggcaatgagccgggcaagcattctcactaacacagtggaggaactcgaagaatccagacagaagtgtccgccatggtggtatcgctttgcccacaagttcctaatttggaactgcagtccttactggataaagttcaagaaatgtatctatttcatagtgatggacccgtttgtcgatctcgccataaccatatgcatcgtcctgaataccctgttcatggcgatggagcatcaccctatgaccgaagagtttaagaacgtgttggcaatcggaaatcttgtttttacgggaatcttcgctgcggaaatggtgctgaagctgatagcgatggacccttatgagtacttccaagtcgggtggaacattttcgattccttgattgtgactctgagcctagtagaattgtttctagctgatgtcgaagggctgtctgttctccgttcgttccgactgctgagagtgtttaagcttgcgaagtcatggcctacgctaaacatgcttatcaagattatcggaaattccgtcggcgccctcggtaacctgaccctggtattagctattatcgtattcatctttgccgtcgtcggaatgcagctgtttggcaaatcttacaaagagtgcgtctgcaagatcaatgatgactgcacactccccagatggcatatgaacgactttttccatagcttcctgattgtttttcgggtgctctgtggcgagtggatcgagaccatgtgggattgcatggaggttgcaggacaagccatgtgtctcatcgtgtacatgatggttatggtcattggaaacctggtggtactgaatttgttcctggcactgctactgagctcatttagctcggataacctcaccgctatagaggaggatcctgatgccaataatctccagatcgccgtgacccgtatcaaaaagggcatcaactatgtcaagcaaactctaagggagttcatccttaaggctttctcaaagaagccaaaaatttctcgagaaattcggcaagcagaggatcttaacactaagaaagagaactacatctcaaatcacacgttggccgagatgagcaaaggtcataattttctgaaagaaaaggataaaatatctggctttggctcttctgtggacaagcacctaatggaggatagtgacggccaatccttcattcacaatccatccttaaccgtaactgtgcccatcgcccctggagaaagtgatctggagaatatgaatgccgaagaactgtctagcgattcagatagcgaatactccaaagtcaggttgaatcggtcaagcagctcagaatgttccaccgtggacaatcccctgcccggggaaggggaggaggctgaagctgagcctatgaattctgatgagcctgaagcctgtttcaccgacggctgtgtgtggcggttctcgtgttgccaagtgaatatcgagtccggcaaagggaaaatctggtggaacattagaaagacctgttacaagatagttgagcacagttggtttgaatcctttattgtcttgatgatcttgctctcaagtggagcactggccttcgaagacatctacatcgagcgaaagaagacgattaaaatcattctcgaatatgccgataagatcttcacctatatattcatcctagagatgctgctgaaatggatcgcctacggttataagacttacttcacgaacgcctggtgctggctcgacttcctgattgtggatgtgagcctcgttaccctcgtcgctaataccttgggatattccgatttggggccgatcaagtcattgcgcacccttcgcgctctgcggcccctccgtgcactgagtaggtttgagggtatgagagtagtggtgaacgctttgattggcgccataccatccataatgaacgtgctgctagtttgtctgatcttctggctgattttttcaattatgggcgtcaatcttttcgctgggaaattttacgagtgtattaatacaacagatggaagtaggttccccgcttcccaggtgccgaacaggtctgaatgtttcgctctgatgaacgtgagccagaacgtgaggtggaagaatctcaaggtaaactttgataacgtgggactggggtacctgagcctcttgcaagtggctacttttaaaggttggaccattatcatgtacgcagctgtagatagcgtgaatgtggataaacagcctaagtacgagtattcactgtacatgtacatatactttgtggtcttcattatttttggctccttttttacacttaacctttttataggcgtgattattgacaactttaaccagcagaagaagaagttgggaggacaggatatcttcatgacagaggagcagaagaaatactataatgccatgaagaaactagggtctaaaaagcctcagaaacctatcccccgcccaggcaataagattcagggttgcatctttgacctggtcactaaccaagcattcgacatctccatcatggtcctgatctgtttaaatatggttactatgatggtagagaaagaagggcagtcccagcacatgacagaagtactctattggataaacgttgtgttcatcattctttttacaggcgaatgtgttctgaagttaatcagccttcgccactactactttacagtcggatggaatatcttcgactttgttgtggtaataatatctatcgttgggatgttcttggcagatctgatcgagacatatttcgtttcgcccactttattccgggtgattcgcttggccagaatcgggcggatattaagactggtgaaaggagcgaaaggaattagaactttattgttcgccctgatgatgtcccttcccgcactcttcaacatcggccttcttctgttcctggtgatgttcatctacgctatctttggcatgtcaaactttgcttacgtcaagaaggaagatggcatcaatgacatgttcaactttgagaccttcggaaatagcatgatatgtctgttccagataaccacgtcggcaggttgggacggtcttcttgctccaatcttaaattcaaaaccaccagattgtgaccccaaaaaggtacaccctgggagctccgtggagggggattgcggcaatccttctgtgggaatcttctattttgtgtcctatatcatcatctctttcctcgtggtggtgaacatgtatatcgccgtgattcttgaaaactttagtgtagcgaccgaggagtccaccgagccactatccgaggacgatttcgaaatgttttatgaggtctgggagaagttcgaccctgacgcaacccagttcatcgaattttccaaattgtcagatttcgccgctgcacttgatcctcctctcttgatcgcaaagcccaacaaagttcaacttatagctatggatttaccaatggtgagtggagatcggatccactgcctagacatcctattcgcattcaccaaaagagtcctcggagagagtggcgagatggacagtctgcggagccagatggaggagagattcatgagcgctaaccccagtaaagtttcatacgaaccaattacaacaacattaaagcggaaacaggaggatgtgtcagccaccgtaatacagagagcatataggcggtacaggttgagacaaaatgtgaagaatatctccagcatttacattaaagacggggatagggacgatgacctgctgaacaagaaggacatggcattcgataatgtgaacgaaaattcatctccggaaaagaccgatgcaacgtcaagcacaactagtcccccatcttatgacagcgtcaccaagcccgataaggaaaagtacgagcaggatcgtacagagaaggaggacaaagggaaggacagcaaggaatcaaagaaatag

SEQ ID NO: 300535 - DNA, 5933 bp, Artificial Sequence
  derived and/or modified sequence
atggccatgctgccccctcctggccctcagtctttcgtacactttacaaaacagagtctggcgctaatcgaacagaggatagcggagaggaagagcaaggagccaaaggaggagaaaaaggatgatgatgaagaggcgccaaaaccgtcatcagacctcgaagcaggtaagcaactgccatttatctacggagatattccccctgggatggtgtccgagccactcgaggacctggacccatattatgctgataagaagacattcattgttctgaacaagggtaaaacgatctttcgatttaacgccacccctgcgctgtacatgttatcccccttcagccccctgcggagaatcagcatcaaaatcctggttcattctctgtttagcatgctgatcatgtgcactatactcacaaactgcatcttcatgacaatgaataatcccccagactggacaaaaaatgtagagtatactttcactggcatctatacattcgaatcgcttgtgaagatactagcgaggggtttttgcgtgggtgagtttaccttcttgagagacccttggaactggctcgacttcgtggtgatcgtgtttgcatatctgacagagtttgtgaatctgggtaatgtgtctgctttgcgtacattccgcgtactgcgtgcgcttaaaacgatcagcgttatacctgggctcaaaacgatcgttggagccctgattcagtcggtgaagaagttgtccgatgtcatgatacttacagtgttttgtttatctgtcttcgctctgatcggactgcaactgtttatgggtaatctaaagcataagtgctttcgcaacagtctggaaaataatgagacactggaatccatcatgaatactcttgagtccgaagaggattttcgaaagtacttctattatctagagggttcgaaggatgcccttctgtgtggtttcagcaccgactcaggtcagtgcccagaaggctatacctgtgtcaagatcggacgaaacccagattacgggtatacgtcattcgataccttttcttgggcttttctggccctgtttcgactcatgactcaggactactgggagaacctgtaccagcagactctccgggctgccggtaagacctatatgatcttctttgtcgtagtcatctttctgggctctttttatctgattaacctcatccttgcagtggtcgcaatggcctacgaagagcagaaccaggcgaacattgaagaagctaaacaaaaagagctcgagtttcagcaaatgctcgatcggttgaagaaggagcaagaggaggcggaggctatagccgcagcagcggcagaatatacttcaatcaggagatctaggatcatgggtctctccgaatcctcctcagagaccagtaagctgagtagcaagagcgccaaagagcgaaggaacaggcgcaagaaaaaaaaccagaagaagctgtcatccggggaagagaagggagatgcagagaagcttagcaagtctgagagtgaggattcaatacgtaggaagagtttccacttgggagtggaaggccaccgcagagctcacgagaaacgtctgtctactccaaaccagagtcctctgagtatccgcggatccctgtttagcgccagacgctcgtctcgaacatccctgttctctttcaaaggcaggggaagagacataggctcggagacagagtttgctgatgatgaacactctatctttggcgataacgaaagtaggaggggcagtttatttgtgccccatcgccctcaggaacgtcgtagtagtaatatttctcaggccagtaggtcgcctccaatgttgccggtgaacgggaagatgcactcagcagttgattgcaacggcgttgtaagccttgtcgatgggcgatcggccctgatgctaccaaacggacaactgttgccagagggcactactaatcagattcataaaaaaagacgctgctcctcctatctcctgtctgaggatatgctcaacgatcccaatctccggcagagggccatgtctcgcgcttccatccttacaaacacagtggaagaactggaagaaagcagacagaagtgtcccccttggtggtatagatttgctcacaagtttctaatttggaattgctctccttactggattaagttcaagaagtgtatttacttcatcgtgatggatcctttcgtcgacctagccatcaccatatgtatagtcttgaatactctatttatggctatggagcatcatcccatgaccgaagagttcaagaacgtactagctatcgggaatctcgtattcactggcatctttgcagccgagatggttctgaagctgattgccatggatccttacgagtactttcaggtcggatggaatatcttcgactctttgatcgtgacgctgtcgctagttgaactgttcctggcggatgtggaaggcttgagtgtgctgagatcctttcgactcctgagagtgttcaagctggccaagtcatggccaaccctgaatatgttgataaaaattatagggaacagcgtgggcgctctagggaatctcacacttgtgcttgccattatcgtgttcatcttcgctgttgtgggcatgcagctttttggcaaatcttacaaggaatgcgtgtgcaagatcaatgacgattgtactttaccacggtggcacatgaacgacttttttcacagttttctgattgtctttagggtgctttgtggtgagtggattgagacaatgtgggactgtatggaagtcgccggacaggcaatgtgtctgattgtgtacatgatggtcatggttattggcaatctcgtggtccttaatctttttctggcattactgctttcaagctttagcagcgacaacttgacagcgattgaggaagatccagacgccaataatcttcagattgccgtgacaagaatcaagaaggggataaattatgttaaacaaacacttcgggaattcatcctcaaagcatttagtaagaaaccaaagattagccgcgaaataaggcaggccgaggatctgaataccaaaaaagagaattacattagcaaccacactcttgcagagatgtctaaaggtcataatttcctcaaagaaaaagataagatcagcgggttcgggagttctgtggataaacacctgatggaggattcggatggccaatcttttattcacaacccatccctgacagtcacagtgcccatcgcccctggagagtccgacttagaaaatatgaatgctgaggagctctcatcagatagcgactctgagtatagcaaggtgagactcaataggtcatcatcgtctgagtgtagcaccgttgacaatcctctccccggagagggagaggaagctgaagccgagcccatgaactccgacgagcccgaggcctgtttcactgacggttgcgtgtggcgcttttcatgctgtcaggtgaacattgaaagcggcaagggcaaaatttggtggaatattcgaaaaacatgttacaaaatcgttgagcatagttggtttgaaagcttcattgtccttatgattctcctgagctcgggagcgctggcgttcgaagacatctatatagagagaaaaaaaacaattaaaatcatactggagtacgcggataaaatttttacatacatcttcattctggaaatgttgctgaagtggattgcttatggatacaagacttattttactaatgcttggtgttggctagatttcctgatcgttgatgtgtcgctggtgacactagttgccaataccctgggctatagcgatttagggcctattaaatcccttcggaccctgagggccctgagacctctgcgggcacttagtcgatttgagggcatgcgtgtggtcgttaatgcgttgatcggggcaatcccttctatcatgaacgtgctgctagtgtgtcttattttttggctgatcttcagcattatgggcgtgaatctattcgccggaaagttctatgagtgtattaatactacagacgggagcagatttcctgctagccaggttccaaatcggtcagaatgcttcgccctgatgaacgtgagccagaacgttagatggaagaacttaaaagtgaattttgataatgtaggtttgggatatctgtcgctgcttcaagtcgccacatttaaaggttggaccattataatgtatgctgccgtggattcagttaacgtcgataaacagcctaaatatgagtactcactctacatgtacatttactttgtggtgtttattatttttggatcgtttttcacactgaacctcttcatcggtgtcatcattgataattttaatcagcagaaaaagaaactgggagggcaagatatattcatgactgaggaacagaaaaagtattacaatgctatgaaaaaacttgggtccaagaagccccaaaaaccaattcctcgacccggaaacaaaattcagggctgtatttttgatctggttacaaatcaagccttcgatattagcattatggttcttatctgcctgaatatggtcaccatgatggtggagaaggagggccagtcacaacacatgacggaggtgctgtactggataaatgtggtttttatcattctgttcaccggggaatgcgtactgaaactgatctctctgaggcactactacttcaccgtcggctggaatattttcgacttcgttgtagtgatcatatccattgtgggtatgtttttggccgacttaattgagacatacttcgtatcccccacactttttcgtgtgattcgcctggcgcgaattggcaggatccttcgcctggtgaagggagccaaagggattagaacccttctgtttgccctgatgatgtctcttcctgctctctttaatatcggactgttgctgttcctggtgatgtttatttatgccatatttggtatgtctaatttcgcttacgtaaagaaggaagatggcattaatgacatgtttaacttcgaaacattcggtaattcaatgatttgcctctttcagatcacaacgagcgccggatgggatgggctgctagccccaatccttaacagcaaaccaccagattgcgatcccaagaaagtccatcctggctcctcagtcgagggcgactgcggaaaccccagcgtcgggatcttctattttgtgagttatatcatcatctcgtttttagtggtcgtgaatatgtacatcgccgtgattttagaaaacttctctgtcgctacagaggagtccactgaaccgttgtccgaggatgatttcgagatgttctatgaagtgtgggaaaagttcgaccctgacgccacccaatttatagagttctcaaaattgtctgacttcgccgctgctttagatcctccgctgttgatcgcaaagcccaacaaggttcagctcattgctatggatttgcctatggtctccggcgataggatccactgcctagatattctcttcgcatttacaaagagggtgttaggagagagcggcgaaatggacagcctgagaagccaaatggaggaacggttcatgagcgcaaatcctagcaaagtgagctacgagccgatcacaaccactctgaagagaaaacaggaagacgtctcagccaccgtcattcagcgagcatatcggcgttacagactgagacagaacgtgaagaacatctcgtcgatctacattaaagacggggatagggatgatgatctgctgaacaagaaggacatggccttcgataatgtaaacgaaaactcctcgcccgaaaagaccgacgctacctcatccactacgtccccaccctcctacgattccgtgactaaaccagacaaggagaaatatgaacaagatcggaccgagaaagaagataaaggcaaggattccaaggagtcgaagaaata

SEQ ID NO: 300536 - DNA, 9768 bp, Artificial Sequence
  derived and/or modified sequence
gggaggcggggctgctacctccacgggcgcgccctggcaggaggggcgcagtctgcttgcaggcggtcgccagcgctccagcggcggctgtcggctttccaattccgccagctcggctgaggctgggctagcctgggtgccagtggctgctagcggcaggcgtcccctgagcaacaggagcccagagaaaaagaagcagccctgagagagcgccggggaaggagaggcccgcgccctctcctggagccagattctgcaggtgcactgggtggggatgatcggcgggctaggttgcaagcctcttatgtgaggagctgaagaggaattaaaatatacaggatgaaaagatggcaatgttgcctcccccaggacctcagagctttgtccatttcacaaaacagtctcttgccctcattgaacaacgcattgctgaaagaaaatcaaaggaacccaaagaagaaaagaaagatgatgatgaagaagccccaaagccaagcagtgacttggaagctggcaaacagctgcccttcatctatggggacattcctcccggcatggtgtcagagcccctggaggacttggacccctactatgcagacaaaaagactttcatagtattgaacaaagggaaaacaatcttccgtttcaatgccacacctgctttatatatgctttctcctttcagtcctctaagaagaatatctattaagattttagtacactccttattcagcatgctcatcatgtgcactattctgacaaactgcatatttatgaccatgaataacccaccggactggaccaaaaatgtcgagtacacttttactggaatatatacttttgaatcacttgtaaaaatccttgcaagaggcttctgtgtaggagaattcacttttcttcgtgacccgtggaactggctggattttgtcgtcattgtttttgcgtatttaacagaatttgtaaacctaggcaatgtttcagctcttcgaactttcagagtattgagagctttgaaaactatttctgtaatcccaggcctgaagacaattgtaggggctttgatccagtcagtgaagaagctttctgatgtcatgatcctgactgtgttctgtctgagtgtgtttgcactaattggactacagctgttcatgggaaacctgaagcataaatgttttcgaaattcacttgaaaataatgaaacattagaaagcataatgaataccctagagagtgaagaagactttagaaaatatttttattacttggaaggatccaaagatgctctcctttgtggtttcagcacagattcaggtcagtgtccagaggggtacacctgtgtgaaaattggcagaaaccctgattatggctacacgagctttgacactttcagctgggccttcttagccttgtttaggctaatgacccaagattactgggaaaacctttaccaacagacgctgcgtgctgctggcaaaacctacatgatcttctttgtcgtagtgattttcctgggctccttttatctaataaacttgatcctggctgtggttgccatggcatatgaagaacagaaccaggcaaacattgaagaagctaaacagaaagaattagaatttcaacagatgttagaccgtcttaaaaaagagcaagaagaagctgaggcaattgcagcggcagcggctgaatatacaagtattaggagaagcagaattatgggcctctcagagagttcttctgaaacatccaaactgagctctaaaagtgctaaagaaagaagaaacagaagaaagaaaaagaatcaaaagaagctctccagtggagaggaaaagggagatgctgagaaattgtcgaaatcagaatcagaggacagcatcagaagaaaaagtttccaccttggtgtcgaagggcataggcgagcacatgaaaagaggttgtctacccccaatcagtcaccactcagcattcgtggctccttgttttctgcaaggcgaagcagcagaacaagtctttttagtttcaaaggcagaggaagagatataggatctgagactgaatttgccgatgatgagcacagcatttttggagacaatgagagcagaaggggctcactgtttgtgccccacagaccccaggagcgacgcagcagtaacatcagccaagccagtaggtccccaccaatgctgccggtgaacgggaaaatgcacagtgctgtggactgcaacggtgtggtctccctggttgatggacgctcagccctcatgctccccaatggacagcttctgccagagggcacgaccaatcaaatacacaagaaaaggcgttgtagttcctatctcctttcagaggatatgctgaatgatcccaacctcagacagagagcaatgagtagagcaagcatattaacaaacactgtggaagaacttgaagagtccagacaaaaatgtccaccttggtggtacagatttgcacacaaattcttgatctggaattgctctccatattggataaaattcaaaaagtgtatctattttattgtaatggatccttttgtagatcttgcaattaccatttgcatagttttaaacacattatttatggctatggaacaccacccaatgactgaggaattcaaaaatgtacttgctataggaaatttggtctttactggaatctttgcagctgaaatggtattaaaactgattgccatggatccatatgagtatttccaagtaggctggaatatttttgacagccttattgtgactttaagtttagtggagctctttctagcagatgtggaaggattgtcagttctgcgatcattcagactgctccgagtcttcaagttggcaaaatcctggccaacattgaacatgctgattaagatcattggtaactcagtaggggctctaggtaacctcaccttagtgttggccatcatcgtcttcatttttgctgtggtcggcatgcagctctttggtaagagctacaaagaatgtgtctgcaagatcaatgatgactgtacgctcccacggtggcacatgaacgacttcttccactccttcctgattgtgttccgcgtgctgtgtggagagtggatagagaccatgtgggactgtatggaggtcgctggtcaagctatgtgccttattgtttacatgatggtcatggtcattggaaacctggtggtcctaaacctatttctggccttattattgagctcatttagttcagacaatcttacagcaattgaagaagaccctgatgcaaacaacctccagattgcagtgactagaattaaaaagggaataaattatgtgaaacaaaccttacgtgaatttattctaaaagcattttccaaaaagccaaagatttccagggagataagacaagcagaagatctgaatactaagaaggaaaactatatttctaaccatacacttgctgaaatgagcaaaggtcacaatttcctcaaggaaaaagataaaatcagtggttttggaagcagcgtggacaaacacttgatggaagacagtgatggtcaatcatttattcacaatcccagcctcacagtgacagtgccaattgcacctggggaatccgatttggaaaatatgaatgctgaggaacttagcagtgattcggatagtgaatacagcaaagtgagattaaaccggtcaagctcctcagagtgcagcacagttgataaccctttgcctggagaaggagaagaagcagaggctgaacctatgaattccgatgagccagaggcctgtttcacagatggttgtgtatggaggttctcatgctgccaagttaacatagagtcagggaaaggaaaaatctggtggaacatcaggaaaacctgctacaagattgttgaacacagttggtttgaaagcttcattgtcctcatgatcctgctcagcagtggtgccctggcttttgaagatatttatattgaaaggaaaaagaccattaagattatcctggagtatgcagacaagatcttcacttacatcttcattctggaaatgcttctaaaatggatagcatatggttataaaacatatttcaccaatgcctggtgttggctggatttcctaattgttgatgtttctttggttactttagtggcaaacactcttggctactcagatcttggccccattaaatcccttcggacactgagagctttaagacctctaagagccttatctagatttgaaggaatgagggtcgttgtgaatgcactcataggagcaattccttccatcatgaatgtgctacttgtgtgtcttatattctggctgatattcagcatcatgggagtaaatttgtttgctggcaagttctatgagtgtattaacaccacagatgggtcacggtttcctgcaagtcaagttccaaatcgttccgaatgttttgcccttatgaatgttagtcaaaatgtgcgatggaaaaacctgaaagtgaactttgataatgtcggacttggttacctatctctgcttcaagttgcaacttttaagggatggacgattattatgtatgcagcagtggattctgttaatgtagacaagcagcccaaatatgaatatagcctctacatgtatatttattttgtcgtctttatcatctttgggtcattcttcactttgaacttgttcattggtgtcatcatagataatttcaaccaacagaaaaagaagcttggaggtcaagacatctttatgacagaagaacagaagaaatactataatgcaatgaaaaagctggggtccaagaagccacaaaagccaattcctcgaccagggaacaaaatccaaggatgtatatttgacctagtgacaaatcaagcctttgatattagtatcatggttcttatctgtctcaacatggtaaccatgatggtagaaaaggagggtcaaagtcaacatatgactgaagttttatattggataaatgtggtttttataatccttttcactggagaatgtgtgctaaaactgatctccctcagacactactacttcactgtaggatggaatatttttgattttgtggttgtgattatctccattgtaggtatgtttctagctgatttgattgaaacgtattttgtgtcccctaccctgttccgagtgatccgtcttgccaggattggccgaatcctacgtctagtcaaaggagcaaaggggatccgcacgctgctctttgctttgatgatgtcccttcctgcgttgtttaacatcggcctcctgctcttcctggtcatgttcatctacgccatctttggaatgtccaactttgcctatgttaaaaaggaagatggaattaatgacatgttcaattttgagacctttggcaacagtatgatttgcctgttccaaattacaacctctgctggctgggatggattgctagcacctattcttaacagtaagccacccgactgtgacccaaaaaaagttcatcctggaagttcagttgaaggagactgtggtaacccatctgttggaatattctactttgttagttatatcatcatatccttcctggttgtggtgaacatgtacattgcagtcatactggagaattttagtgttgccactgaagaaagtactgaacctctgagtgaggatgactttgagatgttctatgaggtttgggagaagtttgatcccgatgcgacccagtttatagagttctctaaactctctgattttgcagctgccctggatcctcctcttctcatagcaaaacccaacaaagtccagctcattgccatggatctgcccatggttagtggtgaccggatccattgtcttgacatcttatttgcttttacaaagcgtgttttgggtgagagtggggagatggattctcttcgttcacagatggaagaaaggttcatgtctgcaaatccttccaaagtgtcctatgaacccatcacaaccacactaaaacggaaacaagaggatgtgtctgctactgtcattcagcgtgcttatagacgttaccgcttaaggcaaaatgtcaaaaatatatcaagtatatacataaaagatggagacagagatgatgatttactcaataaaaaagatatggcttttgataatgttaatgagaactcaagtccagaaaaaacagatgccacttcatccaccacctctccaccttcatatgatagtgtaacaaagccagacaaagagaaatatgaacaagacagaacagaaaaggaagacaaagggaaagacagcaaggaaagcaaaaaatagagcttcatttttgatatattgtttacagcctgtgaaagtgatttatttgtgttaataaaactcttttgaggaagtctatgccaaaatcctttttatcaaaatattctcgaaggcagtgcagtcactaactctgatttcctaagaaaggtgggcagcattagcagatggttatttttgcactgatgattctttaagaatcgtaagagaactctgtaggaattattgattatagcatacaaaagtgattcagttttttggtttttaataaatcagaagaccatgtagaaaacttttacatctgccttgtcatcttttcacaggattgtaattagtcttgtttcccatgtaaataaacaacacacgcatacagaaaaatctattatttatctattatttggaaatcaacaaaagtatttgccttggctttgcaatgaaatgcttgatagaagtaatggacattagttatgaatgtttagttaaaatgcattattagggagcttgactttttatcaatgtacagaggttattctatattttgaggtgcttaaatttattctacattgcatcagaaccaatttatatgtgcctataaaatgccatgggattaaaaatatatgtaggctattcatttctacaaatgtttttcattcatcttgactcacatgccaacaaggataagacttacctttagagtattgtgtttcatagcctttcttctttcatatccctttttgttcatagaataaccacagaacttgaaaaattattctaagtacatattacactcctcaaaaaaaacaaagataactgagaaaaaagttattgacagaagttctatttgctattatttacatagcctaacatttgactgtgctgcccaaaatactgataatagtctcttaaactcttttgtcaaattttcctgctttcttatgcagtattgtttagtcatcctttcgctgtaagcaaagttgatgaaatccttcctgatatgcagttagttgtttgaccacggtacatacttgagcagataataacttgggcacagtatttattgcatcacttgtatacaatcccgtgtttggcaagctttcaaatcatgtaatatgacagactttacacagatatgtgtttagtatgaataaaaaagcattgaaatagggattcttgccaacttgctctcttgccaccaacttactttcctaaattatggaagtaatcttttttggatatacttcaatgtatacaatgaggaagatgtcaccttctccttaaaattctatgatgtgaaatatattttgcctcaatcaacacagtaccatgggcttctaatttatcaagcacatattcattttgcattagctgtagacatctagttttttgaaaacacctattaatagtaatttgaaaagaaataaccataatgctttttttcgtgagtttatttcaggaatatgagatctttcttctataaagttattcatgcacaggcaaaaattgagctacacaggtagaatgtagttttacttagaagatttttgtgggaggttttgaagcaaatatataaaacaactttcactaatttgctttccatatttaaaaaataataaattacatttatataataaatgtttaaagcacatattttttgttgttctggcaatttaaaaagaaagaggatttaaacgtacctatagaaacaaagatttatggttaaagaatgagatcagaagtctagaatgtttttaaattgtgatatattttacaacatccgttattactttgagacatttgtcctaatctacgtataaaactcaatctagggctaaagattctttataccatcttaggttcattcatcttaggctatttgaaccactttttaatttaatatgaaagacaccatgcagtgttttccgagactacatagatcattttatcacatacctaccaagcctgttggaaataggttttgataatttaagtagggacctatacaaaatatattacatttatcagatttttaaatacattcaattaagaatttaacatcaccttaaatttgaattcaatctaccgttatttcaaactcacaaatataactgcattatgaatacttacataatgtagtaagacaagatgtttgacaggttcgtgtgtaattttctattaatgtttttacattgccttgtttttatgtaaaataaaaaatatgggcaactggtttgttaacaacacaatttcttcttagcatttcaaaaatatatataaagttgttctttttcctatttcatgaactatgtttttttttaaaataacatggttaagttttatatatatttacgtttgtttcaggaatgtctacttgtgactttttatcaattaaaaataatatttggaagaaagagcttattaagtataagcttgaagtaaaattagacctctctttccatgtagattactgtttgtactgatggtttcacccttcagaaggcactgtcatattaatatttaaattttataatcgctgaacttattacacccaacaatacagaaaggcagttacactgaagaacttaacttagaataaaatggaagcaaacaggttttctaaaaacttttttaagtgaccaggtctcgctctgtcacccaggctagagtgcaatggcatgatcatagctctctgcagcctcaactctgggctcaagcaaccctcctgcctcagcctcccaagtagctaagactacaggtacatgccaccatgcctggctaatatttaaatttttgtagataaggggtcttgctatgttgcccaggctagtctcaaactcctggcttcaagtgttcctactgtcatgacctgccaacatgctggggttacaggcatgagccaccatgccccaaacaggtttgaacacaaatctttcggatgaaaattagagaacctaattttagctttttgatagttacctagtttgcaaaagatttgggtgacttgtgagctgtttttaaatgctgattgttgaacatcacaacccaaaatacttagcatgattttatagagttttgatagctttattaaaaagagtgaaaataaaatgcatatgtaaataaagcagttctaaatagctatttcagagaaatgttaatagaagtgctgaaagaagggccaactaaattaggatggccagggaattggcctgggtttaggacctatgtatgaaggccaccaattttttaaaaatatctgtggtttattatgttattatcttcttgaggaaaacaatcaagaattgcttcatgaaaataaataaatagccatgaatatcataaagctgtttacataggattctttacaaatttcatagatctatgaatgctcaaaatgtttgagtttgccataaattatattgtagttatattgtagttatacttgagactgacacattgtaatataatctaagaataaaagttatacaaaataaaa

SEQ ID NO: 300537 - DNA, 5934 bp, Artificial Sequence
  derived and/or modified sequence
atggccatgctgcccccccccggcccccagagcttcgtgcacttcaccaagcagagcctggccctgatcgagcagagaatcgccgagagaaagagcaaggagcccaaggaggagaagaaggacgacgacgaggaggcccccaagcccagcagcgacctggaggccggcaagcagctgcccttcatctacggcgacatcccccccggcatggtgagcgagcccctggaggacctggacccctactacgccgacaagaagaccttcatcgtgctgaacaagggcaagaccatcttcagattcaacgccacccccgccctgtacatgctgagccccttcagccccctgagaagaatcagcatcaagatcctggtgcacagcctgttcagcatgctgatcatgtgcaccatcctgaccaactgcatcttcatgaccatgaacaacccccccgactggaccaagaacgtggagtacaccttcaccggcatctacaccttcgagagcctggtgaagatcctggccagaggcttctgcgtgggcgagttcaccttcctgagagacccctggaactggctggacttcgtggtgatcgtgttcgcctacctgaccgagttcgtgaacctgggcaacgtgagcgccctgagaaccttcagagtgctgagagccctgaagaccatcagcgtgatccccggcctgaagaccatcgtgggcgccctgatccagagcgtgaagaagctgagcgacgtgatgatcctgaccgtgttctgcctgagcgtgttcgccctgatcggcctgcagctgttcatgggcaacctgaagcacaagtgcttcagaaacagcctggagaacaacgagaccctggagagcatcatgaacaccctggagagcgaggaggacttcagaaagtacttctactacctggagggcagcaaggacgccctgctgtgcggcttcagcaccgacagcggccagtgccccgagggctacacctgcgtgaagatcggcagaaaccccgactacggctacaccagcttcgacaccttcagctgggccttcctggccctgttcagactgatgacccaggactactgggagaacctgtaccagcagaccctgagagccgccggcaagacctacatgatcttcttcgtggtggtgatcttcctgggcagcttctacctgatcaacctgatcctggccgtggtggccatggcctacgaggagcagaaccaggccaacatcgaggaggccaagcagaaggagctggagttccagcagatgctggacagactgaagaaggagcaggaggaggccgaggccatcgccgccgccgccgccgagtacaccagcatcagaagaagcagaatcatgggcctgagcgagagcagcagcgagaccagcaagctgagcagcaagagcgccaaggagagaagaaacagaagaaagaagaagaaccagaagaagctgagcagcggcgaggagaagggcgacgccgagaagctgagcaagagcgagagcgaggacagcatcagaagaaagagcttccacctgggcgtggagggccacagaagagcccacgagaagagactgagcacccccaaccagagccccctgagcatcagaggcagcctgttcagcgccagaagaagcagcagaaccagcctgttcagcttcaagggcagaggcagagacatcggcagcgagaccgagttcgccgacgacgagcacagcatcttcggcgacaacgagagcagaagaggcagcctgttcgtgccccacagaccccaggagagaagaagcagcaacatcagccaggccagcagaagcccccccatgctgcccgtgaacggcaagatgcacagcgccgtggactgcaacggcgtggtgagcctggtggacggcagaagcgccctgatgctgcccaacggccagctgctgcccgagggcaccaccaaccagatccacaagaagagaagatgcagcagctacctgctgagcgaggacatgctgaacgaccccaacctgagacagagagccatgagcagagccagcatcctgaccaacaccgtggaggagctggaggagagcagacagaagtgccccccctggtggtacagattcgcccacaagttcctgatctggaactgcagcccctactggatcaagttcaagaagtgcatctacttcatcgtgatggaccccttcgtggacctggccatcaccatctgcatcgtgctgaacaccctgttcatggccatggagcaccaccccatgaccgaggagttcaagaacgtgctggccatcggcaacctggtgttcaccggcatcttcgccgccgagatggtgctgaagctgatcgccatggacccctacgagtacttccaggtgggctggaacatcttcgacagcctgatcgtgaccctgagcctggtggagctgttcctggccgacgtggagggcctgagcgtgctgagaagcttcagactgctgagagtgttcaagctggccaagagctggcccaccctgaacatgctgatcaagatcatcggcaacagcgtgggcgccctgggcaacctgaccctggtgctggccatcatcgtgttcatcttcgccgtggtgggcatgcagctgttcggcaagagctacaaggagtgcgtgtgcaagatcaacgacgactgcaccctgcccagatggcacatgaacgacttcttccacagcttcctgatcgtgttcagagtgctgtgcggcgagtggatcgagaccatgtgggactgcatggaggtggccggccaggccatgtgcctgatcgtgtacatgatggtgatggtgatcggcaacctggtggtgctgaacctgttcctggccctgctgctgagcagcttcagcagcgacaacctgaccgccatcgaggaggaccccgacgccaacaacctgcagatcgccgtgaccagaatcaagaagggcatcaactacgtgaagcagaccctgagagagttcatcctgaaggccttcagcaagaagcccaagatcagcagagagatcagacaggccgaggacctgaacaccaagaaggagaactacatcagcaaccacaccctggccgagatgagcaagggccacaacttcctgaaggagaaggacaagatcagcggcttcggcagcagcgtggacaagcacctgatggaggacagcgacggccagagcttcatccacaaccccagcctgaccgtgaccgtgcccatcgcccccggcgagagcgacctggagaacatgaacgccgaggagctgagcagcgacagcgacagcgagtacagcaaggtgagactgaacagaagcagcagcagcgagtgcagcaccgtggacaaccccctgcccggcgagggcgaggaggccgaggccgagcccatgaacagcgacgagcccgaggcctgcttcaccgacggctgcgtgtggagattcagctgctgccaggtgaacatcgagagcggcaagggcaagatctggtggaacatcagaaagacctgctacaagatcgtggagcacagctggttcgagagcttcatcgtgctgatgatcctgctgagcagcggcgccctggccttcgaggacatctacatcgagagaaagaagaccatcaagatcatcctggagtacgccgacaagatcttcacctacatcttcatcctggagatgctgctgaagtggatcgcctacggctacaagacctacttcaccaacgcctggtgctggctggacttcctgatcgtggacgtgagcctggtgaccctggtggccaacaccctgggctacagcgacctgggccccatcaagagcctgagaaccctgagagccctgagacccctgagagccctgagcagattcgagggcatgagagtggtggtgaacgccctgatcggcgccatccccagcatcatgaacgtgctgctggtgtgcctgatcttctggctgatcttcagcatcatgggcgtgaacctgttcgccggcaagttctacgagtgcatcaacaccaccgacggcagcagattccccgccagccaggtgcccaacagaagcgagtgcttcgccctgatgaacgtgagccagaacgtgagatggaagaacctgaaggtgaacttcgacaacgtgggcctgggctacctgagcctgctgcaggtggccaccttcaagggctggaccatcatcatgtacgccgccgtggacagcgtgaacgtggacaagcagcccaagtacgagtacagcctgtacatgtacatctacttcgtggtgttcatcatcttcggcagcttcttcaccctgaacctgttcatcggcgtgatcatcgacaacttcaaccagcagaagaagaagctgggcggccaggacatcttcatgaccgaggagcagaagaagtactacaacgccatgaagaagctgggcagcaagaagccccagaagcccatccccagacccggcaacaagatccagggctgcatcttcgacctggtgaccaaccaggccttcgacatcagcatcatggtgctgatctgcctgaacatggtgaccatgatggtggagaaggagggccagagccagcacatgaccgaggtgctgtactggatcaacgtggtgttcatcatcctgttcaccggcgagtgcgtgctgaagctgatcagcctgagacactactacttcaccgtgggctggaacatcttcgacttcgtggtggtgatcatcagcatcgtgggcatgttcctggccgacctgatcgagacctacttcgtgagccccaccctgttcagagtgatcagactggccagaatcggcagaatcctgagactggtgaagggcgccaagggcatcagaaccctgctgttcgccctgatgatgagcctgcccgccctgttcaacatcggcctgctgctgttcctggtgatgttcatctacgccatcttcggcatgagcaacttcgcctacgtgaagaaggaggacggcatcaacgacatgttcaacttcgagaccttcggcaacagcatgatctgcctgttccagatcaccaccagcgccggctgggacggcctgctggcccccatcctgaacagcaagccccccgactgcgaccccaagaaggtgcaccccggcagcagcgtggagggcgactgcggcaaccccagcgtgggcatcttctacttcgtgagctacatcatcatcagcttcctggtggtggtgaacatgtacatcgccgtgatcctggagaacttcagcgtggccaccgaggagagcaccgagcccctgagcgaggacgacttcgagatgttctacgaggtgtgggagaagttcgaccccgacgccacccagttcatcgagttcagcaagctgagcgacttcgccgccgccctggacccccccctgctgatcgccaagcccaacaaggtgcagctgatcgccatggacctgcccatggtgagcggcgacagaatccactgcctggacatcctgttcgccttcaccaagagagtgctgggcgagagcggcgagatggacagcctgagaagccagatggaggagagattcatgagcgccaaccccagcaaggtgagctacgagcccatcaccaccaccctgaagagaaagcaggaggacgtgagcgccaccgtgatccagagagcctacagaagatacagactgagacagaacgtgaagaacatcagcagcatctacatcaaggacggcgacagagacgacgacctgctgaacaagaaggacatggccttcgacaacgtgaacgagaacagcagccccgagaagaccgacgccaccagcagcaccaccagcccccccagctacgacagcgtgaccaagcccgacaaggagaagtacgagcaggacagaaccgagaaggaggacaagggcaaggacagcaaggagagcaagaagtag

SEQ ID NO: 300538 - DNA, 666 bp, Artificial Sequence
  derived and/or modified sequence
atgtccaatggttactctactgatgagaatttcaggtacctgatctcctgctttcgtgccagggtaaagatgtacatccaggttgagccagttctggattatctcacttttctgccggctgaggttaaggaacagatccaaagaactgtggctacatcagggaacatgcaggctgtagagctgcttctcagcaccctcgagaaaggagtttggcacctgggctggacacgggaattcgttgaggccctgagacgaactggctccccactcgctgcccgctacatgaaccctgaattaacggatctgccatccccgtcatttgaaaatgcccatgatgaatatcttcagctgctgaacctcttgcagccgaccctggtggataaacttctggttagggacgtccttgataagtgtatggaggaagaattgctcactatcgaagaccgtaaccggatcgcagctgctgagaataacggaaatgaaagcggcgttagagagctcctgaagaggatcgtgcagaaggagaactggttctccgctttcctcaatgtcttaagacagacagggaacaatgagctggtgcaggaattgaccggaagtgattgctctgagtcgaacgcaggcatatgcaacttcacagaagaggactcttcaaactcagcgtag

SEQ ID NO: 300539 - DNA, 1617 bp, Artificial Sequence
  derived and/or modified sequence
caaactctgtaagaactgcctgacagaaagctggactcaaagctcctacccgagtgtgcagcaggatcgccccggtccgggaccccaggcgcacaccgcagagtccaaagtgccgcgcctgccggccgcacctgcctgccgcggccccgcgcgccgccccgctgcccacctgcccgcctgcccacctgcccaggtgcgagtgcagccccgcgcgccggcctgagagccctgtggacaacctcgtcattgtcaggcacagagcggtagaccctgcttctctaagtgggcagcggacagcggcacgcacatttcacctgtcccgcagacaacagcaccatctgcttgggagaaccctctcccttctctgagaaagaaagatgtcgaatgggtattccacagacgagaatttccgctatctcatctcgtgcttcagggccagggtgaaaatgtacatccaggtggagcctgtgctggactacctgacctttctgcctgcagaggtgaaggagcagattcagaggacagtcgccacctccgggaacatgcaggcagttgaactgctgctgagcaccttggagaagggagtctggcaccttggttggactcgggaattcgtggaggccctccggagaaccggcagccctctggccgcccgctacatgaaccctgagctcacggacttgccctctccatcgtttgagaacgctcatgatgaatatctccaactgctgaacctccttcagcccactctggtggacaagcttctagttagagacgtcttggataagtgcatggaggaggaactgttgacaattgaagacagaaaccggattgctgctgcagaaaacaatggaaatgaatcaggtgtaagagagctactaaaaaggattgtgcagaaagaaaactggttctctgcatttctgaatgttcttcgtcaaacaggaaacaatgaacttgtccaagagttaacaggctctgattgctcagaaagcaatgcaggtatttgtaattttactgaggaagattcttcaaattctgcctagtgattgagaattcaataaagcagaaagacacaatgctaaacaccaagatttttagaatcaaaattttaagagtggaacatatgtgatagatcatctattttatcaccttaacaaatgaggaaattgatgcctgggaaaatatcaactgatcaaagaccatttttcatccaaccaacactctttctactaccttattttaaaaacaatatgactaccagaaattttatcaagattatgtaacattaaatatacacaaatacattggaagaaagtattttagtggttataaaaaatctgctgcatattcttctgaacatttttatacattttaagcaatgtattaagcatttgataaaaggattgttttgtcaatatatctcaaccttacctaatgtgagattttaaacagcattcaataatagtaataacataacattttatagctccttctcctacattatttgtaaatctcacttaaactgctatcttatttttcttttcgtagtatgcatcctatgtttccaaaaatatcatatgaaagacaaattgaaagttaactattaattaattataa

SEQ ID NO: 300540 - DNA, 666 bp, Artificial Sequence
  derived and/or modified sequence
atgagcaatggctacagcacagatgagaacttccgctacctgatcagctgcttccgggcccgggtgaagatgtacatccaggtggagcctgtgctggactacctgaccttcctgcctgctgaggtgaaggagcagatccagaggacagtggccaccagcggcaacatgcaggccgtggagctgctgctgagcaccctggagaagggcgtgtggcacctgggctggacccgggagtttgtggaggccctgcggaggacaggcagccccctggccgcccgctacatgaaccctgagctgacagacctgcccagccccagctttgaaaatgcccatgatgagtacctgcagctgctgaacctgctgcagcccaccctggtggacaagctgctggtgagagatgtgctggacaagtgcatggaggaggagctgctgaccattgaagatagaaacagaattgctgctgctgagaacaatggaaatgaaagtggagtgcgggagctgctgaagagaattgtgcagaaggagaactggttcagcgccttcctgaatgtgctgcggcagacaggcaacaatgagctggtgcaggagctgaccggcagtgactgcagcgagagcaatgccggcatctgcaacttcacagaggaggacagcagcaacagcgcctag

SEQ ID NO: 300541 - DNA, 666 bp, Artificial Sequence
  derived and/or modified sequence
atgagcaacggctacagcaccgacgagaacttccggtacctgatctcctgttttagagcccgggtaaaaatgtacatccaggtggagcccgtgttagactatctcacctttctgcccgctgaggtcaaggagcaaattcaaagaaccgtagcaactagtggcaacatgcaggccgttgagctcctgctgtcaacattggagaagggggtatggcatctgggctggactagagagttcgtagaggccctgagacgtacggggagcccactggctgcccggtatatgaatccagaactcacagatctaccaagtccaagttttgagaatgcccacgacgagtacctgcaactgctaaatctgctccagcctaccttggtggataagcttctcgtaagggatgtgctggacaagtgcatggaggaggaattgttgactatagaggacaggaatcggatcgccgcggctgaaaacaatgggaacgagagtggtgttcgggagctgcttaagcgtatagtgcagaaagagaactggttctccgcattcctgaatgtgttgcgacaaaccggtaacaatgagcttgtccaggagctcactggcagtgactgcagcgaaagtaacgcggggatctgcaacttcaccgaggaagacagctccaatagtgcatag

SEQ ID NO: 300542 - DNA, 666 bp, Artificial Sequence
  derived and/or modified sequence
atgtccaacggctactccacagacgagaatttccgctacttgattagttgtttcagggcaagagtaaagatgtatattcaggtagagcccgtgttggattatctgacctttttgcctgctgaagtcaaggagcagatccaacggaccgtagctacctcaggtaacatgcaggccgtggaactcctgctcagcactctggagaaaggagtatggcatctgggatggacccgggagttcgtggaagccttacgaaggacaggctccccattggcagcacgatacatgaatccggaattaacagacctcccaagcccatccttcgagaatgcccacgacgaatatctgcagctccttaatcttctgcagcccaccctcgtagataagttactcgttagagatgtcctggataaatgcatggaggaggaacttttgacgatcgaggatagaaacagaatcgccgctgcggagaacaatgggaatgagagcggcgtgcgggaactgctgaagcgtatcgtgcagaaagagaactggttctctgcattcctgaacgtcctgagacaaaccggtaataatgaacttgtccaggagcttactgggtcagactgtagcgagagtaatgccggaatttgcaacttcacagaggaggattcgagtaatagtgcatag

SEQ ID NO: 300543 - DNA, 666 bp, Artificial Sequence
  derived and/or modified sequence
atgagcaacggctacagcaccgacgagaacttcagatacctgatcagctgcttcagagccagagtgaagatgtacatccaggtggagcccgtgctggactacctgaccttcctgcccgccgaggtgaaggagcagatccagagaaccgtggccaccagcggcaacatgcaggccgtggagctgctgctgagcaccctggagaagggcgtgtggcacctgggctggaccagagagttcgtggaggccctgagaagaaccggcagccccctggccgccagatacatgaaccccgagctgaccgacctgcccagccccagcttcgagaacgcccacgacgagtacctgcagctgctgaacctgctgcagcccaccctggtggacaagctgctggtgagagacgtgctggacaagtgcatggaggaggagctgctgaccatcgaggacagaaacagaatcgccgccgccgagaacaacggcaacgagagcggcgtgagagagctgctgaagagaatcgtgcagaaggagaactggttcagcgccttcctgaacgtgctgagacagaccggcaacaacgagctggtgcaggagctgaccggcagcgactgcagcgagagcaacgccggcatctgcaacttcaccgaggaggacagcagcaacagcgcctag

SEQ ID NO: 300544 - DNA, 175 bp, Artificial Sequence
  derived and/or modified sequence
tgacaaaaataactttatctccccagaattttagaatccaaaaacaggaaaccacactactaaaagaaaaatcaaccgagaaaaattctttagcaaaaagtattctcgcagtaaaaatcacttcatcgaattaaggtcaaaattatcggaacgttttatttcgcataagaacact

SEQ ID NO: 300545 - protein, 619 aa, Artificial Sequence
  derived and/or modified sequence
MEQLSDEEIDHGAEEDSDKEDQDLDKMFGAWLGELDKLTQSLDSDKPMEPVKRSPLRQETNMANFSYRFSIYNLNEALNQGETVDLDALMADLCSIEQELSSIGSGNSKRQITETKATQKLPVSRHTLKHGTLKGLSSSSNRIAKPSHASYSLDDVTAQLEQASLSMDEAAQQSVLEDTKPLVTNQHRRTASAGTVSDAEVHSISNSSHSSITSAASSMDSLDIDKVTRPQELDLTHQGQPITEHAISLRCSSKQAKRHIDFTEEQAELTPEEQAAKLKAEKIRVALEKIKEAQVKKLVIRVHMSDDSSKTMMVDERQTVRQVLDNLMDKSHCGYSLDWSLVETVSELQMERIFEDHENLVENLLNWTRDSQNKLIFMERIEKYALFKNPQNYLLGKKETAEMADRNKEVLLEECFCGSSVTVPEIEGVLWLKDDGKKSWKKRYFLLRASGIYYVPKGKAKVSRDLVCFLQLDHVNVYYGQDYRNKYKAPTDYCLVLKHPQIQKKSQYIKYLCCDDVRTLHQWVNGIRIAKYGKQLYMNYQEALKRTESAYDWTSLSSSSIKSGSSSSSIPESQSNHSNQSDSGVSDTQPAGHVRSQSIVSSVFSEAWKRGTQLEESSK

SEQ ID NO: 300546 - protein, 624 aa, Artificial Sequence
  derived and/or modified sequence
MEQLSDEEIDHGAEEDSDKEDQDLDKMFGAWLGELDKLTQSLDSDKPMEPVKRSPLRQETNMANFSYRFSIYNLNEALNQGETVDLDALMADLCSIEQELSSIGSGNSKRQITETKATQKLPVSRHTLKHGTLKGLSSSSNRIAKPSHASYSLDDVTAQLEQASLSMDEAAQQSVLEDTKPLVTNQHRRTASAGTVSDAEVHSISNSSHSSITSAASSMDSLDIDKVTRPQELDLTHQGQPITEHAISLRCSSKQAKRHIDFTEEQAELTPEEQAAKLKAEKIRVALEKIKEAQVKKLVIRVHMSDDSSKTMMVDERQTVRQVLDNLMDKSHCGYSLDWSLVETVSELQMERIFEDHENLVENLLNWTRDSQNKLIFMERIEKYALFKNPQNYLLGKKETAEMADRNKEVLLEECFCGSSVTVPEIEGVLWLKDDGKKSWKKRYFLLRASGIYYVPKGKAKVSRDLVCFLQLDHVNVYYGQDYRNKYKAPTDYCLVLKHPQIQKKSQYIKYLCCDDVRTLHQWVNGIRIAKYGKQLYMNYQEALKRTESAYDWTSLSSSSIKSGSSSSSIPESQSNHSNQSDSGVSDTQPAGHVRSQSIVSSVFSEAWKRGTQLEESSKVTASF

SEQ ID NO: 300547 - protein, 89 aa, Artificial Sequence
  derived and/or modified sequence
MEQLSDEEIDHGAEEDSDKEDQDLDKMFGAWLGELDKLTQSLDSDKPMEPVKRSPLRQETNMANFSYRFSIYNLNALNQGETVDLDALM

SEQ ID NO: 300548 - DNA, 1860 bp, Artificial Sequence
  derived and/or modified sequence
atggagcagctgagcgacgaggagatcgaccacggcgccgaggaggacagcgacaaggaggaccaggacctggacaagatgttcggcgcctggctgggcgagctggacaagctgacccagagcctggacagcgacaagcccatggagcccgtgaagagaagccccctgagacaggagaccaacatggccaacttcagctacagattcagcatctacaacctgaacgaggccctgaaccagggcgagaccgtggacctggacgccctgatggccgacctgtgcagcatcgagcaggagctgagcagcatcggcagcggcaacagcaagagacagatcaccgagaccaaggccacccagaagctgcccgtgagcagacacaccctgaagcacggcaccctgaagggcctgagcagcagcagcaacagaatcgccaagcccagccacgccagctacagcctggacgacgtgaccgcccagctggagcaggccagcctgagcatggacgaggccgcccagcagagcgtgctggaggacaccaagcccctggtgaccaaccagcacagaagaaccgccagcgccggcaccgtgagcgacgccgaggtgcacagcatcagcaacagcagccacagcagcatcaccagcgccgccagcagcatggacagcctggacatcgacaaggtgaccagaccccaggagctggacctgacccaccagggccagcccatcaccgagcacgccatcagcctgagatgcagcagcaagcaggccaagagacacatcgacttcaccgaggagcaggccgagctgacccccgaggagcaggccgccaagctgaaggccgagaagatcagagtggccctggagaagatcaaggaggcccaggtgaagaagctggtgatcagagtgcacatgagcgacgacagcagcaagaccatgatggtggacgagagacagaccgtgagacaggtgctggacaacctgatggacaagagccactgcggctacagcctggactggagcctggtggagaccgtgagcgagctgcagatggagagaatcttcgaggaccacgagaacctggtggagaacctgctgaactggaccagagacagccagaacaagctgatcttcatggagagaatcgagaagtacgccctgttcaagaacccccagaactacctgctgggcaagaaggagaccgccgagatggccgacagaaacaaggaggtgctgctggaggagtgcttctgcggcagcagcgtgaccgtgcccgagatcgagggcgtgctgtggctgaaggacgacggcaagaagagctggaagaagagatacttcctgctgagagccagcggcatctactacgtgcccaagggcaaggccaaggtgagcagagacctggtgtgcttcctgcagctggaccacgtgaacgtgtactacggccaggactacagaaacaagtacaaggcccccaccgactactgcctggtgctgaagcacccccagatccagaagaagagccagtacatcaagtacctgtgctgcgacgacgtgagaaccctgcaccagtgggtgaacggcatcagaatcgccaagtacggcaagcagctgtacatgaactaccaggaggccctgaagagaaccgagagcgcctacgactggaccagcctgagcagcagcagcatcaagagcggcagcagcagcagcagcatccccgagagccagagcaaccacagcaaccagagcgacagcggcgtgagcgacacccagcccgccggccacgtgagaagccagagcatcgtgagcagcgtgttcagcgaggcctggaagagaggcacccagctggaggagagcagcaagtag

SEQ ID NO: 300549 - DNA, 1875 bp, Artificial Sequence
  derived and/or modified sequence
atggagcagctgagcgacgaggagatcgaccacggcgccgaggaggacagcgacaaggaggaccaggacctggacaagatgttcggcgcctggctgggcgagctggacaagctgacccagagcctggacagcgacaagcccatggagcccgtgaagagaagccccctgagacaggagaccaacatggccaacttcagctacagattcagcatctacaacctgaacgaggccctgaaccagggcgagaccgtggacctggacgccctgatggccgacctgtgcagcatcgagcaggagctgagcagcatcggcagcggcaacagcaagagacagatcaccgagaccaaggccacccagaagctgcccgtgagcagacacaccctgaagcacggcaccctgaagggcctgagcagcagcagcaacagaatcgccaagcccagccacgccagctacagcctggacgacgtgaccgcccagctggagcaggccagcctgagcatggacgaggccgcccagcagagcgtgctggaggacaccaagcccctggtgaccaaccagcacagaagaaccgccagcgccggcaccgtgagcgacgccgaggtgcacagcatcagcaacagcagccacagcagcatcaccagcgccgccagcagcatggacagcctggacatcgacaaggtgaccagaccccaggagctggacctgacccaccagggccagcccatcaccgagcacgccatcagcctgagatgcagcagcaagcaggccaagagacacatcgacttcaccgaggagcaggccgagctgacccccgaggagcaggccgccaagctgaaggccgagaagatcagagtggccctggagaagatcaaggaggcccaggtgaagaagctggtgatcagagtgcacatgagcgacgacagcagcaagaccatgatggtggacgagagacagaccgtgagacaggtgctggacaacctgatggacaagagccactgcggctacagcctggactggagcctggtggagaccgtgagcgagctgcagatggagagaatcttcgaggaccacgagaacctggtggagaacctgctgaactggaccagagacagccagaacaagctgatcttcatggagagaatcgagaagtacgccctgttcaagaacccccagaactacctgctgggcaagaaggagaccgccgagatggccgacagaaacaaggaggtgctgctggaggagtgcttctgcggcagcagcgtgaccgtgcccgagatcgagggcgtgctgtggctgaaggacgacggcaagaagagctggaagaagagatacttcctgctgagagccagcggcatctactacgtgcccaagggcaaggccaaggtgagcagagacctggtgtgcttcctgcagctggaccacgtgaacgtgtactacggccaggactacagaaacaagtacaaggcccccaccgactactgcctggtgctgaagcacccccagatccagaagaagagccagtacatcaagtacctgtgctgcgacgacgtgagaaccctgcaccagtgggtgaacggcatcagaatcgccaagtacggcaagcagctgtacatgaactaccaggaggccctgaagagaaccgagagcgcctacgactggaccagcctgagcagcagcagcatcaagagcggcagcagcagcagcagcatccccgagagccagagcaaccacagcaaccagagcgacagcggcgtgagcgacacccagcccgccggccacgtgagaagccagagcatcgtgagcagcgtgttcagcgaggcctggaagagaggcacccagctggaggagagcagcaaggtgaccgccagcttctag

SEQ ID NO: 300550 - DNA, 1860 bp, Artificial Sequence
  derived and/or modified sequence
atggaacaactctcagacgaagagatcgaccatggagctgaagaagacagtgacaaggaggaccaagacttagacaagatgttcggagcctggctaggcgagctggacaagctgacccagtctctggatagtgataagcccatggaaccagttaaacgcagccctctgagacaggagaccaatatggccaacttctcctaccgtttttcaatctataatctgaacgaagctctgaatcagggggagactgtggacctggatgccctcatggctgatctgtgctccattgagcaggagttgagttccattggatctggcaattccaagaggcaaatcaccgaaacaaaggccacacagaaactcccagttagtcgccacactcttaagcacggcacactaaaaggcctttcttcatcctctaaccggatcgccaaaccctcacatgcttcttactccctggatgatgtaaccgcccagctcgaacaagccagcctcagcatggacgaggcagcacagcagagtgttcttgaggacacaaagcctctcgtgactaaccagcatagacgaaccgcgtcagcgggaacggtctcagacgccgaggtccactctataagtaactcatcccatagcagcatcacgtccgccgcatcctccatggatagtctcgacattgataaagtcactcgcccccaggagttggacctgacacatcaaggtcagcctataaccgagcatgcgatatcactccgatgttccagcaaacaggcaaagcgacatatcgactttaccgaagaacaagctgaactgacaccagaggaacaggccgccaaattgaaggccgaaaagattagggtggcactggaaaaaataaaggaggcccaggtgaagaaactcgtcatcagagttcatatgtctgatgactcctccaaaactatgatggtggatgaacgtcagactgttaggcaggtgcttgacaatctgatggataaaagccactgcggctactcccttgactggagcctagtcgagactgtgagcgaattgcagatggaacgcattttcgaggatcacgagaatcttgtcgagaacctgttaaattggacccgagactcccaaaataagctgatctttatggaacggattgagaaatatgcactgtttaaaaatccccagaattacctgctcgggaaaaaggagacggcagaaatggcggaccggaataaggaggtgctcctggaggagtgcttttgtggctcctctgttacagtccctgaaattgagggcgtgttatggcttaaggacgatggcaagaagtcttggaagaagagatactttctgctccgagcctccggcatctactatgtgcccaagggcaaggcaaaggtgtcccgggacttggtatgcttcctccagcttgatcacgtgaatgtgtactatggtcaggactaccggaataaatacaaggccccgacagattactgcctagtgctcaaacatcctcagatacagaagaaaagccagtatatcaaatacctttgctgtgacgatgtgaggacattacatcagtgggttaacgggattagaatcgccaagtatggtaaacagctgtatatgaactaccaggaggccctaaagagaactgaaagcgcctacgattggacgagcttgtcttccagctccatcaagtccgggagctcatcttcatctatccctgagtcccagtctaatcatagcaaccagagcgatagtggcgtgagtgatactcagccggcaggacatgtcaggagtcagtccatcgtctccagtgtcttttcagaggcatggaaacgcggaacacagcttgaagagtcaagtaagtag

SEQ ID NO: 300551 - DNA, 1875 bp, Artificial Sequence
  derived and/or modified sequence
atggaacagctgtcggatgaggaaatcgaccacggcgccgaggaagacagtgacaaggaggaccaagatctggataaaatgttcggcgcttggctcggcgaactggataaactgacacagagcttagatagtgataagcccatggagccagtcaaacgctctcccctgcgtcaggagactaatatggcaaacttcagttataggttctccatctacaatctcaacgaagcgctcaatcagggggaaaccgttgacctggatgcgctaatggccgacctatgctctatcgagcaggaactcagcagcatcggctccggtaactccaagaggcaaattaccgagaccaaagccactcaaaaactccctgtgagcagacacaccttaaagcatggcacacttaagggactgtcttcttcatctaatagaatcgccaagccttcccacgcttcttatagcctcgatgatgtgaccgcgcaactggagcaggcctctctcagcatggatgaagccgcccaacaaagcgttctcgaagacaccaagcctttggtgacaaatcagcatcgccggacagccagtgcgggcacagtatcagatgccgaggtccattctatcagcaattccagccatagctccatcacatctgccgcttccagcatggattcattggacattgataaggtcaccaggccgcaagagttagacttgacgcaccaagggcagccaatcaccgagcatgctatatcactgcgctgtagctctaagcaggccaagcgacacatagactttaccgaagaacaagcggaactgacgccagaggaacaggcagccaaacttaaggctgaaaagatccgggtcgccctggaaaaaatcaaggaggctcaggtgaagaagctggtgatcagggttcatatgagtgatgatagcagtaagacaatgatggtcgacgaaaggcagacagtgaggcaggtgctcgacaacctcatggacaagagccattgcgggtacagtcttgactggtcgttggtcgagactgtgagcgagctgcagatggagcgaatttttgaggaccacgagaatctggttgaaaatctgctcaactggacccgggactctcaaaataaattaatcttcatggagaggatcgaaaagtatgcgctcttcaaaaacccgcaaaactatctgctaggtaaaaaggaaacggctgagatggccgaccgaaacaaggaggtcttattggaggagtgcttctgtggttcttccgtcaccgtaccggagatcgagggagtcctgtggctgaaagacgacggcaaaaaaagctggaaaaaacggtattttctgctacgggcttccgggatttattatgtcccgaaaggcaaggccaaagtcagccgcgacctcgtctgcttcttacagttggatcatgttaacgtctactacgggcaggattatagaaacaaatacaaggcacctaccgattattgcctagtcttgaagcacccacaaattcagaaaaagtctcagtacatcaagtatttgtgttgtgatgacgttcgcaccctgcatcaatgggtgaatggaatccgcattgccaaatatggcaaacagctgtatatgaactaccaggaggctctgaagcggactgaatctgcctatgactggacgtcactgtctagttctagcataaaaagtggttcctcaagcagtagcattccagaatctcagtccaaccatagcaaccagagcgactctggcgtgagcgacactcaacccgctgggcatgtgcggtctcagtccattgtctcatctgtgtttagcgaggcttggaagaggggcacacagctggaagaatcaagcaaagtcacggcttcgttctag

SEQ ID NO: 300552 - DNA, 1860 bp, Artificial Sequence
  derived and/or modified sequence
atggaacagttgagtgacgaggaaatcgatcatggtgcagaagaggactctgacaaggaggaccaggacctggacaagatgtttggcgcatggcttggggagctggataaactcacacagtccttggactctgacaagccgatggagcccgtcaaaaggtcacccctgagacaggagacgaacatggccaactttagctaccgattcagcatatacaaccttaatgaggcgctcaaccagggcgagactgtagacctggatgcgctgatggctgacctgtgttccatagagcaggagctctctagtattgggagcggcaatagcaagagacaaatcaccgaaacgaaagcaacccagaagttaccagttagccgccacaccttgaagcacggtactctcaagggcctatcttcctcttccaatcgtatagccaagccttcccatgcctcctattccctcgacgatgtcactgcccagctggaacaagcctcgctctcaatggatgaagctgcccaacagtccgttttggaggacacaaagccacttgtgacaaatcagcaccgcaggaccgcttcagctggcaccgtcagcgatgctgaggtgcacagtatctccaactcctcacactccagcattacgagcgcagcgtcgtcaatggactcccttgacattgacaaagttactcggcctcaagagctcgacttaacgcatcaaggccagcccataaccgagcatgccatttctcttagatgttcttccaaacaagcaaaacggcatattgattttacggaggagcaagcagagctgacccctgaagaacaggccgctaaacttaaggccgagaagatccgcgtggctctggagaagataaaagaagctcaggtaaaaaagttggtgatccgcgtgcacatgtccgatgactcctcaaagacgatgatggtcgacgaaaggcagactgttcggcaggtgttagataatctcatggacaagtcccattgtgggtattctctggattggtccctggtggagaccgttagcgaactccagatggagaggatctttgaagaccatgaaaacctggttgagaatctgctaaattggacaagggatagccagaataagctcattttcatggaacgtatcgagaaatacgctctctttaagaatcctcagaattacttgctggggaagaaggagacagccgaaatggccgaccgtaacaaggaggttttgctggaggagtgcttctgcggctctagcgtgacagtccccgagatcgaaggagtactgtggctgaaggatgatggcaagaaaagctggaagaaacgatactttctgttgcgagcatccggaatttattacgtgccaaagggcaaagctaaggtctcaagagacctggtctgcttcctgcagctggatcacgtgaacgtgtattacggccaggactaccggaataagtacaaagcccccaccgattactgccttgtcttgaagcatccccagatccaaaagaagagccaatatatcaaatatctgtgttgcgatgacgtgcgaacactgcatcagtgggtgaacggcatcaggatagcaaagtatggaaaacagctgtatatgaactatcaggaggccctcaagagaaccgaatcagcttatgattggacatcactgtccagttcgagcattaagtcaggatcgtctagttctagtatccctgagtcccagtccaatcactccaatcagtcagattctggtgttagtgatacacaacctgcgggacatgtgcggtctcagagcatagtttcctccgttttcagtgaggcctggaaacgggggacacaactcgaggagagtagtaagtag

SEQ ID NO: 300553 - DNA, 1860 bp, Artificial Sequence
  derived and/or modified sequence
atggagcagctgagtgatgaggagattgaccatggagcagaagaagattctgacaaggaggaccaggacctggacaagatgtttggagcctggctgggggagctggacaagctgacccagagcctggacagcgacaagcccatggagcctgtgaagaggagccccctgcggcaggagaccaacatggccaacttctcctaccgcttcagcatctacaacctgaatgaggccctgaaccagggcgagaccgtggacctggatgccctgatggctgacctgtgcagcattgagcaggagctgagcagcatcggcagcggcaacagcaagaggcagatcacagagaccaaggccacccagaagctgcctgtgagccgccacaccctgaagcacggcaccctgaagggcctgagcagcagcagcaacagaattgccaagcccagccacgccagctacagcctggatgatgtgacagcccagctggagcaggccagcctgtccatggatgaggccgcccagcagagcgtgctggaggacaccaagcccctggtgaccaaccagcacagaagaacagccagcgctggcaccgtgtctgatgctgaggtgcacagcatcagcaacagcagccacagcagcatcaccagcgctgccagctccatggacagcctggacatcgacaaggtgacccggccccaggagctggacctgacccaccagggccagcccatcacagaacatgccatcagcctgcgctgcagcagcaagcaggccaagaggcacatcgacttcacagaggagcaggccgagctgaccccagaggagcaggccgccaagctgaaggccgagaagatccgggtggccctggagaagatcaaggaggcccaggtgaagaagctggtgatccgggtgcacatgtctgatgacagcagcaagaccatgatggtggatgagcggcagacagtgcggcaggtgctggacaacctgatggacaagagccactgcggctacagcctggactggagcctggtggagaccgtgtctgagctgcagatggagcgcatctttgaagatcatgagaacctggtggagaacctgctgaactggacccgggacagccagaacaagctgatcttcatggagagaattgagaagtatgccctcttcaagaacccccagaactacctgctgggcaagaaggagacagctgagatggctgacaggaacaaggaggtgctgctggaggagtgcttctgtggcagctctgtgacagtgcctgagattgagggcgtgctgtggctgaaggatgatggcaagaagtcctggaagaagcgctacttcctgctgcgggccagcggcatctactacgtgcccaagggcaaggccaaggtgtcccgggacctggtgtgcttcctgcagctggaccacgtgaatgtgtactacggccaggactacagaaacaagtacaaggcccccacagactactgcctggtgctgaagcacccccagatccagaagaagagccagtacatcaagtacctgtgctgtgatgatgtgaggaccctgcaccagtgggtgaatggcatcagaattgccaagtatggcaagcagctgtacatgaactaccaggaggccctgaagaggacagaaagtgcctatgactggaccagcctgagcagcagcagcatcaagagcggcagcagcagcagcagcatccctgagagccagagcaaccacagcaaccagagcgacagcggcgtgtctgacacccagcctgctggccacgtgcgcagccagagcatcgtgagcagcgtcttcagcgaggcctggaagaggggcacccagctggaggagagcagcaagtag

SEQ ID NO: 300554 - DNA, 1875 bp, Artificial Sequence
  derived and/or modified sequence
atggagcagctgagtgatgaggagattgaccatggagcagaagaagattctgacaaggaggaccaggacctggacaagatgtttggagcctggctgggggagctggacaagctgacccagagcctggacagcgacaagcccatggagcctgtgaagaggagccccctgcggcaggagaccaacatggccaacttctcctaccgcttcagcatctacaacctgaatgaggccctgaaccagggcgagaccgtggacctggatgccctgatggctgacctgtgcagcattgagcaggagctgagcagcatcggcagcggcaacagcaagaggcagatcacagagaccaaggccacccagaagctgcctgtgagccgccacaccctgaagcacggcaccctgaagggcctgagcagcagcagcaacagaattgccaagcccagccacgccagctacagcctggatgatgtgacagcccagctggagcaggccagcctgtccatggatgaggccgcccagcagagcgtgctggaggacaccaagcccctggtgaccaaccagcacagaagaacagccagcgctggcaccgtgtctgatgctgaggtgcacagcatcagcaacagcagccacagcagcatcaccagcgctgccagctccatggacagcctggacatcgacaaggtgacccggccccaggagctggacctgacccaccagggccagcccatcacagaacatgccatcagcctgcgctgcagcagcaagcaggccaagaggcacatcgacttcacagaggagcaggccgagctgaccccagaggagcaggccgccaagctgaaggccgagaagatccgggtggccctggagaagatcaaggaggcccaggtgaagaagctggtgatccgggtgcacatgtctgatgacagcagcaagaccatgatggtggatgagcggcagacagtgcggcaggtgctggacaacctgatggacaagagccactgcggctacagcctggactggagcctggtggagaccgtgtctgagctgcagatggagcgcatctttgaagatcatgagaacctggtggagaacctgctgaactggacccgggacagccagaacaagctgatcttcatggagagaattgagaagtatgccctcttcaagaacccccagaactacctgctgggcaagaaggagacagctgagatggctgacaggaacaaggaggtgctgctggaggagtgcttctgtggcagctctgtgacagtgcctgagattgagggcgtgctgtggctgaaggatgatggcaagaagtcctggaagaagcgctacttcctgctgcgggccagcggcatctactacgtgcccaagggcaaggccaaggtgtcccgggacctggtgtgcttcctgcagctggaccacgtgaatgtgtactacggccaggactacagaaacaagtacaaggcccccacagactactgcctggtgctgaagcacccccagatccagaagaagagccagtacatcaagtacctgtgctgtgatgatgtgaggaccctgcaccagtgggtgaatggcatcagaattgccaagtatggcaagcagctgtacatgaactaccaggaggccctgaagaggacagaaagtgcctatgactggaccagcctgagcagcagcagcatcaagagcggcagcagcagcagcagcatccctgagagccagagcaaccacagcaaccagagcgacagcggcgtgtctgacacccagcctgctggccacgtgcgcagccagagcatcgtgagcagcgtcttcagcgaggcctggaagaggggcacccagctggaggagagcagcaaggtgacagccagcttctag

SEQ ID NO: 300555 - DNA, 1860 bp, Artificial Sequence
  derived and/or modified sequence
atggagcagctgagcgacgaggagatcgaccacggcgccgaggaggactccgacaaggaagatcaagatcttgacaagatgttcggggcgtggctcggcgaacttgacaaactgacacagtctctggacagcgacaagcctatggaacccgtgaaaagatcccctctgcgccaggagaccaatatggctaatttctcctatagattcagtatctacaatctgaacgaagcactcaaccagggcgagactgttgatctcgacgccttgatggccgacctgtgcagtatcgagcaagaactgagttcgatcggcagtggaaactctaagaggcaaattaccgagaccaaggcgacacagaagcttccggttagccgtcataccctcaaacacggaaccttgaagggcctatcttctagttctaacaggattgctaaaccgagccatgcttcttatagtctagatgacgtgaccgcccaactggaacaggcttctctgagtatggatgaggcagcccagcagagtgtgctggaagatacaaagccgctcgtgactaaccaacacaggcgaaccgcctcagccggtactgtgagtgacgctgaggtgcactcaatttccaatagcagccatagctccataacttccgctgcttcatctatggactcgctcgacattgataaggtgacccgccctcaggagttagatttaactcaccagggccagcctataacggagcacgcgatctcactgcgctgtagttccaaacaggccaaacgccacattgacttcacagaagaacaggccgagctaacccccgaggaacaggccgcaaagctcaaggccgaaaaaatcagggtggcattggaaaaaatcaaagaggcgcaggtgaagaaacttgtaattagagttcacatgtccgacgacagctccaaaacaatgatggtggacgaaaggcaaactgtacggcaggttctcgacaacctcatggacaaatcacattgcggctacagcctcgactggagcttggtcgagaccgtttcagagctgcaaatggagcggatatttgaggatcacgagaacctggttgaaaacctgctgaattggacgagagattcacagaataagttaatttttatggaaaggatcgagaagtatgctttattcaagaacccgcagaattatctgttagggaagaaagagactgccgagatggctgacaggaataaggaagttctgctcgaggaatgcttttgcggatcgtcggtaacagtgccagaaattgagggcgttctttggctgaaagatgacggtaagaaaagttggaagaagagatattttctgttacgtgccagcggcatttactacgtgcctaaagggaaggcaaaagtctctagagacctggtgtgctttctacagttagatcatgtgaatgtctattatggccaggattaccgaaacaaatacaaagccccgacagattactgtttagtcttgaaacacccgcagatccaaaagaagtcccaatacattaagtacctgtgttgcgatgacgtgcgcacactccaccagtgggtgaacgggattcggattgccaaatatgggaagcaactgtatatgaattatcaggaggccttgaaacgaacagagtcagcttacgactggacatctctctcttcgtccagcatcaagtctggatcttcctcctctagcattcctgagagccagagcaaccatagcaatcaatccgacagcggcgtgtctgacactcagcctgccgggcatgtgaggtctcagagcatcgtctcctctgtgttcagcgaagcatggaaacgcgggactcagctcgaggaaagttctaagtag

SEQ ID NO: 300556 - DNA, 1875 bp, Artificial Sequence
  derived and/or modified sequence
atggagcagctgagcgacgaggagatcgaccacggcgccgaggaggattcagataaggaggatcaggacctcgacaagatgttcggagcgtggctaggcgagctcgacaagctgacgcagagcctggattctgacaagcccatggagcctgtaaagagaagtcctctaagacaggagacaaatatggcaaacttctcttataggttcagcatctataatcttaatgaggctctaaatcagggggaaacagtggacctggacgccttgatggctgacttatgttccattgaacaagagttgtcgtctatcggcagtggaaattctaaaagacagatcaccgagactaaggcgacccagaagctgcccgtgagtcgccacacgctaaagcatggcactctaaagggtctgtcctcctcttccaacagaattgctaaaccatcccatgcgtcatattccctggatgacgttacggcacagctggagcaggcctccctgagcatggatgaggccgcacagcaaagtgtcctcgaagacaccaaaccactggtcactaatcagcacaggcggacggctagtgcagggactgtgtccgatgctgaggtgcactcaataagcaatagctctcactcttcaataaccagcgccgctagcagcatggatagtttagatattgacaaggtgacaaggccacaggagttagatttaacccaccaggggcagcccataaccgaacacgccatttcacttcgatgttcctctaagcaggcgaaacgccatatagattttacggaagagcaggctgaactaacaccggaggagcaagccgccaaattaaaagctgaaaaaatcagggtggccctggagaaaataaaagaagcacaggttaagaagctggttattagggtacacatgtctgatgattctagcaaaactatgatggtagatgagcggcaaactgttcgacaggtgctggacaacctgatggacaagtcccattgcggatatagcctcgactggtccctcgtagagacggtcagcgagctccagatggagagaatttttgaggaccacgagaatctggtggaaaacctgcttaattggaccagagactcccaaaataagttgatattcatggagcgcatcgaaaaatacgccttattcaagaatccgcagaattacctgctaggaaaaaaagagactgcagaaatggccgaccgcaataaggaagttctgctcgaggaatgcttttgtggcagttccgtgaccgttcctgagattgagggggttctatggctcaaagatgacggcaaaaaatcttggaaaaaacggtactttctcctccgtgcttcaggcatctactatgtgcccaagggaaaggcgaaggtctcaagggatcttgtctgttttcttcagctggaccacgtgaacgtatactatggacaggactataggaacaaatataaagcacccacagattactgcttggtcctaaaacatccgcagatacagaagaagagtcagtacataaagtatctgtgttgcgatgatgtcagaacacttcatcagtgggtgaatgggattaggattgcaaagtacggaaaacagctgtacatgaactatcaggaagccctgaaacgaacagagtcagcttatgattggacttccttatcgagcagcagcatcaagtcaggatcctcaagcagctcaatccccgagtcacagtcaaatcattcaaaccagtctgactccggggtgtccgacacacagcctgcggggcatgtgcgcagtcaaagcattgtgagcagcgttttttccgaggcttggaagcgaggaacgcagctcgaggagtcttctaaagtgactgcttcattctag

SEQ ID NO: 300557 - DNA, 1860 bp, Artificial Sequence
  derived and/or modified sequence
atggagcagctgagcgacgaggagatcgaccacggcgccgaggaggattccgacaaagaggaccaggatctcgacaagatgtttggcgcctggcttggcgaattggacaaactgacacagagcctcgactcggacaaacccatggaacctgtcaagaggtcgccactgcgccaggagacgaatatggcgaatttttcctaccgattctctatttacaacctgaatgaggcgctaaaccagggcgaaacagtggacctagacgccttgatggctgatctctgctctatcgagcaggaactgtcctctataggatccggtaatagtaagagacagattactgaaactaaggccacgcaaaaactgcctgtcagcagacacacactcaaacacgggacactgaagggcctgtcctcttcctcaaacagaattgctaagcctagccacgcatcatacagcctggacgacgtcacagcccagctggagcaggcatctctctccatggatgaagccgcccagcaatccgtcctggaagatacaaagcctttggtgactaatcagcacagaaggacagcatccgccggtaccgtttctgacgcagaggtgcatagcattagtaactcttctcactcatccattacgtctgctgcctcgtccatggactctctggacattgataaagtgacccgtccccaggaactggacctgacccaccaggggcagcctatcacagaacatgccattagccttcgctgttctagcaaacaggcaaagcggcacatagactttaccgaagagcaggcagagctgacacccgaggagcaagctgcaaaactcaaagccgagaagatccgcgtcgcgcttgaaaagatcaaggaggctcaggtgaagaagttagtgataagagtgcacatgtccgatgactcttcaaaaaccatgatggtggatgagaggcaaaccgttcgccaggtgttagataacttgatggataagtcccactgcgggtactccttggattggtctttagtggagacagtcagcgagctgcagatggagcgcatctttgaagatcacgaaaacttggtcgagaaccttcttaactggacaagggattcccagaacaagcttatcttcatggagagaatcgaaaagtatgcgctcttcaaaaatccccagaattatctgttaggcaagaaggaaacagccgaaatggcagataggaacaaagaggtgttgctcgaggagtgcttttgcgggtcatccgttacggttcccgagatcgaaggtgtgctatggctgaaggatgacgggaagaagtcctggaagaaaaggtattttctgttacgcgcctctggtatctactacgtgccaaagggaaaggcgaaggtgtctcgtgatctcgtgtgctttctccagttggaccatgtgaacgtatattatggacaggactatcgaaataagtacaaagcgccgacggactattgcctggtgctgaagcatccacagatccagaagaagtcccagtatataaagtacctttgttgcgatgacgttcgcacactacaccagtgggtgaatggcatacgcattgccaaatacggcaaacagttgtacatgaactaccaggaggctctcaaacggaccgagagcgcttacgactggacatcactgtcctcctcaagtattaaatcaggctctagctcctcctccattcccgagagtcaatccaatcattcaaaccagagcgactcgggcgtctcagacacgcagccagctggtcacgttcgttcccagtccatcgtatccagtgttttctccgaagcctggaaaagaggaacacagcttgaggaaagctctaaatag

SEQ ID NO: 300558 - DNA, 1860 bp, Artificial Sequence
  derived and/or modified sequence
atggaacagctctctgatgaagaaattgaccatggcgctgaggaagactcagataaagaggatcaagatctcgataagatgtttggcgcttggctgggtgagctggacaaacttacccaatcactagattccgataaacctatggaaccagtgaaacgttctccccttcggcaagaaacaaacatggcaaattttagctataggttcagcatttataacctgaatgaggcactgaaccagggggaaaccgtcgacttggacgccttgatggcagacctgtgctccatcgagcaggagctgagcagtattggatcaggaaattcaaagcgacagattacagagacaaaggccactcagaaactgcctgtttctaggcatacattaaagcatggcacattaaaagggctttccagctcttcaaaccgcattgcaaagccaagtcacgcctcctattctctcgatgatgtgaccgcccagttagagcaggcttccttgtccatggatgaggccgcacagcaaagcgtgctggaagacactaaaccactggtgactaaccaacaccggcgaacagcgagcgctgggaccgtgagtgatgccgaggtccactctatctcaaacagcagtcacagcagcatcacatccgccgctagctccatggactctctggacatcgataaagtgacccgccctcaggagctcgatctgacccaccaaggtcagcctattacggagcacgcaatttcgctgaggtgctcttcgaaacaggctaaacgtcacattgactttacggaggagcaggctgagctaactccagaggaacaggcagccaagctgaaggccgagaagataagggtagcgctagagaagataaaggaagcccaagttaaaaaactggtgatcagagtgcatatgagcgatgactctagtaaaaccatgatggtggacgagaggcaaacagtgcgtcaggtgttggacaatctgatggacaaatctcattgtgggtactctctagattggtctcttgtcgagaccgtatcagaactccagatggagagaatcttcgaagatcacgaaaatctggtggagaaccttctcaattggactagagacagccaaaataaactcatctttatggaacgcattgagaagtatgccttgtttaaaaatccacagaactaccttctgggtaagaaagaaacagcagaaatggcagacagaaataaggaagtattgctggaggagtgcttttgcgggtcctcagtgactgtgcctgagattgaaggagtgctctggttaaaggacgatggcaagaagtcttggaaaaagaggtattttcttcttagggcttcaggcatctactacgtgcccaagggaaaagcaaaagtttcccgagacctggtctgcttcctgcagctggaccatgtgaatgtttactatggacaagactataggaataaatataaagcaccaaccgactactgcctcgtgctcaagcatccacagatacagaaaaaatcccagtacataaagtacctgtgctgtgatgacgtgaggaccctgcaccagtgggtcaatggaatccggatcgccaagtatggtaagcagctgtatatgaactatcaggaggcactaaagcgcacagaaagtgcatacgactggacatcactgtcgtcttcaagcattaagagcggatcctcatccagttctatacccgagagtcaaagcaatcactcaaatcagtcagattcaggcgtttccgatacccagcctgctggccatgtgagaagccagtcaattgtgagttccgtgttcagtgaagcctggaaaagggggacccagctagaagagagcagcaaatag

SEQ ID NO: 300559 - DNA, 1875 bp, Artificial Sequence
  derived and/or modified sequence
atggagcagctgagcgatgaggaaatcgaccacggggcagaagaggactcggacaaagaagatcaagacctggacaagatgtttggcgcatggctgggggagctcgataagcttacccagagcctggactccgataaacctatggaacctgtcaagaggagccctttgagacaagagaccaacatggccaacttctcttaccgctttagtatatacaatctgaacgaggcattgaaccagggcgaaactgtggacttagatgctcttatggccgacctgtgttcaatcgaacaggagctctcatcgatcggcagcggcaactcaaagcgccagatcacagaaacaaaagcaacacagaaactgcccgtatctagacacacgctcaaacacgggaccctgaaaggattaagcagctcttccaataggattgctaaaccatcccatgccagctactccctggatgacgtcacggctcagttagaacaggcatccctctcaatggacgaagctgcacagcaaagcgtgctcgaggacacaaagccacttgtgactaaccagcatcgcagaactgctagcgcaggtacggtctccgacgcggaggtgcactcaatttctaattcttcacattcttctatcacctccgctgctagctctatggactccctcgacatcgacaaggtgacccgtccccaggagctggacttgacgcatcagggccaacccattacagagcacgctatatctttaaggtgttctagcaagcaggctaagaggcatattgacttcacagaggagcaagccgaactgacaccggaggaacaggccgctaagctaaaggcagagaagatccgagtggcgctggagaagattaaggaggctcaggtgaagaagttagtgatccgagtgcacatgtccgacgactcatcaaaaaccatgatggtggatgaaaggcagaccgttagacaagtgcttgacaatctgatggataagagtcactgcggatacagcctagattggagtctggtggagacggtgtcagagctacagatggagcgaatctttgaggatcatgaaaacctggtggagaatctcctcaactggactcgggactcccagaataaactgattttcatggagcgtattgagaagtatgcactgtttaaaaatcctcagaattatttgctgggcaagaaggagacagcagaaatggccgaccgcaataaagaggtgcttttggaggagtgcttctgcggctcatccgtgaccgtccccgaaatcgaaggagtgctgtggctgaaagacgatggaaagaagtcctggaaaaagagatacttcctgctcagagccagtggaatctattacgtacctaagggcaaagccaaagtgtcacgcgatctggtgtgcttcctgcagctcgaccatgtgaatgtttactacggccaggattatcgcaacaagtataaagctccaacagactactgtcttgtcctcaaacacccacaaatacagaagaaaagtcagtatataaaatacctctgttgtgatgatgttagaacattgcaccagtgggtgaacggcatccggattgccaagtacggaaagcagctgtacatgaactaccaggaggcgctgaagaggacggaaagcgcctatgactggacttcgctctctagttctagcattaaaagtgggtcttccagttctagcatccctgaatctcagtctaaccatagtaaccagtccgactccggtgtgagcgacacccagcctgctggccacgtgaggtctcagtccatcgtatcttctgtattttcagaggcgtggaagcggggtacccaactggaagagagttccaaggtgactgcctccttttag

SEQ ID NO: 300560 - DNA, 1860 bp, Artificial Sequence
  derived and/or modified sequence
atggagcagctgtccgatgaagagatagatcatggtgctgaagaggacagcgacaaagaagatcaggatctagataaaatgttcggtgcctggctcggagagctcgacaaactgacacagtcacttgactccgataaaccaatggaaccagttaaaaggagcccactgaggcaggagaccaacatggctaatttctcttatcgcttctctatttataatttgaatgaagcgctgaatcagggcgagacagtggacctcgatgccctgatggccgacctttgctctatcgagcaggagttgtcctctatcggctcagggaattctaagcggcagatcaccgaaactaaagccacacagaagttgcccgtgtcccgacatacgctaaaacacggaactctgaaaggtttgagttcctcttccaatcggatagcgaagccatctcacgcctcttattcgttggatgatgtgaccgcacagctcgaacaggcgagtctctcaatggacgaggctgcacaacagagcgtgcttgaagacacaaaaccgctcgtgactaaccagcataggcgtaccgcttctgctggcaccgtctcagacgctgaagtccactcaattagcaattcaagtcactcctcaattacttccgccgcatctagtatggactcgcttgatattgacaaggtgacccggccacaggagcttgacctgacacaccaagggcagccgataacggagcatgctatcagcctgcgatgctcttctaaacaggctaagcggcacatcgacttcacagaagagcaggccgagctaacccccgaagaacaggcagcaaaactaaaggccgagaaaattcgagtcgccctggagaagatcaaggaggctcaggtcaaaaagctggtaatcagggtccacatgagtgacgacagctcaaaaaccatgatggtagatgaaagacagacagttcgccaggtgctggataacctcatggacaaatctcactgtggctattcgttggattggtccttggttgagactgtgagcgagctccaaatggaacgcatctttgaggaccacgagaatctggtggagaatctactgaattggacaagagacagccagaacaagctgatcttcatggaacgcattgagaagtacgctctgtttaaaaatcctcagaactacctcttaggcaagaaggaaaccgccgagatggcggaccggaacaaggaggttttactggaggaatgcttttgtgggtccagtgtcactgtgcctgaaatagagggggtgctctggcttaaggatgacggcaaaaagtcctggaaaaagaggtattttcttctgagagcaagcggtatctactatgtgcccaaaggcaaagcaaaggtcagtcgcgatctcgtgtgcttcctccagctcgaccacgttaacgtgtattacggccaggattacagaaacaaatataaagcacctaccgattactgtctagtgcttaaacatcctcaaattcaaaagaaatcgcagtacatcaaatacctctgttgtgatgatgtcagaacgttacaccagtgggtcaacggaatcagaatcgccaagtatggtaaacagctgtatatgaattatcaggaggccttgaaacgtacagagtccgcatatgattggacatcactcagttctagcagtattaaatccggcagttcatcttccagtattcctgagtcccagtccaatcattctaatcagagtgacagtggggtctcagatactcagccggctggccacgtgagaagtcaatctattgtgtcatcggtcttcagcgaagcctggaagcgaggtacccagttggaagagtctagcaagtag

SEQ ID NO: 300561 - DNA, 2692 bp, Artificial Sequence
  derived and/or modified sequence
gcggccgccccgcccccgctcccgccgccgcccgccagtcagtcagtcagtcagtcagtcagtcagtcagtcagtcactgagcgcgcggcgcgggagctgctggcagtcgctgcgtctctggcgagggagcgccgcgcctggggaggaggcggaggcagcggctggaggagcgcgagcggcggtttccttgcccggggccgcgggaaggccgaccgactgccgcgatggagcagctatcagatgaagaaattgatcatggtgctgaagaagacagtgacaaggaagatcaggacctggacaaaatgtttggagcctggcttggagaactagacaaactcactcagagtttggattctgacaagcccatggaaccagtaaaaagatctcctcttcgccaggaaacaaacatggccaacttttcttaccgcttctccatatacaacttgaatgaagctctgaatcagggagagactgtggatctggatgccttgatggctgatctttgctctatagagcaggagctcagcagcattggttcaggaaacagtaagcgtcaaatcacagaaacgaaagctactcagaaattgcctgttagccgacatacattgaaacatggcaccttgaaaggattatcttcttcatctaataggatagctaaaccttcccatgccagctactccttggacgacgtcactgcacagttagaacaggcctctttgagtatggatgaggctgctcagcaatctgtactagaagatactaaacccttagtaactaatcagcacagaagaaccgcgtcagcaggcacagtgagtgatgctgaagtacactctattagtaattcctcccattccagcatcacttccgcagcctccagcatggactctttggatattgataaagtaacacgccctcaagagctggatttgacacatcaagggcagccaattactgagcatgctatttctctgagatgttccagcaagcaggccaagcgtcatattgacttcacagaagaacaggctgagctgacacctgaagaacaggcagcaaaattgaaagctgagaagatcagagttgccctagagaaaattaaagaggcacaagtgaaaaagctggtgatcagagtccacatgtctgatgacagttctaaaacaatgatggtggatgagaggcagacagtaagacaagtactggataacctgatggacaaatcccactgcggttatagtttagactggtcactggtagaaaccgtttctgaattacaaatggagagaatctttgaagaccatgaaaacttggttgaaaatcttcttaattggacaagagatagccaaaacaagcttatatttatggagcgtatagaaaaatatgcacttttcaaaaacccacagaattatcttttggggaaaaaagaaacagctgagatggcagatagaaacaaagaagtcctcttggaggaatgtttttgtggaagttctgtaactgtaccagaaattgaaggagtcctttggttgaaggatgatggcaagaagtcctggaaaaagcgttattttctcttgcgagcatctggtatctactatgttcccaaaggaaaagcaaaggtctctcgggatctggtgtgctttctccagctggatcatgtcaacgtttattatggccaggactatcggaacaaatacaaagcacctacagactattgtctggtgctgaagcatccacaaatccagaagaaatctcaatatatcaaatacctttgttgtgatgatgtgaggacactgcatcagtgggtcaatgggatccgcattgcaaagtatgggaagcagctctatatgaactaccaagaagccttgaagaggacagagtcagcctatgattggacttccttatccagctccagcattaaatcgggatccagttcttccagcatcccagagtctcagtcaaaccactccaatcagtctgatagcggagtttctgacacccagccagcaggacacgtccgttcccagagcattgtgagctccgtattctctgaagcctggaaacgaggcactcagttggaagagtccagcaagtaaaacaaatgtaaagaatgtcccccctttacctgcattgctggacttctgtgcatgttggatgcaattgtctcacaccaacacgagtgtgtgtgtcaagcttattcattcctgtgtgactgtgcacgcctgctcaacattctcatactctcctgtgtcagcttactagcatcaaaaagccatcctcattccaccaggaagccctcctaaacccagttatagcatctgcttgatgtggatgcagtcatggactgaaaggtaaactggagccatcacatctccccttggaagtccagtgctcagaggaccgccacagagggttccatgtagggcaggctgtgtcaaagtcatacagccaaggtcagaagtcatgcatcctgtcaccattcaaacagcttttgcagccggacatttttcctagattgttagatggtctagctattttactgtggggtaaaacaagttttctgtttccttcttgcccgcacaatcagattttagccttcctgacattgtccatctttatgatcaccaccaacttctgcatccttttcatgcatgtcccagactccctgctttttagttttacacaatcaaagcttacctctgt

SEQ ID NO: 300562 - DNA, 1875 bp, Artificial Sequence
  derived and/or modified sequence
atggagcagctatcagatgaagaaattgatcatggtgctgaagaagacagtgacaaggaagatcaggacctggacaaaatgtttggagcctggcttggagaactagacaaactcactcagagtttggattctgacaagcccatggaaccagtaaaaagatctcctcttcgccaggaaacaaacatggccaacttttcttaccgcttctccatatacaacttgaatgaagctctgaatcagggagagactgtggatctggatgccttgatggctgatctttgctctatagagcaggagctcagcagcattggttcaggaaacagtaagcgtcaaatcacagaaacgaaagctactcagaaattgcctgttagccgacatacattgaaacatggcaccttgaaaggattatcttcttcatctaataggatagctaaaccttcccatgccagctactccttggacgacgtcactgcacagttagaacaggcctctttgagtatggatgaggctgctcagcaatctgtactagaagatactaaacccttagtaactaatcagcacagaagaaccgcgtcagcaggcacagtgagtgatgctgaagtacactctattagtaattcctcccattccagcatcacttccgcagcctccagcatggactctttggatattgataaagtaacacgccctcaagagctggatttgacacatcaagggcagccaattactgagcatgctatttctctgagatgttccagcaagcaggccaagcgtcatattgacttcacagaagaacaggctgagctgacacctgaagaacaggcagcaaaattgaaagctgagaagatcagagttgccctagagaaaattaaagaggcacaagtgaaaaagctggtgatcagagtccacatgtctgatgacagttctaaaacaatgatggtggatgagaggcagacagtaagacaagtactggataacctgatggacaaatcccactgcggttatagtttagactggtcactggtagaaaccgtttctgaattacaaatggagagaatctttgaagaccatgaaaacttggttgaaaatcttcttaattggacaagagatagccaaaacaagcttatatttatggagcgtatagaaaaatatgcacttttcaaaaacccacagaattatcttttggggaaaaaagaaacagctgagatggcagatagaaacaaagaagtcctcttggaggaatgtttttgtggaagttctgtaactgtaccagaaattgaaggagtcctttggttgaaggatgatggcaagaagtcctggaaaaagcgttattttctcttgcgagcatctggtatctactatgttcccaaaggaaaagcaaaggtctctcgggatctggtgtgctttctccagctggatcatgtcaacgtttattatggccaggactatcggaacaaatacaaagcacctacagactattgtctggtgctgaagcatccacaaatccagaagaaatctcaatatatcaaatacctttgttgtgatgatgtgaggacactgcatcagtgggtcaatgggatccgcattgcaaagtatgggaagcagctctatatgaactaccaagaagccttgaagaggacagagtcagcctatgattggacttccttatccagctccagcattaaatcgggatccagttcttccagcatcccagagtctcagtcaaaccactccaatcagtctgatagcggagtttctgacacccagccagcaggacacgtccgttcccagagcattgtgagctccgtattctctgaagcctggaaacgaggcactcagttggaagagtccagcaaggtaacagcttcgttttaa

SEQ ID NO: 300563 - DNA, 1860 bp, Artificial Sequence
  derived and/or modified sequence
atggagcagctatcagatgaagaaattgatcatggtgctgaagaagacagtgacaaggaagatcaggacctggacaaaatgtttggagcctggcttggagaactagacaaactcactcagagtttggattctgacaagcccatggaaccagtaaaaagatctcctcttcgccaggaaacaaacatggccaacttttcttaccgcttctccatatacaacttgaatgaagctctgaatcagggagagactgtggatctggatgccttgatggctgatctttgctctatagagcaggagctcagcagcattggttcaggaaacagtaagcgtcaaatcacagaaacgaaagctactcagaaattgcctgttagccgacatacattgaaacatggcaccttgaaaggattatcttcttcatctaataggatagctaaaccttcccatgccagctactccttggacgacgtcactgcacagttagaacaggcctctttgagtatggatgaggctgctcagcaatctgtactagaagatactaaacccttagtaactaatcagcacagaagaaccgcgtcagcaggcacagtgagtgatgctgaagtacactctattagtaattcctcccattccagcatcacttccgcagcctccagcatggactctttggatattgataaagtaacacgccctcaagagctggatttgacacatcaagggcagccaattactgagcatgctatttctctgagatgttccagcaagcaggccaagcgtcatattgacttcacagaagaacaggctgagctgacacctgaagaacaggcagcaaaattgaaagctgagaagatcagagttgccctagagaaaattaaagaggcacaagtgaaaaagctggtgatcagagtccacatgtctgatgacagttctaaaacaatgatggtggatgagaggcagacagtaagacaagtactggataacctgatggacaaatcccactgcggttatagtttagactggtcactggtagaaaccgtttctgaattacaaatggagagaatctttgaagaccatgaaaacttggttgaaaatcttcttaattggacaagagatagccaaaacaagcttatatttatggagcgtatagaaaaatatgcacttttcaaaaacccacagaattatcttttggggaaaaaagaaacagctgagatggcagatagaaacaaagaagtcctcttggaggaatgtttttgtggaagttctgtaactgtaccagaaattgaaggagtcctttggttgaaggatgatggcaagaagtcctggaaaaagcgttattttctcttgcgagcatctggtatctactatgttcccaaaggaaaagcaaaggtctctcgggatctggtgtgctttctccagctggatcatgtcaacgtttattatggccaggactatcggaacaaatacaaagcacctacagactattgtctggtgctgaagcatccacaaatccagaagaaatctcaatatatcaaatacctttgttgtgatgatgtgaggacactgcatcagtgggtcaatgggatccgcattgcaaagtatgggaagcagctctatatgaactaccaagaagccttgaagaggacagagtcagcctatgattggacttccttatccagctccagcattaaatcgggatccagttcttccagcatcccagagtctcagtcaaaccactccaatcagtctgatagcggagtttctgacacccagccagcaggacacgtccgttcccagagcattgtgagctccgtattctctgaagcctggaaacgaggcactcagttggaagagtccagcaagtaa

SEQ ID NO: 300564 - protein, 617 aa, Artificial Sequence
  derived and/or modified sequence
MEQLSDEEIDHGAEEDSDKEDQDLDKMFGAWLGELDKLTQSLDSDKPMEPVKRSPLRQETNMANFSYRFSIYNLNEALNQGETVDLDALMADLCSIEQELSSIGSGNSKRQITETKATQKLPVSRHTLKHGTLKGLSSSSNRIAKPSHASYSLDDVTAQLEQASLSMDEAAQQSVLEDTKPLVTNQHRRTASAGTVSDAEVHSISNSSHSSITSAASSMDSLDIDKVTRPQELDLTHQGQPITEHSYLDRETSLLLRNIAGKPSHLLTKEEQAAKLKAEKIRVALEKIKEAQVKKLVIRVHMSDDSSKTMMVDERQTVRQVLDNLMDKSHCGYSLDWSLVETVSELQMERIFEDHENLVENLLNWTRDSQNKLIFMERIEKYALFKNPQNYLLGKKETAEMADRNKEVLLEECFCGSSVTVPEIEGVLWLKDDGKKSWKKRYFLLRASGIYYVPKGKAKVSRDLVCFLQLDHVNVYYGQDYRNKYKAPTDYCLVLKHPQIQKKSQYIKYLCCDDVRTLHQWVNGIRIAKYGKQLYMNYQEALKRTESAYDWTSLSSSSIKSGSSSSSIPESQSNHSNQSDSGVSDTQPAGHVRSQSIVSSVFSEAWKRGTQLEESSK

SEQ ID NO: 300565 - protein, 622 aa, Artificial Sequence
  derived and/or modified sequence
MEQLSDEEIDHGAEEDSDKEDQDLDKMFGAWLGELDKLTQSLDSDKPMEPVKRSPLRQETNMANFSYRFSIYNLNEALNQGETVDLDALMADLCSIEQELSSIGSGNSKRQITETKATQKLPVSRHTLKHGTLKGLSSSSNRIAKPSHASYSLDDVTAQLEQASLSMDEAAQQSVLEDTKPLVTNQHRRTASAGTVSDAEVHSISNSSHSSITSAASSMDSLDIDKVTRPQELDLTHQGQPITEHSYLDRETSLLLRNIAGKPSHLLTKEEQAAKLKAEKIRVALEKIKEAQVKKLVIRVHMSDDSSKTMMVDERQTVRQVLDNLMDKSHCGYSLDWSLVETVSELQMERIFEDHENLVENLLNWTRDSQNKLIFMERIEKYALFKNPQNYLLGKKETAEMADRNKEVLLEECFCGSSVTVPEIEGVLWLKDDGKKSWKKRYFLLRASGIYYVPKGKAKVSRDLVCFLQLDHVNVYYGQDYRNKYKAPTDYCLVLKHPQIQKKSQYIKYLCCDDVRTLHQWVNGIRIAKYGKQLYMNYQEALKRTESAYDWTSLSSSSIKSGSSSSSIPESQSNHSNQSDSGVSDTQPAGHVRSQSIVSSVFSEAWKRGTQLEESSKVTASF

SEQ ID NO: 300566 - DNA, 1854 bp, Artificial Sequence
  derived and/or modified sequence
atggagcagctgagcgacgaggagatcgaccacggcgccgaggaggacagcgacaaggaggaccaggacctggacaagatgttcggcgcctggctgggcgagctggacaagctgacccagagcctggacagcgacaagcccatggagcccgtgaagagaagccccctgagacaggagaccaacatggccaacttcagctacagattcagcatctacaacctgaacgaggccctgaaccagggcgagaccgtggacctggacgccctgatggccgacctgtgcagcatcgagcaggagctgagcagcatcggcagcggcaacagcaagagacagatcaccgagaccaaggccacccagaagctgcccgtgagcagacacaccctgaagcacggcaccctgaagggcctgagcagcagcagcaacagaatcgccaagcccagccacgccagctacagcctggacgacgtgaccgcccagctggagcaggccagcctgagcatggacgaggccgcccagcagagcgtgctggaggacaccaagcccctggtgaccaaccagcacagaagaaccgccagcgccggcaccgtgagcgacgccgaggtgcacagcatcagcaacagcagccacagcagcatcaccagcgccgccagcagcatggacagcctggacatcgacaaggtgaccagaccccaggagctggacctgacccaccagggccagcccatcaccgagcacagctacctggacagagagaccagcctgctgctgagaaacatcgccggcaagcccagccacctgctgaccaaggaggagcaggccgccaagctgaaggccgagaagatcagagtggccctggagaagatcaaggaggcccaggtgaagaagctggtgatcagagtgcacatgagcgacgacagcagcaagaccatgatggtggacgagagacagaccgtgagacaggtgctggacaacctgatggacaagagccactgcggctacagcctggactggagcctggtggagaccgtgagcgagctgcagatggagagaatcttcgaggaccacgagaacctggtggagaacctgctgaactggaccagagacagccagaacaagctgatcttcatggagagaatcgagaagtacgccctgttcaagaacccccagaactacctgctgggcaagaaggagaccgccgagatggccgacagaaacaaggaggtgctgctggaggagtgcttctgcggcagcagcgtgaccgtgcccgagatcgagggcgtgctgtggctgaaggacgacggcaagaagagctggaagaagagatacttcctgctgagagccagcggcatctactacgtgcccaagggcaaggccaaggtgagcagagacctggtgtgcttcctgcagctggaccacgtgaacgtgtactacggccaggactacagaaacaagtacaaggcccccaccgactactgcctggtgctgaagcacccccagatccagaagaagagccagtacatcaagtacctgtgctgcgacgacgtgagaaccctgcaccagtgggtgaacggcatcagaatcgccaagtacggcaagcagctgtacatgaactaccaggaggccctgaagagaaccgagagcgcctacgactggaccagcctgagcagcagcagcatcaagagcggcagcagcagcagcagcatccccgagagccagagcaaccacagcaaccagagcgacagcggcgtgagcgacacccagcccgccggccacgtgagaagccagagcatcgtgagcagcgtgttcagcgaggcctggaagagaggcacccagctggaggagagcagcaagtag

SEQ ID NO: 300567 - DNA, 1869 bp, Artificial Sequence
  derived and/or modified sequence
atggagcagctgagcgacgaggagatcgaccacggcgccgaggaggacagcgacaaggaggaccaggacctggacaagatgttcggcgcctggctgggcgagctggacaagctgacccagagcctggacagcgacaagcccatggagcccgtgaagagaagccccctgagacaggagaccaacatggccaacttcagctacagattcagcatctacaacctgaacgaggccctgaaccagggcgagaccgtggacctggacgccctgatggccgacctgtgcagcatcgagcaggagctgagcagcatcggcagcggcaacagcaagagacagatcaccgagaccaaggccacccagaagctgcccgtgagcagacacaccctgaagcacggcaccctgaagggcctgagcagcagcagcaacagaatcgccaagcccagccacgccagctacagcctggacgacgtgaccgcccagctggagcaggccagcctgagcatggacgaggccgcccagcagagcgtgctggaggacaccaagcccctggtgaccaaccagcacagaagaaccgccagcgccggcaccgtgagcgacgccgaggtgcacagcatcagcaacagcagccacagcagcatcaccagcgccgccagcagcatggacagcctggacatcgacaaggtgaccagaccccaggagctggacctgacccaccagggccagcccatcaccgagcacagctacctggacagagagaccagcctgctgctgagaaacatcgccggcaagcccagccacctgctgaccaaggaggagcaggccgccaagctgaaggccgagaagatcagagtggccctggagaagatcaaggaggcccaggtgaagaagctggtgatcagagtgcacatgagcgacgacagcagcaagaccatgatggtggacgagagacagaccgtgagacaggtgctggacaacctgatggacaagagccactgcggctacagcctggactggagcctggtggagaccgtgagcgagctgcagatggagagaatcttcgaggaccacgagaacctggtggagaacctgctgaactggaccagagacagccagaacaagctgatcttcatggagagaatcgagaagtacgccctgttcaagaacccccagaactacctgctgggcaagaaggagaccgccgagatggccgacagaaacaaggaggtgctgctggaggagtgcttctgcggcagcagcgtgaccgtgcccgagatcgagggcgtgctgtggctgaaggacgacggcaagaagagctggaagaagagatacttcctgctgagagccagcggcatctactacgtgcccaagggcaaggccaaggtgagcagagacctggtgtgcttcctgcagctggaccacgtgaacgtgtactacggccaggactacagaaacaagtacaaggcccccaccgactactgcctggtgctgaagcacccccagatccagaagaagagccagtacatcaagtacctgtgctgcgacgacgtgagaaccctgcaccagtgggtgaacggcatcagaatcgccaagtacggcaagcagctgtacatgaactaccaggaggccctgaagagaaccgagagcgcctacgactggaccagcctgagcagcagcagcatcaagagcggcagcagcagcagcagcatccccgagagccagagcaaccacagcaaccagagcgacagcggcgtgagcgacacccagcccgccggccacgtgagaagccagagcatcgtgagcagcgtgttcagcgaggcctggaagagaggcacccagctggaggagagcagcaaggtgaccgccagcttctag

SEQ ID NO: 300568 - DNA, 1854 bp, Artificial Sequence
  derived and/or modified sequence
atggaacagttaagcgatgaagagattgaccatggcgccgaagaagactctgacaaagaggatcaggaccttgataaaatgttcggggcctggctcggtgaacttgataaattgactcagagcctggatagcgataagccgatggaaccggtgaaacggagccccctgaggcaagaaacgaacatggcaaatttcagttacagattcagtatatataatcttaacgaagcccttaaccagggcgaaaccgtggacttagatgccctgatggcagacctgtgctccattgaacaggagctgtcttccatcgggtcagggaatagcaagcgccagatcactgagaccaaggctacccaaaaactgccagttagtaggcatactctgaagcatggaaccttaaagggtctctctagcagtagtaatcgaattgccaaacccagtcatgctagctactcactggatgacgtgacagctcagctggagcaggcctcgctatctatggatgaggcggcccagcagtcagtacttgaagatacgaagccactagtgacaaatcagcataggcgtacagcctccgccggaacagtatcagatgctgaggtgcattccatttccaatagttcccattcttctattaccagcgccgcttcgtccatggacagcctcgacattgataaagtcacaagacctcaggagctggatttaactcaccagggccagcccataacggaacatagctatctggatcgagagactagcctgctcctgcggaacatcgctgggaaaccaagtcatctattgacgaaagaagagcaggccgcaaaactaaaagccgaaaagatccgggtcgccctcgagaagatcaaagaggcgcaagtgaaaaaacttgttatcagggtccacatgtctgatgacagtagtaaaacaatgatggttgacgaacgccaaaccgtgaggcaagtgctggacaatctgatggacaaaagtcattgcggatatagtctggattggtctttagtagaaacagtttcagagctgcagatggagcggattttcgaggatcatgaaaatctggtggaaaacctgctgaactggacaagggattcccagaacaagctgatctttatggaacgcattgaaaagtatgctctcttcaagaatccacaaaattacctgctgggtaagaaggagacggcagagatggccgaccgcaataaagaagtcttactggaggagtgcttttgcggttctagcgtgacggttccagaaatcgaaggggtgctctggctcaaggacgacgggaagaagtcctggaagaaacggtatttcctgctgcgggcaagcggcatatattatgttcccaagggaaaagcaaaagtgtcacgagatctggtgtgtttccttcagctggatcacgtgaatgtgtattacggccaggattaccgcaacaagtataaagctcctaccgactactgtctggtgctgaaacatccacagattcagaagaagtcgcagtacattaagtacttgtgttgcgacgatgtccgcacactgcatcagtgggttaatgggattaggattgcgaagtatggcaagcagctgtacatgaattatcaggaggccctcaaaaggacagagtccgcctacgactggaccagtttgtcctcctccagtattaagtcagggtcatcctcttcttcaattcccgagtctcagtcaaatcattccaaccaaagcgattccggcgtatcagatactcagccagctggccacgttaggtcccagtccattgtatcaagtgtgttttctgaggcttggaagaggggtacccagctagaggagagctctaaatag

SEQ ID NO: 300569 - DNA, 1869 bp, Artificial Sequence
  derived and/or modified sequence
atggagcagctctcagacgaagagattgatcatggggcagaggaagactccgacaaggaggaccaagatttggacaaaatgttcggggcctggctgggagagctggataaactgactcagagcctggactccgataaacccatggagcccgttaagaggagccccctccgacaagaaactaatatggctaatttcagctataggtttagcatctataatctcaatgaggccctcaatcagggcgagaccgtggacttggacgctttaatggctgatctttgctccatagagcaagaactgagctctattggctcgggcaattccaagcgccagataactgagaccaaagccactcaaaaattgcccgtttccaggcacaccttaaagcacggtacattgaagggcttgagtagctcttctaaccgaattgcaaaaccttcccacgccagttacagccttgatgacgtaaccgcacagctggagcaagcctcactcagcatggacgaagccgcgcagcaaagtgtacttgaggatacaaagcctctcgttacaaatcagcacagacgtacagcctccgcagggactgtttccgacgcagaggttcacagcatctccaattcatctcattcttcaatcacttctgccgcgtcaagtatggactccctggacatcgataaggtgacgagacctcaggaactggacctgacacaccaggggcagcctataaccgaacatagctatctggatcgagaaacatccctgttgttgaggaacatcgcaggaaagccctcacatctccttacaaaagaagaacaggccgccaaacttaaggccgaaaagattcgggtggctctcgagaaaatcaaggaagcacaggtcaagaagcttgttattcgcgtccacatgtctgatgacagctccaaaacaatgatggtggatgagcgccagaccgtgcgtcaggtcctcgataatttaatggacaagtcgcactgtggatacagcctagattggagcctggtggagacggtatccgaactgcagatggagcggattttcgaggaccatgaaaatctggtggaaaatctgctgaactggacacgagattcacaaaacaagctgattttcatggaaaggattgagaagtatgcactctttaaaaatccacagaattatctcttgggtaaaaaagaaaccgctgagatggctgataggaataaagaagtattgttagaggaatgcttctgcggttcctctgtgacagtgcctgagatcgaaggtgtattatggctgaaggatgatggcaaaaagtcctggaaaaagaggtatttcctcctgcgagcttccggaatctactatgtgcccaaggggaaagctaaagtgagccgggatttggtgtgctttctccaactcgatcacgtcaatgtttattacggtcaagactacaggaataaatataaggcgccgacagattactgtttagtgcttaaacatccacagatccaaaagaaaagtcagtatattaaatacctgtgttgtgacgatgtccgaacactccatcagtgggtaaatggcattcgaattgcaaagtatgggaaacagctttatatgaactaccaggaggccttgaaacgaaccgagtcagcctatgactggacaagccttagtagttcgagcatcaagtcgggctcatcctcttcttctattcctgaaagtcagtcaaatcattctaatcagtcagattccggcgtgtcagacacacagccagcaggccatgtgcgtagtcagtccatcgtcagtagtgtctttagcgaagcttggaagcggggcactcagctggaagagagcagcaaagttacagcgtctttttag

SEQ ID NO: 300570 - DNA, 1854 bp, Artificial Sequence
  derived and/or modified sequence
atggaacaattatctgacgaggagatagaccacggggccgaggaagatagcgacaaagaggatcaggacctagacaaaatgttcggtgcctggctgggcgagctcgacaaattaactcaatccctggatagtgacaaaccgatggaaccagtgaaacgatcacccctcagacaggagaccaacatggccaacttcagttatcgtttttctatttataatttaaacgaagcccttaaccagggggagaccgtggacctggacgcgctgatggccgacctgtgtagcatagagcaagaactcagttcaatcggaagcggcaacagcaaaagacaaattacggagactaaggccactcagaaattgcctgtttcgcgacatactctaaagcatggcaccctgaaagggctgtcttctagttcaaataggatcgccaagccatcccacgccagctattccttagatgatgtcacagctcagctggagcaagcctccttgagcatggacgaggccgcacagcagagtgtgctggaggacacgaagccactcgtaactaaccagcacaggcgcactgcctccgccggcacagtgtcagatgccgaagttcactctatttctaacagctcgcactctagcatcacaagcgcagcctccagtatggacagcttggacatcgacaaggtgacaagaccccaggaattagacctgacccaccagggccagcccatcaccgagcacagttatctggatcgagagactagcctgttactccgcaacatcgctgggaagccttcccatttgctcaccaaagaagagcaggcagccaaactcaaagccgaaaaaattcgcgtcgccctcgagaaaattaaagaggcacaggtgaaaaaactggttattcgcgtgcatatgagcgacgactcctctaaaactatgatggtagatgagaggcagaccgttcggcaagtactggacaatctcatggataagagtcactgtggctacagtctggactggagtttagtagagactgtgtccgagcttcagatggaaagaattttcgaagatcatgagaatctggtagaaaacctgctaaactggacacgagattcccagaataagcttatttttatggagcgcatcgagaaatacgcgctgttcaagaaccctcagaattacctcctggggaaaaaggaaacggccgagatggccgatcgcaataaagaagtcctcctggaggagtgcttctgtggctcttcagtgacagtgcccgaaattgaaggcgtcctctggctgaaggacgacggaaaaaaatcatggaagaagcggtacttcttgctccgagcttcgggcatctattacgttcctaaagggaaagcgaaagtgtcgagggatctggtttgtttcctgcaattggatcatgtgaacgtttactacggacaggactacagaaataagtataaggctccgacagactactgcctggttttgaagcacccccaaattcagaagaagtcacagtatatcaagtacctctgctgtgacgatgtccgtaccctgcatcaatgggtcaatgggatccgcatcgcgaagtatggaaagcagctgtatatgaactatcaggaggcgctgaaaagaactgaatcagcctatgattggacttccctttccagttcctctattaaatctggctccagctcatcatcaattccagagtctcagtccaatcacagtaaccagtcggacagcggtgtgtcggacactcaaccagccggccatgtaagatcccagagtatcgttagctcagtcttttccgaagcttggaaacgtgggacacaactggaagagagctcgaagtag

SEQ ID NO: 300571 - DNA, 1854 bp, Artificial Sequence
  derived and/or modified sequence
atggagcagctgagtgatgaggagattgaccatggagcagaagaagattctgacaaggaggaccaggacctggacaagatgtttggagcctggctgggggagctggacaagctgacccagagcctggacagcgacaagcccatggagcctgtgaagaggagccccctgcggcaggagaccaacatggccaacttctcctaccgcttcagcatctacaacctgaatgaggccctgaaccagggcgagaccgtggacctggatgccctgatggctgacctgtgcagcattgagcaggagctgagcagcatcggcagcggcaacagcaagaggcagatcacagagaccaaggccacccagaagctgcctgtgagccgccacaccctgaagcacggcaccctgaagggcctgagcagcagcagcaacagaattgccaagcccagccacgccagctacagcctggatgatgtgacagcccagctggagcaggccagcctgtccatggatgaggccgcccagcagagcgtgctggaggacaccaagcccctggtgaccaaccagcacagaagaacagccagcgctggcaccgtgtctgatgctgaggtgcacagcatcagcaacagcagccacagcagcatcaccagcgctgccagctccatggacagcctggacatcgacaaggtgacccggccccaggagctggacctgacccaccagggccagcccatcacagagcacagctacctggaccgggagaccagcctgctgctgagaaatattgctgggaagcccagccacctgctgaccaaggaggagcaggccgccaagctgaaggccgagaagatccgggtggccctggagaagatcaaggaggcccaggtgaagaagctggtgatccgggtgcacatgtctgatgacagcagcaagaccatgatggtggatgagcggcagacagtgcggcaggtgctggacaacctgatggacaagagccactgcggctacagcctggactggagcctggtggagaccgtgtctgagctgcagatggagcgcatctttgaagatcatgagaacctggtggagaacctgctgaactggacccgggacagccagaacaagctgatcttcatggagagaattgagaagtatgccctcttcaagaacccccagaactacctgctgggcaagaaggagacagctgagatggctgacaggaacaaggaggtgctgctggaggagtgcttctgtggcagctctgtgacagtgcctgagattgagggcgtgctgtggctgaaggatgatggcaagaagtcctggaagaagcgctacttcctgctgcgggccagcggcatctactacgtgcccaagggcaaggccaaggtgtcccgggacctggtgtgcttcctgcagctggaccacgtgaatgtgtactacggccaggactacagaaacaagtacaaggcccccacagactactgcctggtgctgaagcacccccagatccagaagaagagccagtacatcaagtacctgtgctgtgatgatgtgaggaccctgcaccagtgggtgaatggcatcagaattgccaagtatggcaagcagctgtacatgaactaccaggaggccctgaagaggacagaaagtgcctatgactggaccagcctgagcagcagcagcatcaagagcggcagcagcagcagcagcatccctgagagccagagcaaccacagcaaccagagcgacagcggcgtgtctgacacccagcctgctggccacgtgcgcagccagagcatcgtgagcagcgtcttcagcgaggcctggaagaggggcacccagctggaggagagcagcaagtag

SEQ ID NO: 300572 - DNA, 1869 bp, Artificial Sequence
  derived and/or modified sequence
atggagcagctgagtgatgaggagattgaccatggagcagaagaagattctgacaaggaggaccaggacctggacaagatgtttggagcctggctgggggagctggacaagctgacccagagcctggacagcgacaagcccatggagcctgtgaagaggagccccctgcggcaggagaccaacatggccaacttctcctaccgcttcagcatctacaacctgaatgaggccctgaaccagggcgagaccgtggacctggatgccctgatggctgacctgtgcagcattgagcaggagctgagcagcatcggcagcggcaacagcaagaggcagatcacagagaccaaggccacccagaagctgcctgtgagccgccacaccctgaagcacggcaccctgaagggcctgagcagcagcagcaacagaattgccaagcccagccacgccagctacagcctggatgatgtgacagcccagctggagcaggccagcctgtccatggatgaggccgcccagcagagcgtgctggaggacaccaagcccctggtgaccaaccagcacagaagaacagccagcgctggcaccgtgtctgatgctgaggtgcacagcatcagcaacagcagccacagcagcatcaccagcgctgccagctccatggacagcctggacatcgacaaggtgacccggccccaggagctggacctgacccaccagggccagcccatcacagagcacagctacctggaccgggagaccagcctgctgctgagaaatattgctgggaagcccagccacctgctgaccaaggaggagcaggccgccaagctgaaggccgagaagatccgggtggccctggagaagatcaaggaggcccaggtgaagaagctggtgatccgggtgcacatgtctgatgacagcagcaagaccatgatggtggatgagcggcagacagtgcggcaggtgctggacaacctgatggacaagagccactgcggctacagcctggactggagcctggtggagaccgtgtctgagctgcagatggagcgcatctttgaagatcatgagaacctggtggagaacctgctgaactggacccgggacagccagaacaagctgatcttcatggagagaattgagaagtatgccctcttcaagaacccccagaactacctgctgggcaagaaggagacagctgagatggctgacaggaacaaggaggtgctgctggaggagtgcttctgtggcagctctgtgacagtgcctgagattgagggcgtgctgtggctgaaggatgatggcaagaagtcctggaagaagcgctacttcctgctgcgggccagcggcatctactacgtgcccaagggcaaggccaaggtgtcccgggacctggtgtgcttcctgcagctggaccacgtgaatgtgtactacggccaggactacagaaacaagtacaaggcccccacagactactgcctggtgctgaagcacccccagatccagaagaagagccagtacatcaagtacctgtgctgtgatgatgtgaggaccctgcaccagtgggtgaatggcatcagaattgccaagtatggcaagcagctgtacatgaactaccaggaggccctgaagaggacagaaagtgcctatgactggaccagcctgagcagcagcagcatcaagagcggcagcagcagcagcagcatccctgagagccagagcaaccacagcaaccagagcgacagcggcgtgtctgacacccagcctgctggccacgtgcgcagccagagcatcgtgagcagcgtcttcagcgaggcctggaagaggggcacccagctggaggagagcagcaaggtgacagccagcttctag

SEQ ID NO: 300573 - DNA, 1854 bp, Artificial Sequence
  derived and/or modified sequence
atggagcagctgagcgacgaggagatcgaccacggcgccgaggaggatagtgacaaagaggatcaggatcttgacaagatgtttggggcctggctgggagagttggacaagctgactcaaagtttggatagcgataagccgatggagcccgtgaaacggtcgccactcagacaggagacaaatatggccaatttttcttaccgcttctccatctataatctgaacgaagcccttaaccagggcgagactgtggatctggatgccttaatggcggatctctgctccatcgagcaagagctgtcatcaattggttcaggaaactccaagcgccagatcaccgagaccaaggcaacgcaaaagctgcctgtctcccggcataccctcaagcacggcacgctgaaaggcctctctagcagctccaataggatcgcaaagccttcccacgcgagctacagcctagacgatgtcaccgcccagctagaacaggccagtctttccatggacgaagccgcccaacagtcggttttggaggacaccaaaccgctcgttactaaccagcataggcgaaccgccagcgcaggcactgtcagtgatgccgaggtccactccatcagcaattcctctcacagctctataacatctgccgcttcatcaatggatagtctagacattgataaagtgactcgtccacaagagttggatctcacacaccagggccagcccatcactgaacattcctatttggaccgagagacctctctgctgttaagaaacatagctggcaagccttcccatctgctgactaaagaggagcaagcagctaaactaaaagctgagaaaatcagggtggccctggagaaaattaaagaggcccaggtgaaaaagctggtcattagagtccacatgagcgacgacagttccaagacaatgatggtggatgaacgccaaacagtgcgtcaggttttggacaatctgatggacaagagtcattgtgggtactccctggattggtctttagtggagactgtctccgagctccagatggagagaattttcgaggaccatgagaacctcgtcgagaatctcctgaactggacgcgggatagccagaataaactcatcttcatggaaaggattgaaaaatacgctttgttcaagaacccacagaattatctgcttggtaaaaaggagactgctgagatggcagataggaataaagaggtgctgctggaggaatgcttctgtggaagttccgtcaccgtgccagagatcgaaggggtcctatggctgaaggacgacggtaaaaaaagttggaagaaacgttattttctgttgagagctagcggaatttattatgtcccgaagggtaaggctaaggttagccgagacttggtgtgcttcctgcaactggaccatgtgaacgtttactacgggcaggattaccgtaacaagtataaagcccccacagactactgcctcgttctgaaacacccccagatccagaagaagagtcagtacatcaaatacctctgttgcgacgacgtccgcacactccaccagtgggttaacggcatcagaattgccaagtacggtaaacagctgtatatgaactaccaggaagccctgaagcgaaccgagtcggcgtatgactggacgtctctgtcttcatccagtatcaaaagtgggtcctccagcagctccattcctgaatcgcagagtaaccatagtaatcagagcgactcaggggtttccgatacgcagcctgcggggcatgtccgctcccaaagtatcgtgtcaagcgtcttcagtgaagcatggaagagaggcacccaactggaagagagttcaaagtag

SEQ ID NO: 300574 - DNA, 1869 bp, Artificial Sequence
  derived and/or modified sequence
atggagcagctgagcgacgaggagatcgaccacggcgccgaggaggattccgacaaggaggatcaagacctcgacaaaatgttcggagcctggctcggcgagctcgacaaactgacacagagcctggacagtgacaaaccaatggagcctgtcaaaaggtctcccttaagacaagaaacaaatatggcaaacttctcatatagattcagtatctataatttgaatgaggccttaaaccagggtgagacggtcgacctcgacgccctgatggcagacctgtgcagtattgaacaggagctgtccagcatcggttcaggcaacagcaaacgtcagattaccgagacaaaggctactcagaaactgccggtgtctcggcatactctgaagcacggcacactgaagggactatcttcctcttcaaacaggatagctaagcccagccacgcctcatatagtctagacgacgtcactgctcagcttgagcaggcatcactctctatggacgaggctgcacagcaatcagtgcttgaggatacaaaaccactggtaacaaatcaacatagacggacagccagcgccgggacggtcagcgatgcagaagtgcactcaatctcaaatagcagtcatagttctataactagcgccgcctcaagcatggatagtctggatatagataaggtcactcggccacaggaattggatctgacccaccagggccaaccaataaccgaacattcctatctcgacagggaaacaagtctgctgctgcggaacatcgccgggaaacccagccacttattgactaaagaagaacaggcagccaagctgaaagctgagaagatccgcgtggcccttgagaaaatcaaggaagctcaagtaaaaaagctggttatccgagtgcatatgtcggacgattcttccaagacaatgatggtggatgaacgccagacggttcgtcaggtgttagacaaccttatggacaaatcccactgtgggtacagcttggattggagcctggttgaaactgtgagcgagctgcaaatggaacgcattttcgaggaccatgagaatctagtggagaacctgctgaattggactcgagattctcaaaacaagctgatatttatggagcgcatagagaagtacgccctcttcaagaacccccagaattaccttctggggaagaaagagacagcagaaatggccgataggaataaagaagtcctcctggaggagtgtttctgcggaagttcagtgaccgtgcctgagatcgagggagtgttgtggctgaaggatgatggaaaaaaatcttggaagaagcgctactttctcctgcgcgcttccggaatatactatgtacctaagggtaaggcgaaggtctctcgcgatctggtgtgcttcctccagttggaccacgtgaatgtgtattacggacaggactacagaaataagtacaaggctcccactgattactgcctagtcctgaaacatccgcagatccagaagaaatcacagtatatcaaatatttgtgctgcgacgatgtgaggacactgcaccagtgggtcaatggaattcgcattgcaaaatatggcaagcaactctacatgaactaccaggaagctctaaagaggacagaatcggcgtacgactggacatccctttcctcaagttcaattaagtccggttcctctagtagcagtatcccggagagccagtctaaccatagtaatcagagtgattcaggtgtcagcgacactcagcccgccggtcatgttaggagccagagtatcgtttcaagcgttttttcagaagcttggaagagagggactcagctggaagagtcatccaaagttaccgcaagcttctag

SEQ ID NO: 300575 - DNA, 1854 bp, Artificial Sequence
  derived and/or modified sequence
atggagcagctgagcgacgaggagatcgaccacggcgccgaggaggattctgacaaggaagatcaagacttagataaaatgttcggcgcctggcttggggaactggacaaactgactcagtcactggattcagacaagccaatggaacctgttaaacgatccccactacggcaagaaactaatatggccaatttctcctatagattcagtatctataatctgaatgaagctctgaatcaaggtgaaacggtcgatctagatgcccttatggcagatctctgctctatcgagcaagaactttcctctatcgggtctggcaattcaaagcggcaaatcacagaaactaaggctacccagaagctgcctgtgtcaaggcatactcttaaacatgggaccctgaaggggctgagttcaagcagcaaccgtatagccaaacctagccacgccagttacagcctcgatgatgtgaccgcccagcttgagcaggcctccctttccatggatgaagctgcccaacagtctgtgttagaggacacaaaacccctagttaccaatcagcaccggagaacagccagtgccggcactgtctcagatgcggaggtgcactccatcagcaactcctctcacagctcaatcacttcagctgcatcttctatggactcacttgacatcgacaaagtcactcgccctcaggagctcgatctcacacatcaaggccagcccataaccgagcactcatatttggacagagagacctccctgctgcttagaaacatcgcagggaagcccagccacctgctcacaaaagaggaacaggctgccaagttgaaagctgagaaaattcgggtggctctcgagaaaattaaagaggctcaggtgaagaagctagtgatcagggtgcatatgtccgacgattcatcgaagacgatgatggtcgacgaaagacagacagtgaggcaggtgttggacaacctgatggataagtctcactgcggctacagccttgactggtcacttgtggagactgtgagtgaacttcagatggagagaatttttgaagaccatgaaaacctggtcgagaacttgctaaactggactagagattcccagaacaaacttatttttatggagcgaatcgaaaaatatgcactcttcaagaatccacagaactatctcctcgggaaaaaggagaccgccgagatggctgacaggaataaagaggtccttttggaggaatgcttctgtggcagcagcgtaactgtcccagagattgagggagtgctgtggctaaaagacgatgggaaaaagtcctggaagaagcgatattttcttttgagagcctcagggatctactatgttccgaaaggtaaggcaaaagtctctcgagacctggtttgtttcctccagctggatcatgtcaacgtctactatggccaggactacagaaacaaatacaaggccccgactgattattgcctcgtcctgaaacaccctcaaatccaaaaaaaaagccaatatattaaatatctgtgctgtgacgatgtgaggacactccatcagtgggttaacgggattcgcattgcaaaatatggtaaacagctgtacatgaattaccaggaggctctgaagcggaccgagagtgcgtatgattggaccagtttgagcagtagctcaatcaagagcggcagcagctcctcgagcattccagagtctcaatccaatcacagcaaccaatctgattccggcgtgtcagatacccagccggcaggacacgtgcgtagccagtccatcgtgtctagcgtgtttagcgaggcgtggaaacgaggaacacagcttgaggaatcatcaaagtag

SEQ ID NO: 300576 - DNA, 1854 bp, Artificial Sequence
  derived and/or modified sequence
atggaacagttgtccgacgaagagatcgaccacggggcagaggaggacagcgataaagaggaccaagatctcgacaagatgtttggagcctggctcggggaactcgacaaactgacgcagagtctggacagcgataagcccatggaacctgtaaagcggagtccgcttaggcaggagactaacatggcaaacttttcctatcgcttctccatctataatctcaacgaggcgctgaaccagggcgagacagtcgatttggatgccctgatggccgatttgtgttcaattgagcaggagctttcctccattggttcagggaatagcaaaagacagataacagagacaaaggctacccaaaagctgccagtctcaaggcacacactgaaacacgggacactcaagggcctctcctcttccagtaaccgcatcgcaaaacctagtcatgccagttacagcctggacgatgtgaccgctcagttagagcaagcctcactttctatggatgaggctgcccagcagtccgtcttagaggacacgaaacctctagttacgaaccagcacaggcgcaccgcatcagccggtaccgtgtctgatgctgaggtgcacagtatttccaacagttcccactcatcgatcacctcagctgcttcctctatggacagcctcgacatagacaaggttacaagaccccaggaactggacttaactcaccaaggccagcccattaccgaacactcctacctcgacagagagacgtctctcctgcttcgaaatatcgccggtaagccaagtcatcttctcaccaaggaagagcaagctgccaaactcaaggccgaaaagattcgcgttgctcttgaaaaaattaaagaagcgcaagtaaaaaagctggtgatccgggtgcatatgagcgacgatagttcaaagaccatgatggtggacgaacgtcaaactgtgaggcaggtgttagacaatctaatggacaagagtcactgcgggtattctctcgactggagtttggtcgaaactgttagcgaactgcaaatggagcgtatttttgaggatcatgagaacctcgttgagaaccttttgaattggaccagggattctcagaataaactgatatttatggaaaggatcgagaagtatgcactgtttaagaatccccagaactatttattgggcaaaaaagaaactgcagagatggccgatagaaataaggaggtcctgctggaagagtgtttttgcgggagcagcgtaacagtgcccgagatcgagggtgtgttgtggctaaaggacgatggcaagaagtcctggaaaaagaggtactttttgctgagggcgagcgggatttactatgtgccgaaggggaaagccaaagtcagcagagacttagtatgtttcctgcaactagaccatgtgaatgtgtactatggccaagactataggaataaatataaggcacccacagattattgtcttgttttgaaacacccgcagatccagaagaaatctcaatacatcaagtacctgtgttgtgatgacgtgcgcaccctccatcaatgggtgaatgggatccggatcgctaagtacgggaagcagttgtacatgaattaccaggaggcactcaaaaggactgaaagcgcctatgactggacatctctgtcttccagctctatcaagagcggctcatcttcttcttccattccagaatctcagagtaatcatagcaaccagtcagatagtggtgtttccgacacacagcctgctgggcatgtgcgaagccagagtatagtgagttcagtcttcagcgaagcttggaaacgtggtacgcaattagaggaaagcagcaagtag

SEQ ID NO: 300577 - DNA, 1869 bp, Artificial Sequence
  derived and/or modified sequence
atggagcagctttctgacgaggagatagatcacggcgcagaggaggattcagacaaagaggatcaagacctggataagatgtttggggcatggttgggagaacttgacaagctgacgcagtccctcgattcggataaacctatggagcctgttaagcggtctccccttcgacaggagacgaacatggctaactttagctaccgcttctctatttacaatctcaacgaagccctgaaccagggcgagacagtggatttagacgcgctaatggccgacctatgctcaattgaacaggaattgtcgagcattgggtccggaaacagtaagcgtcagataaccgagactaaggccacccaaaagctgcccgtgagccggcacacgctgaaacatggaacgttgaagggtctctccagtagtagtaatcggatagccaaaccttcccatgcttcctattccctggacgatgtaacagctcaactggaacaggcttctctgagcatggatgaagcggcacagcagtctgtattggaggacactaaacccctggtaactaatcagcacagaagaaccgcctccgcgggaactgtgtccgacgccgaagtgcacagcatttccaacagcagccacagctccatcacctccgccgcttccagcatggatagcctcgacattgacaaagttactcgaccccaggagttggacttaacacatcaaggtcagcccattaccgagcacagttacctcgatcgcgagacctctttactcctacggaatatcgccggaaagccttcacatctgctgactaaagaggagcaagcagcaaaacttaaggcagaaaagattcgggtggccctcgagaagatcaaggaggcccaggtcaaaaaattggtgatcagggtacatatgtccgacgattccagcaaaacaatgatggtcgacgagcggcagactgtacgccaggtgctggacaatctgatggacaaaagtcattgtggatatagcctggactggtctcttgtggaaaccgtatcggaacttcagatggagcgtatcttcgaagaccacgagaatctggttgaaaaccttctgaattggacacgcgactctcagaataagctgatcttcatggagcgcatagagaaatacgctctatttaaaaatccacagaactacctactcggaaaaaaggaaaccgcggaaatggcagatcggaacaaggaagtgcttctggaggagtgcttctgtggcagttcggttacagtacccgagattgaaggcgtgctgtggctgaaggacgatggcaaaaaatcctggaagaagcggtactttttgcttcgcgcttctggaatttattacgttcctaaagggaaggccaaggtgagcagggacctggtgtgtttcctgcagctggaccacgtgaatgtgtactatggacaagactaccgaaataaatacaaggctcccacggactactgtctggtattgaagcatccgcaaatccagaagaagtcccagtatataaagtacttatgttgcgatgatgtgcggaccctacaccagtgggtcaacggcatccgaatcgccaagtatggaaaacagctctacatgaattatcaagaagctcttaagcgtaccgaaagtgcttacgactggaccagcttatcatcaagttccattaaatcaggatccagctccagcagcattcccgaaagtcaaagcaatcactccaaccaaagcgatagcggggtatcagatacacagcccgcaggccacgttcggagtcagtcgatcgtcagctccgtgttctccgaggcctggaaacgtggaacccagctcgaggagtcttccaaagtgacagcatccttctag

SEQ ID NO: 300578 - DNA, 1854 bp, Artificial Sequence
  derived and/or modified sequence
atggagcagctgtccgacgaagagatcgaccacggcgctgaagaggatagtgataaggaggaccaggatctggacaagatgttcggagcctggctaggcgaacttgataaactcacccaatctctggactcggataagcccatggagccagttaagaggtccccactgagacaggagacaaatatggcaaacttcagttacagattctccatttacaacttaaacgaagccttaaaccaaggagaaacagtagaccttgacgcactcatggcagatctttgttctatagagcaggaactctcgtctattggctctgggaacagcaagcggcagattacggagaccaaagccacacaaaaactacctgtgtcacggcatacattaaagcacggcactctaaagggcctgagctcgtcatcaaacagaatcgctaaaccaagccatgcctcttactctctggacgacgtcactgctcagctggagcaggccagtctgagcatggacgaggccgcacaacagtctgttctcgaagacactaagcccctcgtgacaaaccaacacagacgcacggccagcgccggaactgtgagcgacgctgaggtgcactctatctcaaacagcagccactcatcaatcacttccgccgcatcctcaatggactcccttgatatcgacaaagtaactagaccccaggagctggacttaacccaccaagggcagccgatcaccgagcatagttacctcgatagagagacgtctcttcttctgaggaatatagcaggtaaaccttcgcatcttctcacaaaggaagaacaggccgcaaaattgaaggctgagaagatccgtgtcgctttggaaaagatcaaagaggcccaggtgaagaaactcgttattcgggtgcatatgtcagacgacagcagtaaaaccatgatggtcgacgagcgtcagacggtaagacaagtcctagataaccttatggataagtcccactgcggatatagtttggactggtctcttgtggagaccgtgagtgagttgcagatggagcggatctttgaggatcatgaaaacctcgtggagaacttgctcaattggacccgggattcccagaacaagctgatcttcatggaaaggattgagaagtacgccctgtttaagaatccccagaactatctgctgggtaagaaggagacagccgagatggctgacaggaataaggaggtgctactggaagagtgcttctgcgggtcttccgtgacagtcccggaaattgagggggtgctgtggctgaaagatgacggaaagaaatcctggaaaaaaagatatttcctgctgagagcgagtggaatatactacgttcccaaggggaaggccaaagtctccagggatctagtgtgcttcctccaactcgatcacgtcaatgtctactatggccaagactaccggaataaatacaaggcgccaacggattattgtctcgtgctcaagcaccctcaaatccagaagaagagtcagtacatcaaatatctgtgttgcgatgacgtcaggacactgcaccagtgggtaaatggaatccgcatcgccaagtatggcaagcagctttacatgaattaccaggaagccctaaagagaaccgagagcgcatacgactggacctctctgtccagcagtagcatcaagtcaggttcatcatcctctagcattccagagtcgcagagtaaccattctaaccagagcgactccggtgtatccgacacccaaccggcagggcacgttcgcagccaatctatcgtgtcctcagtgttctcagaggcgtggaaaaggggcactcagttggaggaatcatctaaatag

SEQ ID NO: 300579 - DNA, 2686 bp, Artificial Sequence
  derived and/or modified sequence
gcggccgccccgcccccgctcccgccgccgcccgccagtcagtcagtcagtcagtcagtcagtcagtcagtcagtcactgagcgcgcggcgcgggagctgctggcagtcgctgcgtctctggcgagggagcgccgcgcctggggaggaggcggaggcagcggctggaggagcgcgagcggcggtttccttgcccggggccgcgggaaggccgaccgactgccgcgatggagcagctatcagatgaagaaattgatcatggtgctgaagaagacagtgacaaggaagatcaggacctggacaaaatgtttggagcctggcttggagaactagacaaactcactcagagtttggattctgacaagcccatggaaccagtaaaaagatctcctcttcgccaggaaacaaacatggccaacttttcttaccgcttctccatatacaacttgaatgaagctctgaatcagggagagactgtggatctggatgccttgatggctgatctttgctctatagagcaggagctcagcagcattggttcaggaaacagtaagcgtcaaatcacagaaacgaaagctactcagaaattgcctgttagccgacatacattgaaacatggcaccttgaaaggattatcttcttcatctaataggatagctaaaccttcccatgccagctactccttggacgacgtcactgcacagttagaacaggcctctttgagtatggatgaggctgctcagcaatctgtactagaagatactaaacccttagtaactaatcagcacagaagaaccgcgtcagcaggcacagtgagtgatgctgaagtacactctattagtaattcctcccattccagcatcacttccgcagcctccagcatggactctttggatattgataaagtaacacgccctcaagagctggatttgacacatcaagggcagccaattactgagcactcctatctggacagggaaacctcccttcttctgagaaacattgcaggaaaaccttctcatttgctgaccaaggaagaacaggcagcaaaattgaaagctgagaagatcagagttgccctagagaaaattaaagaggcacaagtgaaaaagctggtgatcagagtccacatgtctgatgacagttctaaaacaatgatggtggatgagaggcagacagtaagacaagtactggataacctgatggacaaatcccactgcggttatagtttagactggtcactggtagaaaccgtttctgaattacaaatggagagaatctttgaagaccatgaaaacttggttgaaaatcttcttaattggacaagagatagccaaaacaagcttatatttatggagcgtatagaaaaatatgcacttttcaaaaacccacagaattatcttttggggaaaaaagaaacagctgagatggcagatagaaacaaagaagtcctcttggaggaatgtttttgtggaagttctgtaactgtaccagaaattgaaggagtcctttggttgaaggatgatggcaagaagtcctggaaaaagcgttattttctcttgcgagcatctggtatctactatgttcccaaaggaaaagcaaaggtctctcgggatctggtgtgctttctccagctggatcatgtcaacgtttattatggccaggactatcggaacaaatacaaagcacctacagactattgtctggtgctgaagcatccacaaatccagaagaaatctcaatatatcaaatacctttgttgtgatgatgtgaggacactgcatcagtgggtcaatgggatccgcattgcaaagtatgggaagcagctctatatgaactaccaagaagccttgaagaggacagagtcagcctatgattggacttccttatccagctccagcattaaatcgggatccagttcttccagcatcccagagtctcagtcaaaccactccaatcagtctgatagcggagtttctgacacccagccagcaggacacgtccgttcccagagcattgtgagctccgtattctctgaagcctggaaacgaggcactcagttggaagagtccagcaagtaaaacaaatgtaaagaatgtcccccctttacctgcattgctggacttctgtgcatgttggatgcaattgtctcacaccaacacgagtgtgtgtgtcaagcttattcattcctgtgtgactgtgcacgcctgctcaacattctcatactctcctgtgtcagcttactagcatcaaaaagccatcctcattccaccaggaagccctcctaaacccagttatagcatctgcttgatgtggatgcagtcatggactgaaaggtaaactggagccatcacatctccccttggaagtccagtgctcagaggaccgccacagagggttccatgtagggcaggctgtgtcaaagtcatacagccaaggtcagaagtcatgcatcctgtcaccattcaaacagcttttgcagccggacatttttcctagattgttagatggtctagctattttactgtggggtaaaacaagttttctgtttccttcttgcccgcacaatcagattttagccttcctgacattgtccatctttatgatcaccaccaacttctgcatccttttcatgcatgtcccagactccctgctttttagttttacacaatcaaagcttacctctgt

SEQ ID NO: 300580 - DNA, 1869 bp, Artificial Sequence
  derived and/or modified sequence
atggagcagctatcagatgaagaaattgatcatggtgctgaagaagacagtgacaaggaagatcaggacctggacaaaatgtttggagcctggcttggagaactagacaaactcactcagagtttggattctgacaagcccatggaaccagtaaaaagatctcctcttcgccaggaaacaaacatggccaacttttcttaccgcttctccatatacaacttgaatgaagctctgaatcagggagagactgtggatctggatgccttgatggctgatctttgctctatagagcaggagctcagcagcattggttcaggaaacagtaagcgtcaaatcacagaaacgaaagctactcagaaattgcctgttagccgacatacattgaaacatggcaccttgaaaggattatcttcttcatctaataggatagctaaaccttcccatgccagctactccttggacgacgtcactgcacagttagaacaggcctctttgagtatggatgaggctgctcagcaatctgtactagaagatactaaacccttagtaactaatcagcacagaagaaccgcgtcagcaggcacagtgagtgatgctgaagtacactctattagtaattcctcccattccagcatcacttccgcagcctccagcatggactctttggatattgataaagtaacacgccctcaagagctggatttgacacatcaagggcagccaattactgagcactcctatctggacagggaaacctcccttcttctgagaaacattgcaggaaaaccttctcatttgctgaccaaggaagaacaggcagcaaaattgaaagctgagaagatcagagttgccctagagaaaattaaagaggcacaagtgaaaaagctggtgatcagagtccacatgtctgatgacagttctaaaacaatgatggtggatgagaggcagacagtaagacaagtactggataacctgatggacaaatcccactgcggttatagtttagactggtcactggtagaaaccgtttctgaattacaaatggagagaatctttgaagaccatgaaaacttggttgaaaatcttcttaattggacaagagatagccaaaacaagcttatatttatggagcgtatagaaaaatatgcacttttcaaaaacccacagaattatcttttggggaaaaaagaaacagctgagatggcagatagaaacaaagaagtcctcttggaggaatgtttttgtggaagttctgtaactgtaccagaaattgaaggagtcctttggttgaaggatgatggcaagaagtcctggaaaaagcgttattttctcttgcgagcatctggtatctactatgttcccaaaggaaaagcaaaggtctctcgggatctggtgtgctttctccagctggatcatgtcaacgtttattatggccaggactatcggaacaaatacaaagcacctacagactattgtctggtgctgaagcatccacaaatccagaagaaatctcaatatatcaaatacctttgttgtgatgatgtgaggacactgcatcagtgggtcaatgggatccgcattgcaaagtatgggaagcagctctatatgaactaccaagaagccttgaagaggacagagtcagcctatgattggacttccttatccagctccagcattaaatcgggatccagttcttccagcatcccagagtctcagtcaaaccactccaatcagtctgatagcggagtttctgacacccagccagcaggacacgtccgttcccagagcattgtgagctccgtattctctgaagcctggaaacgaggcactcagttggaagagtccagcaaggtaacagcttcgttttaa

SEQ ID NO: 300581 - DNA, 1854 bp, Artificial Sequence
  derived and/or modified sequence
atggagcagctatcagatgaagaaattgatcatggtgctgaagaagacagtgacaaggaagatcaggacctggacaaaatgtttggagcctggcttggagaactagacaaactcactcagagtttggattctgacaagcccatggaaccagtaaaaagatctcctcttcgccaggaaacaaacatggccaacttttcttaccgcttctccatatacaacttgaatgaagctctgaatcagggagagactgtggatctggatgccttgatggctgatctttgctctatagagcaggagctcagcagcattggttcaggaaacagtaagcgtcaaatcacagaaacgaaagctactcagaaattgcctgttagccgacatacattgaaacatggcaccttgaaaggattatcttcttcatctaataggatagctaaaccttcccatgccagctactccttggacgacgtcactgcacagttagaacaggcctctttgagtatggatgaggctgctcagcaatctgtactagaagatactaaacccttagtaactaatcagcacagaagaaccgcgtcagcaggcacagtgagtgatgctgaagtacactctattagtaattcctcccattccagcatcacttccgcagcctccagcatggactctttggatattgataaagtaacacgccctcaagagctggatttgacacatcaagggcagccaattactgagcactcctatctggacagggaaacctcccttcttctgagaaacattgcaggaaaaccttctcatttgctgaccaaggaagaacaggcagcaaaattgaaagctgagaagatcagagttgccctagagaaaattaaagaggcacaagtgaaaaagctggtgatcagagtccacatgtctgatgacagttctaaaacaatgatggtggatgagaggcagacagtaagacaagtactggataacctgatggacaaatcccactgcggttatagtttagactggtcactggtagaaaccgtttctgaattacaaatggagagaatctttgaagaccatgaaaacttggttgaaaatcttcttaattggacaagagatagccaaaacaagcttatatttatggagcgtatagaaaaatatgcacttttcaaaaacccacagaattatcttttggggaaaaaagaaacagctgagatggcagatagaaacaaagaagtcctcttggaggaatgtttttgtggaagttctgtaactgtaccagaaattgaaggagtcctttggttgaaggatgatggcaagaagtcctggaaaaagcgttattttctcttgcgagcatctggtatctactatgttcccaaaggaaaagcaaaggtctctcgggatctggtgtgctttctccagctggatcatgtcaacgtttattatggccaggactatcggaacaaatacaaagcacctacagactattgtctggtgctgaagcatccacaaatccagaagaaatctcaatatatcaaatacctttgttgtgatgatgtgaggacactgcatcagtgggtcaatgggatccgcattgcaaagtatgggaagcagctctatatgaactaccaagaagccttgaagaggacagagtcagcctatgattggacttccttatccagctccagcattaaatcgggatccagttcttccagcatcccagagtctcagtcaaaccactccaatcagtctgatagcggagtttctgacacccagccagcaggacacgtccgttcccagagcattgtgagctccgtattctctgaagcctggaaacgaggcactcagttggaagagtccagcaagtaa

SEQ ID NO: 300582 - DNA, 1935 bp, Artificial Sequence
  derived and/or modified sequence
atggagcagctgagcgacgaggagatcgaccacggcgccgaggaggacagcgacaaggaggaccaggacctggacaagatgttcggcgcctggctgggcgagctggacaagctgacccagagcctggacagcgacaagcccatggagcccgtgaagagaagccccctgagacaggagaccaacatggccaacttcagctacagattcagcatctacaacctgaacgaggccctgaaccagggcgagaccgtggacctggacgccctgatggccgacctgtgcagcatcgagcaggagctgagcagcatcggcagcggcaacagcaagagacagatcaccgagaccaaggccacccagaagctgcccgtgagcagacacaccctgaagcacggcaccctgaagggcctgagcagcagcagcaacagaatcgccaagcccagccacgccagctacagcctggacgacgtgaccgcccagctggagcaggccagcctgagcatggacgaggccgcccagcagagcgtgctggaggacaccaagcccctggtgaccaaccagcacagaagaaccgccagcgccggcaccgtgagcgacgccgaggtgcacagcatcagcaacagcagccacagcagcatcaccagcgccgccagcagcatggacagcctggacatcgacaaggtgaccagaccccaggagctggacctgacccaccagggccagcccatcaccgagcacgccatcagcctgagatgcagcagcaagcaggccaagagacacatcgacttcaccgaggagcaggccgagctgaccccccacagctacctggacagagagaccagcctgctgctgagaaacatcgccggcaagcccagccacctgctgaccaaggaggagcaggccgccaagctgaaggccgagaagatcagagtggccctggagaagatcaaggaggcccaggtgaagaagctggtgatcagagtgcacatgagcgacgacagcagcaagaccatgatggtggacgagagacagaccgtgagacaggtgctggacaacctgatggacaagagccactgcggctacagcctggactggagcctggtggagaccgtgagcgagctgcagatggagagaatcttcgaggaccacgagaacctggtggagaacctgctgaactggaccagagacagccagaacaagctgatcttcatggagagaatcgagaagtacgccctgttcaagaacccccagaactacctgctgggcaagaaggagaccgccgagatggccgacagaaacaaggaggtgctgctggaggagtgcttctgcggcagcagcgtgaccgtgcccgagatcgagggcgtgctgtggctgaaggacgacggcaagaagagctggaagaagagatacttcctgctgagagccagcggcatctactacgtgcccaagggcaaggccaaggtgagcagagacctggtgtgcttcctgcagctggaccacgtgaacgtgtactacggccaggactacagaaacaagtacaaggcccccaccgactactgcctggtgctgaagcacccccagatccagaagaagagccagtacatcaagtacctgtgctgcgacgacgtgagaaccctgcaccagtgggtgaacggcatcagaatcgccaagtacggcaagcagctgtacatgaactaccaggaggccctgaagagaaccgagagcgcctacgactggaccagcctgagcagcagcagcatcaagagcggcagcagcagcagcagcatccccgagagccagagcaaccacagcaaccagagcgacagcggcgtgagcgacacccagcccgccggccacgtgagaagccagagcatcgtgagcagcgtgttcagcgaggcctggaagagaggcacccagctggaggagagcagcaagtag

SEQ ID NO: 300583 - DNA, 1950 bp, Artificial Sequence
  derived and/or modified sequence
atggagcagctgagcgacgaggagatcgaccacggcgccgaggaggacagcgacaaggaggaccaggacctggacaagatgttcggcgcctggctgggcgagctggacaagctgacccagagcctggacagcgacaagcccatggagcccgtgaagagaagccccctgagacaggagaccaacatggccaacttcagctacagattcagcatctacaacctgaacgaggccctgaaccagggcgagaccgtggacctggacgccctgatggccgacctgtgcagcatcgagcaggagctgagcagcatcggcagcggcaacagcaagagacagatcaccgagaccaaggccacccagaagctgcccgtgagcagacacaccctgaagcacggcaccctgaagggcctgagcagcagcagcaacagaatcgccaagcccagccacgccagctacagcctggacgacgtgaccgcccagctggagcaggccagcctgagcatggacgaggccgcccagcagagcgtgctggaggacaccaagcccctggtgaccaaccagcacagaagaaccgccagcgccggcaccgtgagcgacgccgaggtgcacagcatcagcaacagcagccacagcagcatcaccagcgccgccagcagcatggacagcctggacatcgacaaggtgaccagaccccaggagctggacctgacccaccagggccagcccatcaccgagcacgccatcagcctgagatgcagcagcaagcaggccaagagacacatcgacttcaccgaggagcaggccgagctgaccccccacagctacctggacagagagaccagcctgctgctgagaaacatcgccggcaagcccagccacctgctgaccaaggaggagcaggccgccaagctgaaggccgagaagatcagagtggccctggagaagatcaaggaggcccaggtgaagaagctggtgatcagagtgcacatgagcgacgacagcagcaagaccatgatggtggacgagagacagaccgtgagacaggtgctggacaacctgatggacaagagccactgcggctacagcctggactggagcctggtggagaccgtgagcgagctgcagatggagagaatcttcgaggaccacgagaacctggtggagaacctgctgaactggaccagagacagccagaacaagctgatcttcatggagagaatcgagaagtacgccctgttcaagaacccccagaactacctgctgggcaagaaggagaccgccgagatggccgacagaaacaaggaggtgctgctggaggagtgcttctgcggcagcagcgtgaccgtgcccgagatcgagggcgtgctgtggctgaaggacgacggcaagaagagctggaagaagagatacttcctgctgagagccagcggcatctactacgtgcccaagggcaaggccaaggtgagcagagacctggtgtgcttcctgcagctggaccacgtgaacgtgtactacggccaggactacagaaacaagtacaaggcccccaccgactactgcctggtgctgaagcacccccagatccagaagaagagccagtacatcaagtacctgtgctgcgacgacgtgagaaccctgcaccagtgggtgaacggcatcagaatcgccaagtacggcaagcagctgtacatgaactaccaggaggccctgaagagaaccgagagcgcctacgactggaccagcctgagcagcagcagcatcaagagcggcagcagcagcagcagcatccccgagagccagagcaaccacagcaaccagagcgacagcggcgtgagcgacacccagcccgccggccacgtgagaagccagagcatcgtgagcagcgtgttcagcgaggcctggaagagaggcacccagctggaggagagcagcaaggtgaccgccagcttctag

SEQ ID NO: 300584 - DNA, 1935 bp, Artificial Sequence
  derived and/or modified sequence
atggagcagctctcggacgaagaaattgatcacggtgctgaggaggacagtgacaaggaagaccaagacctggataaaatgtttggcgcatggttaggggagttagacaaactcactcagtcgctggactcagacaaaccaatggagcccgtaaagaggagccccctgcgccaggaaacgaatatggccaacttctcgtatcgattttcaatatataatctgaacgaggcattgaaccagggcgaaaccgtcgacctggacgccctcatggcagacctgtgttctatcgagcaggagctctcctctattggatcaggaaacagcaaaagacagattacagagaccaaagccactcagaagctgcccgtgagcagacataccctgaagcacggcaccctcaaaggtctcagttccagtagcaatagaattgcaaaacccagccacgcgtcctatagtctagatgacgtgaccgctcagttggagcaagctagcttgtcgatggatgaagcggcacagcagtcagtgctcgaggatactaaaccattggtgaccaatcagcaccgtcggaccgcctcagctggcacagtgtctgatgccgaggtgcatagcatcagtaatagctcccacagttccatcacatccgcagcctcttccatggacagccttgacattgacaaggtcacccgccctcaggagcttgacttgacccaccagggccagccgattacagaacatgctatctcactgcggtgcagcagtaaacaggcgaaaagacatatcgacttcactgaggaacaggcggagctgacccctcactcttatctggaccgggaaacttctctgttgttaagaaatatagctggcaaaccttcacacctactcacgaaggaagaacaggctgccaaactgaaagcagagaaaattcgtgtagccctggagaagattaaggaagcgcaggtgaaaaaactggtgattcgtgttcacatgagcgacgacagcagtaagacaatgatggttgacgagcgacagaccgtaagacaggtgctggataacctgatggataaaagccactgcggatacagcctcgactggagcttagtggagaccgtgagcgagttacaaatggagaggattttcgaagaccatgaaaatctggtcgagaacctgttaaactggactagagatagtcagaacaagctgattttcatggaaaggatcgagaagtatgccctgttcaagaacccccagaactatctgttgggaaaaaaagaaaccgcggagatggcagaccgcaataaggaggtactgctggaggagtgcttttgtggatccagcgttaccgtgccagaaattgaaggtgtgctgtggctgaaggacgacgggaaaaagagctggaagaagcggtattttctactgcgcgcatctgggatctactatgtccctaagggtaaggcgaaagtctcccgagacttagtctgctttctgcagctcgaccatgttaatgtgtactatgggcaagactacagaaacaagtataaagcgcccaccgactactgcctcgtattaaagcatccgcaaattcagaagaagtcccagtacatcaagtacctgtgctgtgacgacgttagaactcttcatcagtgggttaacggaatcagaatagccaaatacggcaagcagctctacatgaactatcaggaagccctgaagcgcactgagagtgcctatgactggacatcattgtcttcctcatctataaagtccggctccagctcatcatctatcccagaatctcagtcaaaccactccaatcagagtgattctggggtaagcgatacccaaccggctgggcacgtacggtcacaatccattgtgtctagcgtgttttctgaggcttggaaacgaggaacacagttagaggaaagctccaaatag

SEQ ID NO: 300585 - DNA, 1950 bp, Artificial Sequence
  derived and/or modified sequence
atggagcagttgagcgacgaggaaatcgatcatggggctgaggaagactccgacaaagaagatcaggatctggacaaaatgttcggcgcatggctgggagagctggataaactgacacagtccctggattcagacaaacctatggaacctgtgaagcggtcaccactccggcaggagacaaatatggcaaatttctcttaccgcttcagcatttacaacctcaatgaggccctgaaccagggcgagacggtggatctagatgcattgatggccgacctgtgctccattgagcaagagctgtccagcataggatccggaaactccaaaaggcagataacagaaacgaaagctacccagaaacttccagtttcccggcatactctcaagcacggaacactgaagggcctttctagctctagcaataggatcgcaaagcccagtcacgcaagctattccctcgatgatgtaacagctcagttggagcaggcatcattgtccatggacgaggccgctcagcagagcgttctggaagacaccaagcctctggtcacaaatcagcataggaggacagccagtgccggaacggtttcggacgccgaggttcattccatcagcaattcaagtcattccagtattacgtccgctgctagctctatggatagtctcgatatagataaagtgacacgacctcaagagctggacctaacacaccagggacagccaattactgagcatgccatctctctccgctgcagcagcaagcaagcaaaacgccatatcgactttacggaggagcaggcagagctgacaccccacagttacctagaccgagaaacatcacttttgttgcggaatatcgcgggaaagccatcgcatcttttgacaaaggaagagcaagccgccaaactcaaagccgagaagatcagagtggccctcgagaaaattaaagaagctcaggtgaaaaaattggtgatccgagtgcatatgtctgacgacagctctaagaccatgatggtggacgaaagacaaacggtgcgtcaggtgctggacaaccttatggacaaatcccactgcgggtacagtctggactggtccctagtcgaaaccgtgtccgaactacagatggagcggattttcgaggatcacgaaaaccttgttgaaaatctgctgaactggacacgcgactcgcagaataagcttattttcatggaacgaatagaaaagtacgcacttttcaaaaaccctcagaactacctactgggcaaaaaggaaactgccgagatggcggatagaaataaggaggttctcctggaggagtgcttctgtgggagcagcgtgacagtccccgagattgaaggggtcctctggctgaaagacgatggtaaaaaatcatggaaaaaaaggtacttcttgctgcgtgcatcagggatctactatgtgcctaaggggaaagcaaaggtatctcgcgacctggtctgcttcctgcagctggaccacgtgaacgtgtactatggccaggactaccgcaacaaatacaaagcccctaccgactattgtttggtcctgaaacacccacagatccagaaaaagagtcagtacattaaatatctctgttgcgacgatgtgagaaccttgcatcagtgggttaatggcatacgcatcgctaagtatggcaagcagctgtacatgaactatcaagaagcactaaaacgcacagagagtgcttatgattggacttcgctaagctcctcttccatcaaatccggaagttcctcaagctccatccctgagtctcaatcaaatcattccaaccagagcgatagtggcgtgagcgatacacaaccggccggccacgtgcggagccagagtattgtctcaagcgtgttttcggaagcctggaagagaggtacacagctggaagagtcctctaaagtcaccgcgtcgttttag

SEQ ID NO: 300586 - DNA, 1935 bp, Artificial Sequence
  derived and/or modified sequence
atggagcagctgagtgatgaggagattgaccatggagcagaagaagattctgacaaggaggaccaggacctggacaagatgtttggagcctggctgggggagctggacaagctgacccagagcctggacagcgacaagcccatggagcctgtgaagaggagccccctgcggcaggagaccaacatggccaacttctcctaccgcttcagcatctacaacctgaatgaggccctgaaccagggcgagaccgtggacctggatgccctgatggctgacctgtgcagcattgagcaggagctgagcagcatcggcagcggcaacagcaagaggcagatcacagagaccaaggccacccagaagctgcctgtgagccgccacaccctgaagcacggcaccctgaagggcctgagcagcagcagcaacagaattgccaagcccagccacgccagctacagcctggatgatgtgacagcccagctggagcaggccagcctgtccatggatgaggccgcccagcagagcgtgctggaggacaccaagcccctggtgaccaaccagcacagaagaacagccagcgctggcaccgtgtctgatgctgaggtgcacagcatcagcaacagcagccacagcagcatcaccagcgctgccagctccatggacagcctggacatcgacaaggtgacccggccccaggagctggacctgacccaccagggccagcccatcacagaacatgccatcagcctgcgctgcagcagcaagcaggccaagaggcacatcgacttcacagaggagcaggccgagctgaccccccacagctacctggaccgggagaccagcctgctgctgaggaacattgctgggaagcccagccacctgctgaccaaggaggagcaggccgccaagctgaaggccgagaagatccgggtggccctggagaagatcaaggaggcccaggtgaagaagctggtgatccgggtgcacatgtctgatgacagcagcaagaccatgatggtggatgagcggcagacagtgcggcaggtgctggacaacctgatggacaagagccactgcggctacagcctggactggagcctggtggagaccgtgtctgagctgcagatggagcgcatctttgaggaccacgagaacctggtggagaacctgctgaactggacccgggacagccagaacaagctgatcttcatggagcgcatcgagaagtatgccctcttcaagaacccccagaactacctgctgggcaagaaggagacagctgagatggctgacaggaacaaggaggtgctgctggaggagtgcttctgtggcagctctgtgacagtgcctgagattgaaggagtgctgtggctgaaggatgatggcaagaagtcctggaagaagcgctacttcctgctgcgggccagcggcatctactacgtgcccaagggcaaggccaaggtgtcccgggacctggtgtgcttcctgcagctggaccacgtgaatgtgtactacggccaggactacagaaacaagtacaaggcccccacagactactgcctggtgctgaagcacccccagatccagaagaagagccagtacatcaagtacctgtgctgtgatgatgtgaggaccctgcaccagtgggtgaatggcatccgcatcgccaagtatggcaagcagctgtacatgaactaccaggaggccctgaagaggacagagagcgcctatgactggaccagcctgagcagcagcagcatcaagagcggcagcagcagcagcagcatccctgagagccagagcaaccacagcaaccagagcgacagcggcgtgtctgacacccagcctgctggccacgtgcgcagccagagcatcgtgtcctctgtgttcagcgaggcctggaagaggggcacccagctggaggagagcagcaagtag

SEQ ID NO: 300587 - DNA, 1950 bp, Artificial Sequence
  derived and/or modified sequence
atggagcagctgagtgatgaggagattgaccatggagcagaagaagattctgacaaggaggaccaggacctggacaagatgtttggagcctggctgggggagctggacaagctgacccagagcctggacagcgacaagcccatggagcctgtgaagaggagccccctgcggcaggagaccaacatggccaacttctcctaccgcttcagcatctacaacctgaatgaggccctgaaccagggcgagaccgtggacctggatgccctgatggctgacctgtgcagcattgagcaggagctgagcagcatcggcagcggcaacagcaagaggcagatcacagagaccaaggccacccagaagctgcctgtgagccgccacaccctgaagcacggcaccctgaagggcctgagcagcagcagcaacagaattgccaagcccagccacgccagctacagcctggatgatgtgacagcccagctggagcaggccagcctgtccatggatgaggccgcccagcagagcgtgctggaggacaccaagcccctggtgaccaaccagcacagaagaacagccagcgctggcaccgtgtctgatgctgaggtgcacagcatcagcaacagcagccacagcagcatcaccagcgctgccagctccatggacagcctggacatcgacaaggtgacccggccccaggagctggacctgacccaccagggccagcccatcacagaacatgccatcagcctgcgctgcagcagcaagcaggccaagaggcacatcgacttcacagaggagcaggccgagctgaccccccacagctacctggaccgggagaccagcctgctgctgaggaacattgctgggaagcccagccacctgctgaccaaggaggagcaggccgccaagctgaaggccgagaagatccgggtggccctggagaagatcaaggaggcccaggtgaagaagctggtgatccgggtgcacatgtctgatgacagcagcaagaccatgatggtggatgagcggcagacagtgcggcaggtgctggacaacctgatggacaagagccactgcggctacagcctggactggagcctggtggagaccgtgtctgagctgcagatggagcgcatctttgaggaccacgagaacctggtggagaacctgctgaactggacccgggacagccagaacaagctgatcttcatggagcgcatcgagaagtatgccctcttcaagaacccccagaactacctgctgggcaagaaggagacagctgagatggctgacaggaacaaggaggtgctgctggaggagtgcttctgtggcagctctgtgacagtgcctgagattgaaggagtgctgtggctgaaggatgatggcaagaagtcctggaagaagcgctacttcctgctgcgggccagcggcatctactacgtgcccaagggcaaggccaaggtgtcccgggacctggtgtgcttcctgcagctggaccacgtgaatgtgtactacggccaggactacagaaacaagtacaaggcccccacagactactgcctggtgctgaagcacccccagatccagaagaagagccagtacatcaagtacctgtgctgtgatgatgtgaggaccctgcaccagtgggtgaatggcatccgcatcgccaagtatggcaagcagctgtacatgaactaccaggaggccctgaagaggacagagagcgcctatgactggaccagcctgagcagcagcagcatcaagagcggcagcagcagcagcagcatccctgagagccagagcaaccacagcaaccagagcgacagcggcgtgtctgacacccagcctgctggccacgtgcgcagccagagcatcgtgtcctctgtgttcagcgaggcctggaagaggggcacccagctggaggagagcagcaaggtgacagccagcttctag

SEQ ID NO: 300588 - DNA, 1935 bp, Artificial Sequence
  derived and/or modified sequence
atggagcagctgagcgacgaggagatcgaccacggcgccgaggaggattctgacaaggaagaccaagacttagacaaaatgtttggcgcctggctaggcgagctggacaagcttactcagtctctggacagcgacaaaccaatggaacccgttaaaaggtcacccctgaggcaagagactaatatggctaatttcagctacaggttctcaatttacaacctcaacgaagctctcaaccagggtgaaaccgtggatctggatgcactgatggcagatctgtgttccatagagcaggagttgtcttccataggcagtggtaattccaagaggcagatcaccgaaacaaaggctactcagaagttgcccgtttcgaggcacaccctgaagcacgggaccttgaaggggctatcctcatcctccaaccggattgcgaaacctagtcatgcctcatatagcttggacgatgtgaccgctcagctcgaacaggccagtttgagtatggacgaagccgcacagcagtccgtcctcgaagacacaaagcccctggtgactaaccaacacagaaggacggccagcgcaggcaccgtgtctgacgccgaagtgcactccatctccaatagttctcatagctctattacctcagccgcctcaagcatggatagcctcgacattgacaaagtgactagaccgcaagagctcgatttgacccatcagggtcagccaataaccgaacatgcaatttccctccgctgctcgagcaagcaagcaaaaaggcacatagatttcacagaggaacaagcagagctcacaccacatagctaccttgatagggaaacttccctgttgttgcggaatatcgcaggtaaaccttcgcacttgctgacgaaagaggagcaagccgcaaagttgaaagcagagaaaatccgggtcgcactcgagaaaatcaaagaggctcaggtcaagaagctggtcatccgggtccatatgagtgatgattcctctaagactatgatggttgacgaaagacagaccgtgcgtcaagttctagacaacctgatggataaatcacactgcggctattctttggactggtctctggtggagacagtaagtgagttacaaatggaacggattttcgaggaccatgaaaacttggtcgagaatctcctgaattggacgcgagacagtcagaataagctgatcttcatggagcgcatcgagaagtatgctctgtttaagaacccccaaaactacttactggggaagaaggagaccgccgaaatggccgatcggaataaggaggttttgcttgaagaatgtttctgcgggtcctctgtcacggtcccagaaatagagggagtcttgtggctgaaggacgacgggaaaaagtcttggaagaaacggtattttctcctccgagcttcgggcatctattatgtcccaaaaggcaaagccaaagtctcacgggacttagtatgtttcctccagctggaccacgtgaatgtctattatggtcaggactatcgcaataagtacaaagcacctacggattactgtctggtgctcaagcatccacagatacagaagaagtctcagtacattaagtatctgtgctgtgacgatgtgcgtacactgcatcagtgggtaaatggcatcaggatcgccaaatacggcaaacaactgtacatgaattatcaggaggccttaaaacgaaccgagtcggcgtatgactggacatcgctttcgtcttcatccatcaagtcggggtcttccagctcttccatcccagagtcgcagagcaaccatagtaatcagtcagacagcggcgtgtccgatacccagccagcgggtcatgtaaggagccagagtatcgtgagcagcgtcttctccgaggcctggaagaggggtactcaactggaagaatctagtaagtag

SEQ ID NO: 300589 - DNA, 1950 bp, Artificial Sequence
  derived and/or modified sequence
atggagcagctgagcgacgaggagatcgaccacggcgccgaggaggacagcgataaagaagatcaggatctggataaaatgttcggcgcttggctcggcgaacttgataagctgacacaatcccttgactctgataagccaatggagcctgtgaaacggagtcccttacgccaagaaactaatatggctaattttagttaccggttctctatttataaccttaacgaggcgctcaaccagggcgaaacagtggacctggacgcgctcatggccgatctgtgttccattgagcaggagctctcttctatcggcagtggtaacagcaagcggcagatcactgaaactaaggccacacagaagctaccagtgtcacgtcacactttaaaacatggaacactcaaggggcttagcagctcttctaacagaatcgccaaacccagtcacgcaagttacagtttagacgacgtcaccgcacaacttgagcaggcttctctctctatggatgaagctgcccagcagtccgtgctggaggatacaaaacctctggtcaccaaccagcatagacgcaccgctagcgctggcaccgtcagcgacgccgaggttcatagcatctccaacagcagtcacagcagcatcacctctgccgctagctctatggactcattggacatcgataaagtgacaagaccacaagaattagatctaacccatcagggacagccaattacagaacacgccattagcctccggtgttcatccaagcaggccaagcggcatatcgatttcaccgaggagcaggctgaattgacacctcacagctacctggacagggaaacttccctactcctgcggaacattgccggtaagccctcccacctgctgaccaaagaggaacaagctgccaagctaaaggctgaaaagatcagggtggcactggaaaagatcaaggaagctcaagtgaagaaacttgtgatacgggtccatatgagcgacgactcctctaaaaccatgatggtcgacgagcgccagaccgtccggcaggtactggacaacctgatggataaatctcactgcggttacagcctagactggtccctggttgagaccgtgtcagaactgcagatggaacggatctttgaagaccacgaaaacctggttgaaaatctattgaactggacgcgcgattcacagaataaattgatattcatggagagaattgagaaatacgcattgttcaagaacccacagaactaccttttaggtaagaaagaaaccgcggaaatggcggacagaaacaaagaggtgttacttgaggaatgcttttgcggtagcagcgtcactgtgcctgaaattgagggcgttttgtggttaaaagatgacgggaagaaaagttggaagaagaggtatttcctgctgagagcatcagggatttattacgtgccaaaaggcaaggctaaagtgtccagagacctggtctgtttcctacagttagaccatgtaaacgtgtattatggacaagactaccgcaataagtacaaggcacctaccgactactgcctggttctgaagcatcctcaaatacagaaaaaatcccagtacattaagtacctctgttgtgatgacgtgcgaacacttcatcagtgggttaacggcattaggatcgctaagtacgggaagcaactttatatgaattatcaggaggccctgaagcggacagaatcagcatatgactggacatctctgtcaagttctagtatcaagagtggttcttcgtcgtcaagcatacctgagtcccaatcgaatcattctaaccaatctgatagtggagtctcagatacccaacctgcaggccacgtgcgtagtcaatcaatagtctctagcgttttttcagaggcctggaagagaggcacccagcttgaggagtcatccaaggtcacagccagtttttag

SEQ ID NO: 300590 - DNA, 1935 bp, Artificial Sequence
  derived and/or modified sequence
atggagcagcttagcgatgaagagatcgatcacggcgcagaagaggactctgataaagaggatcaggatctcgataaaatgtttggagcatggcttggggagctggacaaactcacccagtctctcgacagtgacaagcccatggaaccggtcaagagatctccgctaaggcaagagacgaacatggcaaacttctcctaccgattcagcatatacaatctgaatgaggctctcaatcagggcgagaccgtcgatctggacgcactcatggcagatttatgctcgatcgaacaggagttgagttctataggttcaggaaactcaaaaagacagattaccgagaccaaggccacacaaaagctccctgtgagtcgccacactctgaagcacggcaccctcaagggcctgagctcttcatctaatcgaattgccaaacctagtcacgcaagctacagtctggacgatgtgacagctcagctagagcaagcgtctttatccatggacgaggccgctcagcaatctgttctggaggataccaagcccctggtgaccaaccagcaccgtcggacagctagcgctggcaccgtgtccgacgccgaggtgcatagcatcagcaatagttctcactcgagtatcaccagtgcggcttcaagcatggactcactggacatagacaaagttaccaggccgcaagaactggacctgacgcaccaggggcagccgatcactgagcatgcaattagtctgcgttgcagtagtaaacaagctaagcggcacatcgatttcaccgaggaacaggctgagcttaccccccactcgtaccttgatagggagaccagcctactactccgcaacatcgccggaaaaccaagccacctcctgacgaaagaggaacaagcagccaaactaaaagccgaaaagatccgcgtggctttggagaaaatcaaggaggcccaagtgaagaaactagtcatcagggtccatatgtcagatgattcatcgaaaaccatgatggtggatgagagacaaaccgtccggcaggtgctcgacaatcttatggacaaatcacactgcggctattcacttgactggtccctcgtggagaccgtatcagaactccagatggagcgcattttcgaggaccatgagaatctggtcgagaacctgctgaattggacccgggattcacagaataagctcatctttatggagaggattgagaaatacgcgctgtttaagaatccacagaactacctgctgggcaagaaagagacggcagagatggctgatcggaataaggaggttttgctggaggagtgtttctgcgggtccagcgtgacggtccctgagatcgagggggtgctgtggctcaaggacgacggcaaaaagtcctggaagaaaaggtacttcctgctgcgcgcaagcgggatttattatgtccccaaaggcaaagcaaaggtctcccgcgacctggtgtgctttcttcaattagatcacgtaaatgtgtactatggccaggactatcggaacaagtataaagccccaacagactattgcctcgtgctgaaacatccacagatccagaagaagtcacagtacattaagtatctgtgttgtgatgacgtgcgaacccttcaccaatgggtgaatggtatcaggatcgctaagtacggaaagcaattgtacatgaattaccaggaggcactgaagaggactgaatcagcttacgactggacctcgttgagtagttccagcattaagtccggaagctcttcaagctctatccctgagtctcagtcaaatcattcaaatcagtcagattccggcgtcagtgatacgcaaccagccggacacgtgagatcacagtccattgtctcatccgtgttcagtgaagcttggaaacgcggtacccagctcgaggagtctagtaagtag

SEQ ID NO: 300591 - DNA, 1950 bp, Artificial Sequence
  derived and/or modified sequence
atggagcagttgagtgatgaggaaattgaccacggagcagaagaggactcagacaaggaggaccaggacctggataagatgttcggcgcatggctaggcgaattggataaactgactcagtcactggatagcgataaacctatggaacccgttaaacgttccccactgcgtcaggagaccaacatggccaactttagttaccgcttctccatctataacttgaatgaggctctgaaccagggggagacggtggaccttgacgccctgatggccgatctgtgtagtattgaacaggaacttagctctatcggaagtgggaatagcaagagacagatcaccgagaccaaagccacacaaaaactgcctgtcagtaggcatactctgaaacacgggacactcaaagggctctcttcttcatccaatagaattgccaagccgagccacgcttcttattcgctggacgatgtaaccgctcagctcgaacaggcatcactctccatggacgaagcagcccagcagtcggtgctggaggataccaagccccttgtgaccaaccagcaccgtaggaccgcgagtgcgggaacagtgtccgacgcagaagtgcactccatttcaaattctagccacagctctattaccagcgcagcctccagcatggactcactggacatagataaagtgacgcggccacaggagttggacctaacacatcagggtcagcccattaccgaacacgctatttctctcaggtgctccagcaagcaggccaagcggcatatcgactttaccgaggagcaggccgaactgactccgcatagctacctggaccgggagactagtctcctgctccggaacatcgccggaaagccaagccatctcctgacaaaggaggaacaggctgctaagcttaaagcagagaagatacgcgtcgcgttagagaagatcaaggaggcccaggtgaagaagttggtgatccgagtccacatgtctgacgattcgagcaaaaccatgatggtcgacgaaaggcagacagtgagacaggttttagacaacctcatggacaagtcccactgcggatactctctggactggagtttggttgagaccgtgagcgaattgcaaatggaaaggatatttgaggaccacgaaaacctggtggagaatctgcttaactggacaagagacagccagaataagcttattttcatggagcggattgagaaatatgcgctctttaaaaatccacaaaactatttactcggcaagaaagagactgcagagatggctgatcgaaataaagaagtgttacttgaggagtgcttttgcggcagttctgtgacagttcctgaaatagaaggagtgttgtggctaaaggatgacggaaagaaaagctggaaaaagcgctactttctactgcgagctagtggcatctattatgtgcccaagggaaaagctaaagtgagtagagatttggtttgcttcttacagttggaccacgtgaacgtttactatggccaagactataggaataagtataaagcacctaccgattattgtcttgtgttaaaacatccacagatccagaagaaatcccaatatataaagtatctgtgctgcgacgatgtgagaacactgcaccagtgggtgaacgggattcggatcgccaagtacggcaaacagctgtatatgaactaccaggaagccctgaaacggacggagtccgcctacgactggacttccctcagctcctcatccatcaagtcaggctccagtagcagctccatcccggagagtcagagcaaccactccaaccagagcgattcaggcgtgtccgatacacagcctgccggtcatgtgcggtctcaaagcattgtgtccagtgttttctctgaagcttggaaacggggaactcagttggaggaaagctcaaaggtcacagcttcattctag

SEQ ID NO: 300592 - DNA, 2394 bp, Artificial Sequence
  derived and/or modified sequence
gcggccgccccgcccccgctcccgccgccgcccgccagtcagtcagtcagtcagtcagtcagtcagtcagtcagtcactgagcgcgcggcgcgggagctgctggcagtcgctgcgtctctggcgagggagcgccgcgcctggggaggaggcggaggcagcggctggaggagcgcgagcggcggtttccttgcccggggccgcgggaaggccgaccgactgccgcgatggagcagctatcagatgaagaaattgatcatggtgctgaagaagacagtgacaaggaagatcaggacctggacaaaatgtttggagcctggcttggagaactagacaaactcactcagagtttggattctgacaagcccatggaaccagtaaaaagatctcctcttcgccaggaaacaaacatggccaacttttcttaccgcttctccatatacaacttgaatgaagctctgaatcagggagagactgtggatctggatgccttgatggctgatctttgctctatagagcaggagctcagcagcattggttcaggaaacagtaagcgtcaaatcacagaaacgaaagctactcagaaattgcctgttagccgacatacattgaaacatggcaccttgaaaggattatcttcttcatctaataggatagctaaaccttcccatgccagctactccttggacgacgtcactgcacagttagaacaggcctctttgagtatggatgaggctgctcagcaatctgtactagaagatactaaacccttagtaactaatcagcacagaagaaccgcgtcagcaggcacagtgagtgatgctgaagtacactctattagtaattcctcccattccagcatcacttccgcagcctccagcatggactctttggatattgataaagtaacacgccctcaagagctggatttgacacatcaagggcagccaattactgagcatgctatttctctgagatgttccagcaagcaggccaagcgtcatattgacttcacagaagaacaggctgagctgacacctcactcctatctggacagggaaacctcccttcttctgagaaacattgcaggaaaaccttctcatttgctgaccaaggaagaacaggcagcaaaattgaaagctgagaagatcagagttgccctagagaaaattaaagaggcacaagtgaaaaagctggtgatcagagtccacatgtctgatgacagttctaaaacaatgatggtggatgagaggcagacagtaagacaagtactggataacctgatggacaaatcccactgcggttatagtttagactggtcactggtagaaaccgtttctgaattacaaatggagagaatctttgaagaccatgaaaacttggttgaaaatcttcttaattggacaagagatagccaaaacaagcttatatttatggagcgtatagaaaaatatgcacttttcaaaaacccacagaattatcttttggggaaaaaagaaacagctgagatggcagatagaaacaaagaagtcctcttggaggaatgtttttgtggaagttctgtaactgtaccagaaattgaaggagtcctttggttgaaggatgatggcaagaagtcctggaaaaagcgttattttctcttgcgagcatctggtatctactatgttcccaaaggaaaagcaaaggtctctcgggatctggtgtgctttctccagctggatcatgtcaacgtttattatggccaggactatcggaacaaatacaaagcacctacagactattgtctggtgctgaagcatccacaaatccagaagaaatctcaatatatcaaatacctttgttgtgatgatgtgaggacactgcatcagtgggtcaatgggatccgcattgcaaagtatgggaagcagctctatatgaactaccaagaagccttgaagaggacagagtcagcctatgattggacttccttatccagctccagcattaaatcgggatccagttcttccagcatcccagagtctcagtcaaaccactccaatcagtctgatagcggagtttctgacacccagccagcaggacacgtccgttcccagagcattgtgagctccgtattctctgaagcctggaaacgaggcactcagttggaagagtccagcaaggtaacagcttcgttttaatttacattgaaaattctgtggtattcttttgggtttaaattgttgctctcttatgtctttatcggggatcttatttggccttatttcagtctcctttattaattttcaatcttcctaattgtagtgggtaaagacagttcagagagacctgttgatttgacttccccttggaaatgagtattttacaaattggctctaatgacttaaaatctcaaaaaa

SEQ ID NO: 300593 - DNA, 1203 bp, Artificial Sequence
  derived and/or modified sequence
atgggcgtgagcgagctgatcgtgagcaccgccgtgctgggcgtgctgttcagcctgctgggcgcccagcccctgctggtggtgggcttcagcggccccctgctggtgttcgaggaggccttcttcaagttctgcagagcccaggacctggagtacctgaccggcagagtgtgggtgggcctgtggctggtggtgttcgtgctggccctggtggccgccgagggcagcttcctggtgagatacatcagccccttcacccaggagatcttcgccttcctgatcagcctgatcttcatctacgagaccttctacaagctgtacaaggtgttcaccgagcaccccctgctgcccttctacccccccgagcccggcggcgtgcccggctgctggagcggcgccaagtggcagctgccccccaccgagggcccccccagccccagaaaccagcccaacaccgccctgctgagcctgatcctgatgctgggcaccttcttcatcgccttcttcctgagaaagttcagaaacagcagattcctgggcggcaaggccagaagaatcatcggcgacttcggcatccccatcagcatcctggtgatggtgctggtggactacagcatcaccgacacctacacccagaagctgaccgtgcccaccggcctgagcgtgaccagccccgacaagagaagctggttcatcccccccctgggcagcgccagacccttccccccctggatgatggtggccgccgccgtgcccgccctgctggtgctgatcctgatcttcatggagacccagatcaccgccctgatcgtgagccagaaggccagaagactgctgaagggcagcggcttccacctggacctgctgctgatcggcagcctgggcggcctgtgcggcctgttcggcctgccctggctgaccgccgccaccgtgagaagcgtgacccacgtgaacgccctgaccgtgatgagaaccgccatcgcccccggcgacaagccccagatccaggaggtgagagagcagagagtgaccggcgtgctgatcgccagcctggtgggcctgagcatcgtgatgggcgccgtgctgagaagaatccccctggccgtgctgttcggcatcttcctgtacatgggcgtgaccagcctgagcggcatccagctgagccagagactgctgctgatcctgatgcccgccaagcactag

SEQ ID NO: 300594 - DNA, 1203 bp, Artificial Sequence
  derived and/or modified sequence
atgggggtctctgagttaatcgtgtccacagccgtcctgggagtattattctctctgttaggcgcccaacctttactagtggttgggttttctggcccactcctggtctttgaggaggcattttttaagttttgtagagcccaggacctggagtacctgacaggacgagtctgggtaggcctctggttagtagtgttcgtcctggccttggtcgcagcggaagggtccttcctggtgaggtatattagccccttcacacaagagatttttgctttcttaatatccctgatcttcatatacgagacattttacaaactttataaagtgttcaccgagcatcctctcctgccattctaccctcccgaaccagggggagtaccaggctgttggtctggtgcgaaatggcaattgcccccaactgaaggccctccctcacccaggaaccaaccaaatactgccctgttgagcttgatcctgatgttagggaccttcttcatcgctttctttctcaggaagtttagaaactcccgttttcttggaggcaaggccaggcgtattataggggacttcggcatccccatcagcatcctggtgatggtcctcgtcgactacagcattacggatacctatacccagaaactaaccgtccctactggcctctcagtcactagccccgataagaggtcttggtttatcccacccttaggatccgccaggccattccccccctggatgatggtagctgcagcagtgccagctttactggttcttattctgatcttcatggaaacacaaatcaccgccctgatcgtgagccagaaggccaggcggctcttgaaggggtcaggtttccacctggatctgctactcattggatcacttggaggcctgtgcggtctctttggacttccatggctgactgcggctaccgtgcgctccgtgacccacgtgaatgccctcacagttatgcgaacagccatcgcacccggcgataaacctcagattcaggaggtgcgtgagcagagggtgaccggcgtccttatagcgagcctggtcggtttatccatcgtgatgggcgctgttttgagaagaatacctttggctgtactttttggtatatttctgtacatgggtgttacatccctatcaggcatccagttgagccagcggttgctgcttattctcatgcccgctaaacactag

SEQ ID NO: 300595 - DNA, 1203 bp, Artificial Sequence
  derived and/or modified sequence
atgggcgtgtctgagctgattgtgtccacagctgtgctgggcgtgctcttcagcctgctgggcgcccagcccctgctggtggtgggcttcagcggccccctgctggtgtttgaggaggccttcttcaagttctgccgggcccaggacctggagtacctgaccggccgggtgtgggtgggcctgtggctggtggtgtttgtgctggccctggtggccgctgagggcagcttcctggtgcgctacatcagccccttcacccaggagatctttgccttcctgatcagcctcatcttcatctatgagaccttctacaagctgtacaaggtgttcacagagcaccccctgctgcccttctacccacctgagcctggaggagtgcccggctgctggagcggggccaagtggcagctgcccccaacagagggcccccccagccccaggaaccagcccaacacagccctgctgagcctcatcctgatgctgggcaccttcttcatcgccttcttcctgaggaagttcaggaacagccgcttcctgggcggcaaggcccggcgcatcattggagactttggcatccccatcagcatcctggtgatggtgctggtggactacagcatcacagacacctacacccagaagctgactgtgcccaccggcctgtctgtgaccagcccagacaagaggtcctggttcatcccccccctgggcagcgcccggcccttccccccctggatgatggtggccgctgctgtgcctgccctgctggtgctgatcctgatcttcatggagacccagatcacagccctgattgtgtcccagaaggcccggcggctgctgaagggcagcggcttccacctggacctgctgctgattggcagcctgggcggcctgtgtggcctgtttggcctgccctggctgacagctgccaccgtgcgctctgtgacccacgtgaatgccctgactgtgatgaggacagccatcgcccctggggacaagccccagatccaggaggtgcgggagcagagggtgactggagtgctgattgccagcctggtgggcctgagcatcgtgatgggcgctgtgctgcggcgcatccccctggccgtgctgtttggcatcttcctgtacatgggcgtgaccagcctgagcggcatccagctgagccagaggctgctgctgatcctgatgcctgccaagcactag

SEQ ID NO: 300596 - DNA, 1203 bp, Artificial Sequence
  derived and/or modified sequence
atgggcgtgagcgagctgatcgtgagcaccgccgtgctgggcgtgctcttctctctgttgggggcccaacccctgctagtggttggtttctcaggtcctctgctggtgttcgaagaagctttctttaagttttgtcgtgcccaggacttagagtatctcaccggccgggtgtgggtggggctgtggctcgttgtattcgtgctcgcactggtggcggcagagggcagcttcctggtgcgctacatcagcccgtttacacaggagatcttcgcattcctaatttcattgatcttcatctacgagactttttataaattgtataaggtgtttactgaacaccccctgttacctttctacccacctgaacctggaggtgtccccggctgttggtctggggccaaatggcagctgcccccaaccgaagggccgccatccccaaggaatcagcctaataccgcgctgctgagtctcattctcatgttaggcaccttttttattgccttctttttgcggaaattcagaaactccagattccttggcggtaaggcgagacgcatcataggcgattttggtattccaattagcatacttgtgatggtgctggtggattattccataacagatacttacactcagaagctgactgtgccaaccggcctaagcgttacatcaccagataagagatcctggttcataccccccctgggctcagctcgccccttccctccatggatgatggtagcagccgcagtacctgccttacttgttcttatccttatcttcatggagacccagataactgcccttattgtgtcccaaaaagctcgccgactgctgaaggggtcgggatttcacctggatctgttgctcataggtagcctgggtgggctctgtggactgtttgggctgccttggctaactgccgcaaccgttcgatcagtgactcacgtgaatgcactcaccgtgatgcgcactgcgatagcccctggggataagccacagattcaggaggtgagggagcagcgggtaacgggtgtgctaattgctagcctcgtggggctttcgatcgttatgggtgcagtgctacgcagaatccctttggctgtcctctttggcatcttcctgtacatgggcgtgacttctctctccggaatacagctgtcccagagactcctcctgattcttatgcctgccaagcactag

SEQ ID NO: 300597 - DNA, 1203 bp, Artificial Sequence
  derived and/or modified sequence
atgggtgttagtgagctgattgtctccactgcagtgcttggggtgctctttagccttttgggtgctcagcctctgttggtggtcgggttttccgggcctttactagtgtttgaagaagctttctttaaattttgccgcgcacaggatctggagtatcttaccggaagagtttgggttggtttatggttggttgtgttcgtgctggccctggttgccgcagaaggctcgtttttggtgcggtatatcagtccctttacacaggagatttttgctttcttgatctccctgatatttatttatgagactttctacaagctgtataaagtattcacagaacacccgttactacctttctatcccccagagcccggtggggtccccggttgctggtcgggtgctaagtggcagttaccaccaactgagggaccacctagccctcgtaaccagccaaatacagcacttctgtccctcatcctgatgctcggaactttctttatagccttcttcctgcgaaaatttcggaacagcagattcctgggaggcaaggcacgcaggatcataggcgactttgggatccctatatcaatccttgtaatggtcctggtagattactcaataactgacacatatacacagaagctgacggtgcccaccggactctccgtcacatcaccagataagaggagctggttcataccaccactggggagtgccagaccattccccccttggatgatggtcgcggctgccgttcccgctctccttgtgttgattctcatcttcatggagacccagattacagcgctgatcgtgagccagaaggctcggaggcttctgaagggaagtggatttcaccttgatctactgttgatcggatcgttgggtggcctctgtggcctgtttggattgccctggctgacagctgctacagtgagaagcgtaacacatgtgaacgccttgactgtgatgagaacagcgattgctccgggagataagccccagatccaggaggtccgggaacagcgcgtgactggcgtactgatagcttctctcgtggggctatccatcgttatgggagctgtcctgagacgcattcctttagccgtactttttggtatctttttgtacatgggtgtgacatctctgtcaggcatccaattaagccagcgcctgttgctgattctcatgccagctaagcactag

SEQ ID NO: 300598 - DNA, 1137 bp, Artificial Sequence
  derived and/or modified sequence
atgggaaatccaagcgtgcccagaggaggtttcacgcagtactgtaggggcttgcttccttggggcttccaagatgccccgttttatctgctcgtgctcggattcgataaacttccgctatggggcactatcctgatctcagtcggctgcgctgtgttttgtgccctcattgtctggttcttcgtttgtccacgcatgaagcgcaaaattgagcgtgagatcaagtgcagtccttctgaatctcctctaatggagaaaaaaaacagtttgaaagaagatcacgaagaaaccaagctgtccgtaggtgatattgagaacaagcaccccgtttccgaagtgggacctgctacagtgcctttgcaagcggtggtcgaagagcgtaccgtgtcttttaagttaggcgacctggaagaggcaccagagcgggagagactgccgagtgttgacctgaaagaggaaacatccattgactctactgtaaatggcgccgtgcagctgcccaatggaaacctcgtccagttttcgcaggctgtatccaaccagatcaacagctccggccactatcagtaccatacggtacacaaagattctggcctttacaaggagcttttgcataaactgcacctcgctaaagtgggcgactgcatgggcgactctggagacaaacccttgagacgcaacaacagttatacttcctacacgatggctatctgcgggatgcccctggacagtttcagagcaaaagaaggcgagcagaaaggcgaggaaatggagaaactcacatggcccaacgcagattccaaaaagagaatcagaatggactcttacacatcttattgcaatgcggtatctgatcttcattccgcctcagagattgacatgagcgttaaggcggagatgggccttggggataggaagggtagtaatggatcattggaggagtggtatgaccaggacaaacctgaggtcagcctcctgttccaattcctgcagatcctgaccgcatgcttcgggtcctttgcacacggtggaaacgacgtgagtaatgccatcgggcctctggtggctctgtatctcgtgtacgacaccggtgacgtgtcatcaaaagtagcaactcctatctggctgttatgttag

SEQ ID NO: 300599 - DNA, 1137 bp, Artificial Sequence
  derived and/or modified sequence
atgggcaaccccagcgtgccccggggcggcttcacccagtactgccggggcctgctgccctggggcttccaggatgcccccttctacctgctggtgctgggctttgacaagctgcccctgtggggcaccatcctgatctctgtgggctgtgctgtgttctgtgccctgattgtgtggttctttgtgtgccccaggatgaagaggaagattgaaagagagatcaagtgcagccccagcgagagccccctgatggagaagaagaacagcctgaaggaggaccacgaggagaccaagctgtctgtgggggacatcgagaacaagcaccctgtgtctgaggtgggccctgccaccgtgcccctgcaggccgtggtggaggagaggacagtgtccttcaagctgggggacctggaggaggcccctgagcgggagcggctgcccagcgtggacctgaaggaggagaccagcattgacagcacagtgaatggagctgtgcagctgcccaacggcaacctggtgcagttcagccaggccgtgagcaaccagatcaacagcagcggccactaccagtaccacacagtgcacaaggacagcggcctgtacaaggagctgctgcacaagctgcacctggccaaggtgggggactgcatgggagacagcggggacaagcccctgcggaggaacaacagctacaccagctacaccatggccatctgtggcatgcccctggacagcttccgggccaaggagggggagcagaagggggaggagatggagaagctgacctggcccaatgctgacagcaagaagaggatccgcatggacagctacaccagctactgcaatgctgtgtctgacctgcacagcgccagcgagattgacatgtctgtgaaggccgagatgggcctgggggacaggaagggcagcaatggcagcctggaggagtggtatgaccaggacaagccagaggtgtccctgctcttccagttcctgcagatcctgacagcctgcttcggcagctttgcccacggcggcaatgatgtgtccaatgccatcggccccctggtggccctgtacctggtgtatgacacaggagatgtgagcagcaaggtggccacccccatctggctgctgtgctag

SEQ ID NO: 300600 - DNA, 1137 bp, Artificial Sequence
  derived and/or modified sequence
atgggcaaccccagcgtgccccggggcggcttcacccagtactgccggggccttctcccatggggcttccaagatgctccgttctacctgctggtcctggggttcgacaaattgccgttatggggcaccatcctgattagcgtgggatgcgcagttttctgtgctttgatcgtgtggtttttcgtgtgtcccaggatgaagagaaaaatagagcgcgaaataaagtgttccccctcagagtctcccctcatggaaaaaaagaatagcttaaaagaagatcacgaggagaccaaactgtccgttggagacatcgagaacaagcatcccgttagcgaggtgggccctgcgacggtgcccctgcaagctgtcgtggaagagcgtacagttagttttaaattaggggaccttgaagaggctcccgaacgcgaaaggttgccatcagtggatttgaaagaggaaacatccatcgacagtactgtcaacggcgctgtacagcttcctaacggcaatctcgtgcagttctcgcaggccgtctctaaccaaatcaattccagtggacattatcagtatcacacagtacataaagattccggcctgtataaagaactactgcataagctacacctcgcgaaagtaggcgattgcatgggagattctggagacaagcccctccgtcgaaataattcgtacacatcctacacgatggctatttgtgggatgcccctagacagctttcgagctaaggagggtgagcagaaaggagaggagatggaaaaattgacttggcctaatgctgactcgaagaagcggatcagaatggacagctacacatcctattgtaatgcagtgagcgatctgcactcagcgtctgaaatcgacatgtcagtaaaagccgaaatgggcttgggagataggaagggcagcaatgggagtcttgaagaatggtacgatcaagacaagcctgaggtcagcctattgtttcagttccttcagattcttaccgcatgctttgggtctttcgcccacggaggcaatgatgtgtccaatgctattggtccactggtggctttgtacttggtctacgataccggtgatgtgtccagcaaggtggccaccccgatctggctgttgtgttag

SEQ ID NO: 300601 - DNA, 1137 bp, Artificial Sequence
  derived and/or modified sequence
atggggaacccatctgtgcctagaggaggttttacccaatactgtcggggactccttccttggggctttcaggatgccccattttatctcctggtcctcggattcgacaagttgcctctgtggggcaccatattgatctcggtcggatgcgccgtcttctgtgcactgattgtgtggttctttgtgtgtcctcgaatgaagcgtaaaattgaacgtgaaattaagtgtagcccatcagaatccccgctcatggagaagaaaaattccctcaaggaggatcatgaagagaccaaactgagcgtaggggatatagaaaataaacatccggtaagcgaagtgggccctgctaccgtcccccttcaggctgttgtggaggagcgcacagtctcattcaaattgggggacttggaggaagcgccagaacgtgagagactgccctccgtggatctgaaggaggagacttccatcgattctactgttaacggggctgtgcagctccctaatggaaacttagtgcagttctcccaggctgtgtctaatcagataaatagtagtgggcattaccagtaccatactgtccacaaagactctggcctttataaggagctcttgcacaaattacatcttgcaaaagtcggtgactgcatgggtgatagtggagataagccactgcgtagaaacaattcctatactagttacacgatggccatctgcggcatgccccttgacagtttccgagccaaggaaggcgaacaaaagggcgaggagatggagaagttgacatggcccaacgcagactccaagaagcgtatccgcatggacagttacacttcctattgcaatgccgtgtcagaccttcacagcgcgtctgaaatcgatatgtccgtcaaggccgagatggggctcggggatagaaaaggctcaaacggttcgttagaagagtggtacgatcaggacaagccagaagtaagtctcctgtttcaatttctccagattctgaccgcctgtttcggctcttttgcgcacggcggaaatgacgtaagcaatgcaataggcccactcgtcgcattgtacctggtgtacgatacaggcgacgtaagcagcaaggtagccacgcctatctggctgttatgttag

SEQ ID NO: 300602 - DNA, 2411 bp, Artificial Sequence
  derived and/or modified sequence
atggggttttgccatgttgggcaggctggtctcgaactcctgacctcaagtgatctgcctgccacggcctcccaaagtgctgggattacaggcatgagccaccgtgcctggctgaaagacaaagcttttacaactattcttaaattatcaacttttgatagataatatccttgttttctgtatcttgctttgatactgctttcaaggagataatctcattaaagcattttactaaaggccagtatagtgaatgtaatcacttttacacagaattgtgtcagcatgacaaatgtgactactgagacatcattctgttaacattaaaataagtttgtaggtggtaatggaatatgtggcagttacgatcatgagctaggagagtggaacacttgctgtctttttcatagctagtcataggtccttagcgtgtagtgatctttattatcttccaaggtgaagaaaggaaaaggctcgtatgttgagaagcataggaacttgagtcccgcaggtgttcaagtgggctaggctggtgtgggttttcagatgatcattgagtttttctcccaaatttgtataggcactagcacagtaatcctgtgcacttaaatctggcagcagctgtcaggggtgatgggctggtatggggaacccctcagtccccagaggagggtttacacaatattgcagggggctgttgccctggggttttcaagatgcaccattttatctcctagtgctgggctttgacaaacttcctctgtggggtaccatcctcatctcggtgggatgtgcagttttctgtgcccttatcgtctggttctttgtatgtcccaggatgaagagaaaaattgaacgagaaataaagtgtagtccttctgaaagccccttaatggaaaaaaagaatagcttgaaagaagaccatgaagaaacaaagttgtctgttggtgatattgaaaacaagcatcctgtttctgaggtagggcctgccactgtgcccctccaggctgtggtggaggagagaacagtctcattcaaacttggagatttggaggaagctccagagagagagaggcttcccagcgtggacttgaaagaggaaaccagcatagatagcaccgtgaatggtgcagtgcagttgcctaatgggaaccttgtccagttcagtcaagccgtcagcaaccaaataaactccagtggccactaccagtatcacaccgtgcataaggattccggcctgtacaaagagctactccataaattacatcttgccaaggtgggagattgcatgggagactccggtgacaaacccttaaggcgcaataatagctatacttcctataccatggcaatatgtggcatgcctctggattcattccgtgccaaagaaggtgaacagaagggcgaagaaatggagaagctgacatggcctaatgcagactccaagaagcgaattcgaatggacagttacaccagttactgcaatgctgtgtctgaccttcactcagcatctgagatagacatgagtgtcaaggcagagatgggtctaggtgacagaaaaggaagtaatggctctctagaagaatggtatgaccaggataagcctgaagtctctctcctcttccagttcctgcagatccttacagcctgctttgggtcattcgcccatggtggcaatgacgtaagcaatgccattgggcctctggttgctttatatttggtttatgacacaggagatgtttcttcaaaagtggcaacaccaatatggcttttgtgctaaatatgaattgtctcaaaattagctgtgtaaaatagcccgggttccactggctcctgctgaggtcccctttccttctgggctgtgaattcctgtacatatttctctactttttgtatcaggcttcaattccattatgttttaatgttgtctctgaagatgacttgtgatttttttttcttttttttaaaccatgaagagccgtttgacagagcatgctctgcgttgttggtttcaccagcttctgccctcacatgcacagggatttaacaacaaaaatataactacaacttcccttgtagtctcttatataagtagagtccttggtactctgccctcctgtcagtagtggcaggatctattggcatattcgggagcttcttagagggatgaggttctttgaacacagtgaaaatttaaattagtaacttttttgcaagcagtttattgactgttattgctaagaagaagtaagaaagaaaaagcctgttggcaatcttggttatttctttaagatttctggcagtgtgggatggatgaatgaagtggaatgtgaactttgggcaagttaagtgggacagccttccatgttcatttgtctacctcttaactgaataaaaaagcctacagtttttag

SEQ ID NO: 300603 - DNA, 1137 bp, Artificial Sequence
  derived and/or modified sequence
atgggcaaccccagcgtgcccagaggcggcttcacccagtactgcagaggcctgctgccctggggcttccaggacgcccccttctacctgctggtgctgggcttcgacaagctgcccctgtggggcaccatcctgatcagcgtgggctgcgccgtgttctgcgccctgatcgtgtggttcttcgtgtgccccagaatgaagagaaagatcgagagagagatcaagtgcagccccagcgagagccccctgatggagaagaagaacagcctgaaggaggaccacgaggagaccaagctgagcgtgggcgacatcgagaacaagcaccccgtgagcgaggtgggccccgccaccgtgcccctgcaggccgtggtggaggagagaaccgtgagcttcaagctgggcgacctggaggaggcccccgagagagagagactgcccagcgtggacctgaaggaggagaccagcatcgacagcaccgtgaacggcgccgtgcagctgcccaacggcaacctggtgcagttcagccaggccgtgagcaaccagatcaacagcagcggccactaccagtaccacaccgtgcacaaggacagcggcctgtacaaggagctgctgcacaagctgcacctggccaaggtgggcgactgcatgggcgacagcggcgacaagcccctgagaagaaacaacagctacaccagctacaccatggccatctgcggcatgcccctggacagcttcagagccaaggagggcgagcagaagggcgaggagatggagaagctgacctggcccaacgccgacagcaagaagagaatcagaatggacagctacaccagctactgcaacgccgtgagcgacctgcacagcgccagcgagatcgacatgagcgtgaaggccgagatgggcctgggcgacagaaagggcagcaacggcagcctggaggagtggtacgaccaggacaagcccgaggtgagcctgctgttccagttcctgcagatcctgaccgcctgcttcggcagcttcgcccacggcggcaacgacgtgagcaacgccatcggccccctggtggccctgtacctggtgtacgacaccggcgacgtgagcagcaaggtggccacccccatctggctgctgtgctag

SEQ ID NO: 300604 - protein, 530 aa, Artificial Sequence
  derived and/or modified sequence
MTSSLQRPWRVPWLPWTILLVSTAAASQNQERLCAFKDPYQQDLGIGESRISHENGTILCSKGSTCYGLWEKSKGDINLVKQGCWSHIGDPQECHYEECVVTTTPPSIQNGTYRFCCCSTDLCNVNFTENFPPPDTTPLSPPHSFNRDETIIIALASVSVLAVLIVALCFGYRMLTGDRKQGLHSMNMMEAAASEPSLDLDNLKLLELIGRGRYGAVYKGSLDERPVAVKVFSFANRQNFINEKNIYRVPLMEHDNIARFIVGDERVTADGRMEYLLVMEYYPNGSLCKYLSLHTSDWVSSCRLAHSVTRGLAYLHTELPRGDHYKPAISHRDLNSRNVLVKNDGTCVISDFGLSMRLTGNRLVRPGEEDNAAISEVGTIRYMAPEVLEGAVNLRDCESALKQVDMYALGLIYWEIFMRCTDLFPGESVPEYQMAFQTEVGNHPTFEDMQVLVSREKQRPKFPEAWKENSLAVRSLKETIEDCWDQDAEARLTAQCAEERMAELMMIWERNKSVSPTVNPMSTAMQNERR

SEQ ID NO: 300605 - DNA, 1593 bp, Artificial Sequence
  derived and/or modified sequence
atgaccagcagcctgcagagaccctggagagtgccctggctgccctggaccatcctgctggtgagcaccgccgccgccagccagaaccaggagagactgtgcgccttcaaggacccctaccagcaggacctgggcatcggcgagagcagaatcagccacgagaacggcaccatcctgtgcagcaagggcagcacctgctacggcctgtgggagaagagcaagggcgacatcaacctggtgaagcagggctgctggagccacatcggcgacccccaggagtgccactacgaggagtgcgtggtgaccaccaccccccccagcatccagaacggcacctacagattctgctgctgcagcaccgacctgtgcaacgtgaacttcaccgagaacttccccccccccgacaccacccccctgagccccccccacagcttcaacagagacgagaccatcatcatcgccctggccagcgtgagcgtgctggccgtgctgatcgtggccctgtgcttcggctacagaatgctgaccggcgacagaaagcagggcctgcacagcatgaacatgatggaggccgccgccagcgagcccagcctggacctggacaacctgaagctgctggagctgatcggcagaggcagatacggcgccgtgtacaagggcagcctggacgagagacccgtggccgtgaaggtgttcagcttcgccaacagacagaacttcatcaacgagaagaacatctacagagtgcccctgatggagcacgacaacatcgccagattcatcgtgggcgacgagagagtgaccgccgacggcagaatggagtacctgctggtgatggagtactaccccaacggcagcctgtgcaagtacctgagcctgcacaccagcgactgggtgagcagctgcagactggcccacagcgtgaccagaggcctggcctacctgcacaccgagctgcccagaggcgaccactacaagcccgccatcagccacagagacctgaacagcagaaacgtgctggtgaagaacgacggcacctgcgtgatcagcgacttcggcctgagcatgagactgaccggcaacagactggtgagacccggcgaggaggacaacgccgccatcagcgaggtgggcaccatcagatacatggcccccgaggtgctggagggcgccgtgaacctgagagactgcgagagcgccctgaagcaggtggacatgtacgccctgggcctgatctactgggagatcttcatgagatgcaccgacctgttccccggcgagagcgtgcccgagtaccagatggccttccagaccgaggtgggcaaccaccccaccttcgaggacatgcaggtgctggtgagcagagagaagcagagacccaagttccccgaggcctggaaggagaacagcctggccgtgagaagcctgaaggagaccatcgaggactgctgggaccaggacgccgaggccagactgaccgcccagtgcgccgaggagagaatggccgagctgatgatgatctgggagagaaacaagagcgtgagccccaccgtgaaccccatgagcaccgccatgcagaacgagagaagatag

SEQ ID NO: 300606 - DNA, 1593 bp, Artificial Sequence
  derived and/or modified sequence
atgaccagcagtctccagcgaccctggagagtcccatggctgccatggaccattctgctggtatccactgctgcagcttcacagaatcaggagagattatgtgctttcaaggacccttatcagcaggacctcgggatcggggagagtaggatctcccacgagaatggtacaattctctgctccaaaggcagtacttgctacggcctgtgggagaagtccaagggcgacataaatcttgtgaagcagggatgttggtcccatatcggcgatcctcaggagtgtcattacgaggaatgtgttgtaactaccacccccccaagcattcagaacggcacataccgcttttgttgttgttcaaccgacctgtgtaatgtcaactttaccgagaatttccctcctccggacactactcccttatcaccaccccacagcttcaacagggatgaaacaatcattattgctcttgcgagcgtctcagtgctcgccgtgctgatcgttgccctgtgtttcgggtatcgcatgctgacgggcgaccgcaagcagggtctgcatagtatgaacatgatggaggcggccgcctctgaacccagcctggatctggacaacctgaagctcctcgaattaattggccgcggccgttacggggccgtgtacaagggctccttggacgaacggcccgtggcagttaaagtgttctctttcgctaacaggcagaactttatcaatgagaaaaatatctatagggtgcccttaatggagcatgacaacatcgcgcgatttatcgtgggagatgaaagagtgacagccgatggacgcatggaatatttgttggtgatggaatactatcctaacggatccctttgcaaatatctttctttgcacacatcagactgggttagcagttgtaggctggcacattcagtgactcgcggactggcgtatctccatacagaactgccccggggagatcactacaagccagcaataagccaccgcgatctgaattcccgcaacgttctggttaagaacgacggcacgtgtgttatcagtgacttcgggctgagcatgcgcctgactggaaacagactggtccgacctggtgaggaagacaacgccgcaatctccgaggtcggtacgattagatacatggctcccgaggtgctggaaggtgctgtaaacttgagggactgcgagtctgccttgaaacaggtggatatgtatgcattgggactcatctactgggaaatctttatgagatgtactgatctgtttccaggcgagagcgtccctgagtatcagatggccttccagaccgaggtaggaaatcatcccacctttgaggacatgcaggtattagtgagcagggagaaacagaggcccaagttccctgaggcttggaaagaaaatagcctggccgtgagatcactgaaggaaactattgaagactgctgggaccaagatgcggaggcaagactgactgcccagtgcgcggaagagagaatggctgaattgatgatgatttgggaacgcaacaagtccgtctcacccacagtcaaccctatgtccaccgccatgcagaatgaacggagatag

SEQ ID NO: 300607 - DNA, 1593 bp, Artificial Sequence
  derived and/or modified sequence
atgaccagcagcctgcagaggccctggagggtgccctggctgccctggaccatcctgctggtgtccacagctgctgccagccagaaccaggagcggctgtgtgccttcaaggacccctaccagcaggacctgggcatcggggagagccgcatcagccatgaaaatggcaccatcctgtgcagcaagggcagcacctgctacggcctgtgggagaagagcaagggggacatcaacctggtgaagcagggctgctggagccacatcggggacccccaggagtgccactatgaggagtgtgtggtgaccaccaccccacccagcatccagaatggcacctaccgcttctgctgctgcagcacagacctgtgcaatgtgaacttcacagagaacttccccccaccagacaccacccccctgagccccccccacagcttcaacagagatgagaccatcatcatcgccctggcctctgtgtctgtgctggccgtgctgattgtggccctgtgcttcggctacaggatgctgaccggggacaggaagcagggcctgcacagcatgaacatgatggaggccgccgccagcgagcccagcctggacctggacaacctgaagctgctggagctgattggccggggccgctacggggctgtgtacaagggcagcctggatgagaggcctgtggccgtgaaggtgttctcctttgccaaccggcagaacttcatcaatgagaagaacatctacagagtgcccctgatggagcatgacaacatcgcccgcttcatcgtgggagatgagcgggtgacagcagatggccgcatggagtacctgctggtgatggagtactaccccaacggcagcctgtgcaagtacctgagcctgcacaccagtgactgggtgagcagctgccgcctggcccacagcgtgacccggggcctggcctacctgcacacagagctgcccaggggggaccactacaagccagccatcagccaccgggacctgaacagcagaaatgtgctggtgaagaatgatggcacctgtgtgatcagtgactttggcctgtccatgaggctgactggaaaccggctggtgcggcctggagaagaagataatgctgccatcagcgaggtgggcaccatccgctacatggcccctgaggtgctggagggcgctgtgaacctgcgggactgtgagagcgccctgaagcaggtggacatgtatgccctgggcctcatctactgggagatcttcatgcgctgcacagacctcttccctggagagagcgtgcctgagtaccagatggccttccagacagaggtgggcaaccaccccacctttgaggacatgcaggtgctggtgtcccgggagaagcagaggcccaagtttcctgaggcctggaaggagaacagcctggccgtgcgcagcctgaaggagaccatcgaggactgctgggaccaggatgctgaggcccggctgacagcccagtgtgccgaggagaggatggccgagctgatgatgatctgggagaggaacaagtctgtgagccccaccgtgaaccccatgagcacagccatgcagaatgaaagaagatag

SEQ ID NO: 300608 - DNA, 1593 bp, Artificial Sequence
  derived and/or modified sequence
atgaccagcagcctgcagcggccctggcgggtgccctggctgccctggactatcctgctggtgtccaccgcggccgcatcgcagaaccaggagcgtctgtgcgcctttaaagacccttatcagcaggaccttgggattggcgagtcacgcattagccatgaaaatggcacgatcctgtgctccaaaggttctacttgttacggcttgtgggaaaaatctaagggtgatataaatctggtgaagcagggctgttggagccacataggtgacccccaagagtgtcactacgaagaatgcgtcgtcacaacaactcctccttctatacagaacggaacttaccgcttctgttgttgttccacggacttgtgtaatgtgaacttcactgagaactttcctcctccggataccacacctctaagtccccctcactctttcaatagggacgagaccatcatcatcgctttggcgagcgtgagcgtgcttgctgtactgattgtggcactgtgtttcgggtataggatgctgacaggagaccgaaaacaagggctgcatagcatgaatatgatggaggcggccgcaagcgagccaagcctggacctcgataaccttaaactgctcgagttaatcggccgcggacgctacggggccgtttataaggggtcccttgatgagaggccggtcgccgtgaaggtgtttagtttcgctaatcgccagaattttatcaacgagaagaatatttaccgggtgccacttatggagcacgacaatatcgctcggttcatcgtgggggacgaaagggtcaccgcagatggcaggatggaatacctcttagtgatggaatattatccaaatggaagtctttgtaagtacctgtctttgcacacatccgactgggtgtcctcttgtaggctggcacattctgtcaccagaggtttggcatacttacatactgaactgcctcgcggggatcattataagccagccatcagccaccgcgatttgaattccagaaacgtgctggtgaaaaacgacggtacttgtgttatctctgacttcgggttatcaatgagactgacagggaacaggttggtgcgtcctggcgaagaagacaacgctgccattagtgaagtgggcaccatcagatatatggcccccgaggtgttagaaggcgccgttaacctaagggactgcgaatcggcactcaagcaggtcgacatgtatgctttgggacttatttattgggagatctttatgcggtgcaccgatctattcccgggggagtccgttccagagtatcagatggccttccagacggaggtgggaaatcatccaacttttgaagatatgcaagtgctggtgagcagggaaaaacagaggcccaagttccccgaagcatggaaagaaaatagcctcgcggtgcgatccctgaaagagaccattgaggactgttgggatcaagacgctgaggcccgccttacagcccagtgcgccgaggagcggatggctgagcttatgatgatatgggaacggaacaagtctgtttcacccactgtgaaccccatgtcaacagctatgcagaacgagagaaggtag

SEQ ID NO: 300609 - DNA, 1593 bp, Artificial Sequence
  derived and/or modified sequence
atgacctcaagcctgcagaggccttggcgcgttccctggctgccttggactattctcctcgtgagcaccgccgctgccagccaaaaccaggagcgcctttgcgctttcaaggatccataccagcaagatctgggcattggagaaagcagaatttcgcatgaaaacggaactattctgtgctccaaaggctccacctgttacggcttgtgggaaaaatccaagggtgacatcaacctggtaaaacaggggtgttggtcccatatcggagatccccaggagtgtcattacgaagagtgcgtggtgacaacgactcccccttctatccagaacgggacttatcgattttgctgctgttcaaccgacttgtgcaacgtgaatttcacagagaatttcccccctccagataccacacctctcagcccccctcactcatttaaccgggacgagaccattattattgcactcgcgagtgtctcagtgttagccgtactgatcgtggccctttgctttggttatcgcatgttaaccggggataggaagcagggcctccattccatgaatatgatggaggccgcagcatcagagcctagtctcgatctggacaacctgaaactcttggaactgataggacgtggaagatacggtgcagtatacaagggcagtctggacgagcgtccggttgcagtcaaggtgttttcttttgccaatagacagaatttcattaacgagaagaatatctacagggtcccactcatggagcacgataacattgccagattcatcgtcggagacgagcgcgtaacagctgacggccgtatggagtatttgctggtcatggaatattacccaaacgggagtctatgcaagtatctatctttgcacacgagcgattgggtgtcaagctgtcgcctggcacacagcgtgacacgcggactagcatacctccatactgagctgccccgtggagaccactacaaaccagcaatttcgcacagggacctcaatagccgcaacgtgctggttaagaatgatggaacttgcgtgatttctgatttcgggctatctatgcggctcaccggaaatagactcgtaaggccaggagaggaggataatgcggcaatttctgaagtgggaacaattaggtatatggcgcctgaggtgctcgagggagccgtgaatctgagggactgtgagtcggccctgaagcaggtcgatatgtatgccttgggcttgatatattgggaaattttcatgcgctgcacagatttgtttcccggagagtccgtccccgagtatcagatggcgttccaaaccgaggtagggaaccatccaacattcgaagacatgcaggtcctggtgtctagagaaaaacaacggcctaagtttcctgaggcttggaaggagaacagcctggccgtcagatcactgaaggaaaccattgaagactgctgggatcaggacgcagaagccagactgacagcccaatgcgccgaggagagaatggccgagttgatgatgatatgggagcgcaacaagtccgtctcaccaactgtgaaccctatgtccaccgcgatgcagaacgagagacgctag

SEQ ID NO: 300610 - DNA, 9683 bp, Artificial Sequence
  derived and/or modified sequence
atttcttttctttgccctcctgattcttggctggcccagggatgacttcctcgctgcagcggccctggcgggtgccctggctaccatggaccatcctgctggtcagcactgcggctgcttcgcagaatcaagaacggctatgtgcgtttaaagatccgtatcagcaagaccttgggataggtgagagtagaatctctcatgaaaatgggacaatattatgctcgaaaggtagcacctgctatggcctttgggagaaatcaaaaggggacataaatcttgtaaaacaaggatgttggtctcacattggagatccccaagagtgtcactatgaagaatgtgtagtaactaccactcctccctcaattcagaatggaacataccgtttctgctgttgtagcacagatttatgtaatgtcaactttactgagaattttccacctcctgacacaacaccactcagtccacctcattcatttaaccgagatgagacaataatcattgctttggcatcagtctctgtattagctgttttgatagttgccttatgctttggatacagaatgttgacaggagaccgtaaacaaggtcttcacagtatgaacatgatggaggcagcagcatccgaaccctctcttgatctagataatctgaaactgttggagctgattggccgaggtcgatatggagcagtatataaaggctccttggatgagcgtccagttgctgtaaaagtgttttcctttgcaaaccgtcagaattttatcaacgaaaagaacatttacagagtgcctttgatggaacatgacaacattgcccgctttatagttggagatgagagagtcactgcagatggacgcatggaatatttgcttgtgatggagtactatcccaatggatctttatgcaagtatttaagtctccacacaagtgactgggtaagctcttgccgtcttgctcattctgttactagaggactggcttatcttcacacagaattaccacgaggagatcattataaacctgcaatttcccatcgagatttaaacagcagaaatgtcctagtgaaaaatgatggaacctgtgttattagtgactttggactgtccatgaggctgactggaaatagactggtgcgcccaggggaggaagataatgcagccataagcgaggttggcactatcagatatatggcaccagaagtgctagaaggagctgtgaacttgagggactgtgaatcagctttgaaacaagtagacatgtatgctcttggactaatctattgggagatatttatgagatgtacagacctcttcccaggggaatccgtaccagagtaccagatggcttttcagacagaggttggaaaccatcccacttttgaggatatgcaggttctcgtgtctagggaaaaacagagacccaagttcccagaagcctggaaagaaaatagcctggcagtgaggtcactcaaggagacaatcgaagactgttgggaccaggatgcagaggctcggcttactgcacagtgtgctgaggaaaggatggctgaacttatgatgatttgggaaagaaacaaatctgtgagcccaacagtcaatccaatgtctactgctatgcagaatgaacgtaggtgagtcaacacaagatggcaaatcaggatcaggtgaaaagatcaagaaacgtgtgaaaactccctattctcttaagcggtggcgcccctccacctgggtcatctccactgaatcgctggactgtgaagtcaacaataatggcagtaacagggcagttcattccaaatccagcactgctgtttaccttgcagaaggaggcactgctacaaccatggtgtctaaagatataggaatgaactgtctgtgaaatgttttcaagcctatggagtgaaattattttttgcatcatttaaacatgcagaagatgtttaaaaataaaaaaaaaactgctttatcctcctgtcagcaccccctcccacccctgcaacaaagacttgctttaaatagatttcagctatgcagaaaaatttagcttatgcttccatatttttaaattttgttttttaagttttgcacttttgtttagtctcgctaaagttatatttgtctgttatgaccacagagttatatgtgtgtgtatcaaaagtggtctcaaaatatttttttaagaaaaaaagcaaaaacaatgtattgctgataatcagtttggaccagtttcttaaggtcattaaaacagaagcaaattaagacaggtttgactgcagtggtgtctggtatccatgttttatttctgggcacaagctagtttttatgttgatacgttcctgaacatattatcttgttggacatcttttctcttgtgttttgtttgaatgtgcaatagtttataggccacaaataagctttcttgtaagctctcttcctaacagggcacatattcttccataatataaacacttttctgccccatctcccatacttttgaaggtcagttctatgacagtgaattttgcacaggagaagcagctacctgatttcttactttctctctccttatcatggagaatacagaaacattgtctgaaagggctctaaagaaggaactaccaaaacctgacttgaaatgccatttcttttaaccttccaaatcctaaatgtttccttcaaggcatcttaataaacttatttgcttctggttttgggagttcataagagagaatagaacaaaatacaggacatcaaatattagccatttcccattttattttatttttctatgtaggttcatgttccatgttcatttatttaagaaatacatttttattggtaagcttatagagctacacttatggaatttttaagtaggtaaataaatggttaagacaaaatagtgttatagccttcattctctgaataggccatctttgactcataaaattacccttactgtttattataacttcagaagtaatttatagttctgaacctatagtatcttttaccctgttcccaagcaaagactggtgactttatctgaaaatgattcctcttcccatgacctaaaacactgtgaggaaaaatcattcaagtggcatgccaagtccctatgaaggaagggctgctatcaaacctaccttttttgagcaaactgagactaaacttctctcttttcaaaattgtgttatcttccttaatcctattttcataatttttccttttgccagtttttcacattatctttgatatgtgagcaacatttattatttacattagagtataccttttagtaataaaatgacttgaaatcatattatttttaaaagccctttgcttctttcattacttataatctcctctaaaacaacctctgcatgttttttttaaataaagcactttctgtcaaataatggacttttttctaaacagaaattattttctattaatttgcaaactgatgatttcacttttttttacttttttttcgattatcagagtacttagtaaatgttatatagtttagttctaagatagttccagggattaaaaggttaagaggaaaacacaaatcaccaaatttctgatttatgtttttatctcctgaacaatattttctcactcatattcctctatcttatcacttagctaaagacagcctaaatttcccaattttctgtccaaaatatttgtgatttacttgtatataagccttctcatttgccatgtgctgtgatcttacaagttagatgttactatacctaccatttattcagctggattgctgaacacagttctggattcatagaattaagaatatcttgttagtgcccaggatttccacgttttgtgttttattggcccttttctttattcagccccttaatctattttcagtcttctggcacgtaatttttttcacagttattattcttctattaacaaattatttttatctttcctagtacattttcacttagttctcttgcccttaaatatctttcacatgcattttaggatattcttttcaaatatttgtaggacaactttgaatcaaaataaattatgttccttctccaatttgaagcattgaggataaatgaccatttgaggtctaactgatcttttcctgccagaagagttatcttacgttctgctatatttgtatttgggccagttgattgtaggttgtccaacattttttaatattgggaaaattatgataaaatgctttaaaaattaatatgccagattaaaataactgaatagtttactatttcattcaagcatgtttaaaacaaataatttcctttcaccagtttttcttagtaaactcctgaaaaagtaggaaaggtggaaagtatatatcatttttataaattttaaattgtacatcagacttttaaaatctgtaatatacaagcaagcaaaattattttaaatgacttaattgtatgctaatactcatctgataataaatgcttcttaaagttgacatttaactgctatcacaaagttttatatgtagaaaagtggggtccttttgaataaaagatcattcaactaaaaatattaaaatttatttcactggatggtaatgtaaccttaaaagcatcataataggtaaagtctaatattagttcccttaacaaaatcctaactgtataccagaattaggtcactgaaagaacttgatttgaattacgtttagacaaaaatgatttaattgtaaattcttaaaactttctaaatgcataattggcaaaaaaaaaaacccactgttaccagtgtaggaagttacaagaaggcacatactgaatgctgaagtatacatatgctatttctcttaaacctcagagcaaccatatgagcattgtaattaatattcccattttacagatgaggaaactgaagctaagagaagctaagtaatatgcccaaggtccacatctagtaacagacaaagctgggatttcagtctatgtctgcctctctccacatctctttcatccataccacactgcctacatgccatatgacaggatgtgtaatgggctaacgtttatttaaaaagttcaggccaggtgcagtggcttatgcctataatccccgcactttgggaggccgagccgggtggatcatgaggtcagacgttcaacaccagcctggccaagatggtgaaaccccgtctctattaaaaatattttttaaaaattaactgagcgtggtggtgggcgcctgtagtcccagctactcaggaggctaaggcaggagaatctcttgaacccgagaggtggaggttgcagtgagctgagatcgcgccactgcactgcagcctaggcgacagagcaagactgcctcaaaaaaaaaacataaaaattcagtcactatactctggcacaattttcatttgtatatgagccaaaccacataccttaatgatttgggaagttaggcaaatatgagatatgtagacatatctatgctgattgttgcttgagaaataattactaattctagacaaaactcaatcctgtatcttccatcatgaatcttaaaatcatttcacttcactcctaacatttcttacattgcagaactaatggtaaagtaaattttacggaaaaagttaagatagctttgggaacagagacctttccctaaattgattccatagcagatttgggggaattaacaaagaatttcagtctcatcaatcctttgaatccatcttcaaaacttctgcttttaataactttagaaaatttactaatctatagaactaattgagtaggatataggaaggatacaaggatataatgtcctttttataaaagtttagtatagcttctttacatgtatccacttgttccagaaaatgtgcattggttctgaatgtgaaaatatttaaagagagaaaggaacactcaagtaagtgtgggcttcagtgggaattatcacaaaacattggcaagtatttttatttaaattattttcaaatttgacttctacagccaagtggaattggtaggctgtagctgttacactgaaatttctagtctttgtaagtgcctcctgaaagtcatttaaaatggaaaaatatttcaatgagcttttccttttttcatatttatggacatgaatattttattggagatcattaactcctagaatttgagattatatttccatacaacattttataaagttatgttgaacttactacctgttatgtgcaggttattatgtaactattcacagattgcttcatatattgctttatcttcccatctaacttcttaaagttaaaatccggacacacatgttgattatctagaccagtcattctggaaattgtaacactcccacataaaccccaggagactttttcagaatgcaatgtttctaaatgtactgttactggcagtttactctccagcatataaggttgcattttaacttttagattatgaactgtgcaaactttacccaaaactatcttgcatgattccctcctaaatatattccttgattaagtaaatctggcaaatcactgtttgagctagttacataaaatttgttatcaagagaaggcttttctacaagtttccagattaacataaagaaaagagggaatcacagggcatttaagtgcaccttcccattactttccttaaatcacctcatagttaggctgggcgcggtggctcacgcctgtaatcccagcactttgggaggccgagacggtggatcacgaggtcaggggactgagatcatcctggctaacacgatgaaacctcatctctactaaaaatacaaataattagccaggcatggtggcacgcgcctgtagtcccagctactcgggaggcagagacaggagaatcgtttgcacccgggaggcggaggttgttgcagtgagccgagatcgcgccaatgcactccagcctgggctacagagtgagactccatctcaaaaaaaaacaaaaaaaatcacctcatagtttatgtctgacttactccaaacctcagttatctgatttgtagtctgtgtcaggaaagttttcttcatatctattctgtctccctcctctttgattttaaatttttttcttttacccagtaggacaaaaaagagcagttggtcatcatccccaatattcttagtcttcagtatgcttcaggcctctcaatgaacacttaagtctcaattcttcagacaaaattgcttaagctcttctcctcagtcctattttaatgactttatatttaagaatatagaattatattttcttttatattcaaattcattactccagttaagtaatagtttgatagtttgatagaatcgagagttaagatgtttctatttgaaagtggattcaaccatcagaccaccagcaaatcggcacttaatttttgtgttatctaacattttctattgtggaattttatgattttatattctcattagttataactaaaaagccatgcacacagaattgtatatcattttgccattaaaattttttaacatattgcagcaagcttagttttatgattgagccacaaccttttacatattttttgtatgaaatattaaacactaaatgcaagattaactttcaaaagcaaaccctacattaatcaggtattatctatggacatttttgtagaccacttttgaaatacttattattttgcaacatagactggactatacaactttcatttaacttttaggtgactgatttaagttgagtgtgcatatagagaaaaacctagaaatttatctcatggcagatacatttgaaagtacttcagaagaatttatgctgtatattaaaactaggctcaaaataaatctatcgtatctttaaaagtccaattctgttattactgtgatgtttgtagtgttactattaaacattgtgaacatacacatttttaaaacaacttgaaacccattttaaaatctgggtaagagagaaggaatcttcagaacaaaatcacatcattagggtgtccagtttatgattgaatttttaagcaaattactgtatttgaaactacaacttgatttggttttcagttttaaaaggcaacatgtgggttttatccattttatttatacctttagatttcagaaacatcttcatgttttagatgcattctacagacatcatgttacttaaaaactcagggcccctttcatccctttgtacactgaaaaagttcaattgttagcaagtaagcaattagatccagttgaatatttaaagtgtttgttgcacagttcatttaatgtttcatcttatttgactttttcacatagatataatatcagatttcattaattataaaaagttgcccagttctgtaattactgaacagagggaatgactcaactaattggctacatgttgcaacaaatttaggcctttagagttgaagcactgacttaaaacgacttacatttctgttctttggtcaaatgaccatacatgatatgggacaaattgtttcattttgtttgttttttaataagggaacttggtaaagtagttcctgtcagataggattttctcaagagacaatttaacgttataaagccttctaaaagtgaactaaatattttataactttagtaatagcttggatggttttgagaaaataacctgtatttatcacattgtcaaacagaatttttctttgaatcagacaagttcaagctctaaattgatgtgctatatacttaaaatcctaggaagttatctgtaaccagtctcttgtctcaggctcttcaccttgttaccaatcctcgtaagtatgtaaaggaaacatatttttaaagaagcttaacagtaagaaaaaattactaaaagatgcaattcaaagataggtcccagtttaacactgaattgcttgacttctgtggcttttctttttctggccacatttatttatttaagcaatttttgtatgccttgttatttcatttccatagagattatattgtatcagtgtttatgtaagctggaatcatcctcagttttttgctgataatttttcaaataaagatacatggataattgtaaaatacactaactcttagggtgttgtagtagctgaaacatggagatgcgtagctgtcatgctttttctgaatggacaggagaaacataagctacggagtattcacttctgaggatgcttttccggaaaaagaaaggctagaaaatactcgcacttcctcagaaccctctttcttgttaacgggtatcttttgttggtgtgttttgctcttacattacagatagactatcatatatgactttatgaataatttcagttattttgcttttgtataagctgtctgaagccttgctatgctgtataagttgtgtttgatggatcagtgtgagtataaaataaagcaaatcacttttcttttgtattatctatggatgccactatgaaagctgacattaagccactaaagagttttctatgaataagtgtaagtaaatgctttgatatatataaacctaaataaaaagattgtattgatacagagacattggagaaggagattttaaggcagttctttaggtttaaaaaggcttgctgtaaaatggtgcgttattccgtttattaaagatcatattaatgacaata

SEQ ID NO: 300611 - protein, 30 aa, Artificial Sequence
  derived and/or modified sequence
MSQSQNAIFTSPTGEENLMNSNHRDSESIT

SEQ ID NO: 300612 - DNA, 936 bp, Artificial Sequence
  derived and/or modified sequence
atgagccagagccagaacgccatcttcaccagccccaccggcgaggagaacctgatgaacagcaaccacagagacagcgagagcatcaccgacgtgtgcagcaacgaggacctgcccgaggtggagctggtgagcctgctggaggagcagctgccccagtacagactgaaggtggacaccctgttcctgtacgagaaccaggactggacccagagcccccaccagagacagcacgccagcgacgccctgagccccgtgctggccgaggagaccttcagatacatgatcctgggcaccgacagagtggagcagatgaccaagacctacaacgacatcgacatggtgacccacctgctggccgagagagacagagacctggagctggccgccagaatcggccaggccctgctgaagagaaaccacgtgctgagcgagcagaacgagagcctggaggagcagctgggccaggccttcgaccaggtgaaccagctgcagcacgagctgtgcaagaaggacgagctgctgagaatcgtgagcatcgccagcgaggagagcgagaccgacagcagctgcagcacccccctgagattcaacgagagcttcagcctgagccagggcctgctgcagctggagatgctgcaggagaagctgaaggagctggaggaggagaacatggccctgagaagcaaggcctgccacatcaagaccgagaccgtgacctacgaggagaaggagcagcagctggtgagcgactgcgtgaaggagctgagagagaccaacgcccagatgagcagaatgaccgaggagctgagcggcaagagcgacgagctgatcagataccaggaggagctgagcagcctgctgagccagatcgtggacctgcagcacaagctgaaggaggtgggcctgttcatccacagcaccgacatctgctag

SEQ ID NO: 300613 - DNA, 936 bp, Artificial Sequence
  derived and/or modified sequence
atgtctcaatcccagaacgcaatcttcaccagccctactggggaggagaacttaatgaactccaatcaccgggacagtgaatcgatcacagatgtttgctctaacgaagacctgcctgaggtggagctggtgagtctcctggaagaacaactgccgcagtaccgactaaaggttgacactctgtttttatacgaaaaccaagactggactcagagccctcaccaaaggcagcacgcctcagatgcgctgtccccagtgttggcggaggaaacctttaggtatatgattctcggtacagatcgggttgaacaaatgaccaagacttacaatgatatagatatggtcacacatctcctggcagaaagagatcgcgatctggagctggctgcgagaatcggccaggccctgttgaaacggaatcatgtgttaagtgaacagaacgagagcttggaagagcaactgggccaggcgtttgaccaagtgaaccagttgcagcatgagctctgtaaaaaggatgaactgctgcggatcgtctcaatagcttccgaggagagtgagacggattcatcatgcagtactcccctgcgattcaacgagtctttctctctgagccagggcttactgcagctggagatgctgcaagagaagctcaaagagctggaggaggaaaatatggctctacggagtaaagcctgtcacattaaaactgagacagtgacctacgaggagaaggaacagcagctcgtgtccgactgtgtcaaggaacttagagagacaaacgcacagatgagtcgtatgacagaagaactgtctggaaaaagcgacgaactgatcaggtaccaagaggagctttcctcccttctgtcccagatcgtagatctgcagcataaacttaaggaagtgggcctattcattcattctacagatatctgctag

SEQ ID NO: 300614 - DNA, 936 bp, Artificial Sequence
  derived and/or modified sequence
atgagccagagccagaatgccatcttcaccagccccactggagaggagaacctgatgaacagcaaccaccgggacagcgagagcatcacagatgtgtgcagcaatgaagacctgcctgaggtggagctggtgtccctgctggaggagcagctgccccagtaccgcctgaaggtggacaccctcttcctgtatgagaaccaggactggacccagagcccccaccagaggcagcacgccagtgatgccctgagccctgtgctggccgaggagaccttccgctacatgatcctgggcacagacagagtggagcagatgaccaagacctacaatgacatcgacatggtgacccacctgctggccgagcgggaccgggacctggagctggccgcccgcatcggccaggccctgctgaagagaaatcatgtgctgtctgagcagaatgaaagcctggaggagcagctgggccaggcctttgaccaggtgaaccagctgcagcacgagctgtgcaagaaggatgagctgctgagaattgtgtccatcgccagcgaggagagcgagacagacagcagctgcagcacccccctgcgcttcaatgaaagcttcagcctgagccagggcctgctgcagctggagatgctgcaggagaagctgaaggagctggaggaggagaacatggccctgcggagcaaggcctgccacatcaagacagagaccgtgacctatgaggagaaggagcagcagctggtgtctgactgtgtgaaggagctgcgggagaccaatgcccagatgagcaggatgacagaggagctgagcggcaagagtgatgagctgatccgctaccaggaggagctgagcagcctgctgagccagatcgtggacctgcagcacaagctgaaggaggtgggcctcttcatccacagcacagacatctgctag

SEQ ID NO: 300615 - DNA, 936 bp, Artificial Sequence
  derived and/or modified sequence
atgagccagagccagaacgccatcttcaccagccccaccggcgaggagaatcttatgaattccaaccatcgtgactctgagtctatcacagacgtttgcagtaatgaggacctgcccgaggtagaactggtgtctctgctggaagagcagcttcctcagtataggctgaaggttgatacattgttcctgtacgagaaccaagactggacccagtctcctcatcaacgacaacatgcttcggacgcgctcagccccgttctggcagaggagacttttaggtacatgatactaggcaccgatagggtggagcagatgacgaagacctacaatgacatcgacatggtgacacatctgctcgccgaaagagatagggatctcgagttggccgcacggatcggccaagcgctgttaaagcgcaatcacgtgctgtcagaacaaaacgagagcctggaggagcagttaggccaagcatttgatcaggttaatcagctgcaacacgaactgtgcaagaaggacgaactcctgagaatagtgagtattgcaagtgaagagtccgaaacagatagctcctgctcaacaccgcttagattcaatgagagcttcagcctttcacaagggctgctgcagctggagatgctccaagagaagctgaaggagctagaagaagaaaacatggccttgaggtcaaaagcctgccatataaagaccgagaccgttacatacgaagagaaagaacagcagctggtcagcgattgcgtgaaagagctccgagagaccaacgcgcaaatgagtcggatgaccgaggagctgtctgggaagagtgatgaactcattagataccaggaagagctgtcttcgttgctgagccagatcgttgacctccaacacaaactgaaagaagttggactcttcatacattcgaccgacatctgttag

SEQ ID NO: 300616 - DNA, 936 bp, Artificial Sequence
  derived and/or modified sequence
atgagccagtcacagaacgccatcttcacctctcccaccggagaggaaaatctgatgaatagcaaccaccgggactccgagtcgattacggatgtctgctccaatgaagacctccctgaagtggagttggtcagcctccttgaggaacagctgccgcagtatcggctgaaagtcgatacactctttctttatgagaaccaggattggacacagtcccctcatcagcggcaacatgcgagtgatgcactgtcccctgtcctagccgaagagacctttagatatatgattcttggcactgatcgcgtggagcagatgactaaaacctacaacgacatcgacatggtcacacacctcctcgccgagagagacagggacctggagctggcagctcgcatcggccaggctctccttaaacggaaccatgtgctgtctgaacagaacgagagcctggaagagcagctcgggcaggctttcgaccaggttaatcagttgcagcatgagctgtgcaagaaggacgagctcctgaggatcgttagtatcgcctctgaagagagtgagaccgactcttcttgttccacacctctgcggtttaatgagagctttagtctttcccagggtcttttgcagctggaaatgcttcaggaaaagctgaaagagctggaagaggagaatatggcgcttcgctccaaggcctgtcacatcaagaccgagaccgtgacctacgaggagaaggagcaacagctggtcagtgactgcgtaaaggaactgcgcgaaacgaacgcccagatgtctcgcatgacagaagaactgtcaggcaagtctgatgaactgattagataccaggaagagctctcttccctgctgtcccaaattgtggacctgcagcataagctgaaggaggtaggcttgtttatccactcaactgacatttgctag

SEQ ID NO: 300617 - DNA, 1436 bp, Artificial Sequence
  derived and/or modified sequence
gtgaagtcgcccgcctgtccctgccacgcccgggcggttgctggcagtgggagcagcggcagcagcttcggctgctgctttcaggctgccgctgcattaggggcttcctgaggaagcgcgggcggacgacagaggatgccgaaccactccagtcatgactgtccaaagtatgataatcacatgagagtgctcgttgctacggatgtcatttgactcatcagagaaaatctgtctaaaagaaaatatccatgtgaccaaatccatttcattattgaatggcttgatggatttcctttactctgattcataccaaagctgtccttctcaaccaaagcaagaaaggatcctgcatgagtcaatcccagaatgcaatttttacatcaccaacaggtgaagaaaacctcatgaatagcaatcacagagactcggagagcatcactgatgtctgctccaatgaggatctccctgaagttgagctggtgagtctgctagaagaacaactaccacagtataggctaaaagtagacactctctttctatatgaaaatcaagactggactcagtctccacaccagcggcagcatgcatctgatgctctctctccagtccttgctgaagagactttccgttacatgattctaggcacagacagggtggagcagatgaccaaaacttacaatgacatcgacatggttacacatctcctggcagagagggatcgtgatctggaactcgctgctcgaattggacaagctctcttaaagcggaaccatgtcttatctgagcagaacgaatccctggaggagcaattgggacaagcctttgatcaagttaatcagctgcagcatgagctatgcaagaaagatgagttacttcgaatcgtctccattgcttctgaagaaagtgaaactgattccagctgttctacacctcttcggttcaatgagtcctttagcttatctcaagggttgctgcagttggaaatgctgcaagaaaagctcaaggaactggaagaagagaatatggctcttcgatccaaggcttgtcacataaagacagaaactgttacctatgaagaaaaggaacaacagcttgtcagcgactgtgttaaagaacttcgtgaaacaaatgctcagatgtccagaatgactgaagaattgtcagggaagagtgatgagctgattcgataccaagaagagctttcctctcttttgtcacagattgtagaccttcagcacaaacttaaagaagtaggtttattcattcattcaacagatatttgttaagcactcacatagtatcttgcaccatgctaagtgctagatacaataaacaaaataaacattgtccctgcccttttaaaatgccctaatctgattgctgttttaatcatctttatgtcatataagatatcatgaataaatactttcaagtca

SEQ ID NO: 300618 - DNA, 381 bp, Artificial Sequence
  derived and/or modified sequence
ggaaatactgaccccataaacctaaatctcacacacggttttggacgtttaaacgaatggatttaacagccttttggaattcagcctgtttgtcatgactgtccaaagtatgataatcacatgagagtgctcgttgctacggatgtcatttgactcatcagagaaaatctgtctaaaagaaaatatccatgtgaccaaatccatttcattattgaatggcttgatggatttcctttactctgattcataccaaagctgtccttctcaaccaaagcaagaaaggatcctgcatgagtcaatcccagaatgcaatttttacatcaccaacaggtgaagaaaacctcatgaatagcaatcacagagactcggagagcatcactg

SEQ ID NO: 300619 - DNA, 78 bp, Artificial Sequence
  derived and/or modified sequence
atgagccagtggaaccaggtgcagcagctggagatcaagttcctggagcaggtggaccagttctacgacgacaactag

SEQ ID NO: 300620 - DNA, 78 bp, Artificial Sequence
  derived and/or modified sequence
atgagccagtggaaccaggttcagcagcttgaaataaagtttctggagcaggtagatcaattctacgacgacaattag

SEQ ID NO: 300621 - DNA, 78 bp, Artificial Sequence
  derived and/or modified sequence
atgagccagtggaaccaggtgcagcagctggagatcaagttcctggagcaggtggaccagttctatgatgacaactag

SEQ ID NO: 300622 - DNA, 78 bp, Artificial Sequence
  derived and/or modified sequence
atgagccagtggaaccaggtgcagcagctggagatcaagttcctggaacaggtggaccagttttatgacgacaattag

SEQ ID NO: 300623 - DNA, 78 bp, Artificial Sequence
  derived and/or modified sequence
atgtctcagtggaatcaggtacaacagctggaaatcaaatttttagagcaggtagatcagttctatgacgataactag

SEQ ID NO: 300624 - DNA, 2769 bp, Artificial Sequence
  derived and/or modified sequence
aaggctactcaaggagagtaggaggaggctaggtcaggaagggcaagcactggtggcctacccaggacttggcccaaccctctgggtcaggtcaccctcgtcggagtgagcggaccccgctggaattggagcccagtaaggtctatgagtttggtgttttgatcctggctacccatcccttccatcccaggggtggttcaccaggctgagtggagccttatactagggagagaggaagctgaagaactgggctccagcatgtctcagtggaatcaagtccaacagttagaaatcaagtttttggagcaggtggatcaattctatgatgacaactttcccatggaaattcggcatctgttggcccaatggattgaaaatcaagactgggaggcagcttctaacaatgaaaccatggcaacgattcttcttcaaaacttgttaatacaactggatgaacagttaggtcgtgtttccaaagagaaaaacctactcttgatacacaatctaaaaagaattaggaaggtccttcagggaaaatttcatggaaatccaatgcatgtagctgtggttatttcaaactgtttaagggaagagaggagaatattggctgcagccaacatgcctgtccaggggcctctagagaaatccttacaaagttcttcagtttcagaaagacagaggaatgtggagcacaaagtggctgccattaaaaacagtgtgcagatgacagaacaagataccaaatacttagaagatctgcaagacgaatttgactacaggtataaaacaattcagacaatggatcagagtgacaagaatagtgccatggtgaatcaggaagttttgacactgcaggaaatgcttaacagcctcgatttcaagagaaaggaggctctcagtaaaatgacccaaatcatccatgagacagacctgttaatgaacaccatgctcatagaagagctgcaagactggaagcggcggcagcaaatcgcctgcatcgggggtccactccacaatgggctcgaccagcttcagaactgctttacactattggcagaaagtcttttccaactgagaaggcaattggagaaactagaggagcaatctaccaaaatgacatatgaaggtgatcccattccaatgcaaagaactcacatgctagaaagagtcaccttcttgatctacaaccttttcaagaactcatttgtggttgagcgacagccatgtatgccaacccaccctcagaggccgttggtacttaaaaccctaattcagttcactgtaaaactaaggctactaataaaattgccagaactaaactatcaggtaaaggttaaggcatcaattgacaagaatgtttcaactctaagcaaccgaagatttgtactttgtggaactaatgtcaaagccatgtctattgaagaatcttccaatgggagtctctcagtagaatttcgacatttgcaaccaaaggaaatgaagtccagtgctggaggtaaaggaaatgagggctgtcacatggtgactgaagaacttcattccataacgtttgaaacacagatctgcctctatggcctgaccatagatttggagaccagctcattgcctgtggtgatgatttccaatgtcagtcagttacctaatgcttgggcatccatcatttggtacaacgtgtcaaccaacgattcccagaacttggttttctttaataatcctccacctgccacattgagtcaactactggaggtgatgagctggcagttttcatcgtacgttggtcgtggtcttaactcagatcaactccatatgctggcagagaagcttacagtccaatctagctacagtgatggtcacctcacctgggccaagttctgcaaggaacatttacctggtaaatcatttaccttttggacatggcttgaagcaatattggatctaattaagaaacacattcttcccctttggattgatgggtatgtcatgggctttgttagcaaagagaaggaacggctgttgctaaaggataaaatgcctggcacctttttattaagattcagtgaaagccatctcggaggaataactttcacctgggtggaccattctgaaagtggggaagtgagattccactctgtagaaccctacaataaaggccggttgtctgctctgccattcgctgacatcctgcgagactacaaagttattatggctgaaaacattcctgaaaaccctctgaagtacctatatcctgacattcccaaagacaaagccttcggtaaacactacagctctcagccttgcgaagtttcaagaccaacagaaaggggtgacaaaggttatgttccttctgtttttatccccatctcaacaatccgaagtgattcaacagagccacattctccatcagaccttcttcccatgtctccaagtgtgtatgcggtgttgagagaaaacctgagtcccacaacaattgaaactgcaatgaagtctccttattctgctgaatgacaggataaactctgacgcaccaagaaaggaagcaaatgaaaaagtttaaagactgttctttgcccaataaccacattttatttcttcagctttgtaaataccaggttctaggaaatgtttgacatctgaagctctcttcacactcccgtggcactcctcaattgggagtgttgtgactgaaatgcttgaaaccaaagcttcagataaacttgcaagataagacaactttaagaaaccagtgttaataacaatattaacagaaga

SEQ ID NO: 300625 - DNA, 354 bp, Artificial Sequence
  derived and/or modified sequence
atgagccagtggaaccaggtgcagcagctggagatcaagttcctggagcaggtggaccagttctacgacgacaacttccccatggagatcagacacctgctggcccagtggatcgagaaccaggactgggaggccgccagcaacaacgagaccatggccaccatcctgctgcagaacctgctgatccagctggacgagcagctgggcagagtgagcaaggagaagaacctgctgctgatccacaacctgaagagaatcagaaaggtgctgcagagccccggcctggccaccgcccagctgcccctggacagacacggcgagacctgcatccagagaagcaagagctgcccctag

SEQ ID NO: 300626 - DNA, 240 bp, Artificial Sequence
  derived and/or modified sequence
atgagccagtggaaccaggtgcagcagctggagatcaagttcctggagcaggtggaccagttctacgacgacaacttccccatggagatcagacacctgctggcccagtggatcgagaaccaggactgggaggccgccagcaacaacgagaccatggccaccatcctgctgcagaacctgctgatccagctggacgagcagctgggcagagtgagcaaggagaagaacctgctgctgtag

SEQ ID NO: 300627 - DNA, 354 bp, Artificial Sequence
  derived and/or modified sequence
atgagccaatggaaccaggtgcagcagttagagattaaattcctggagcaagtcgatcaattctacgacgataattttccaatggaaataagacacctcctagcgcagtggattgagaatcaggactgggaggccgcaagtaacaacgaaactatggccactattctcttacagaatctgctgatccagctggacgagcagctcggtagagtctccaaagaaaagaatctgctcttaatccacaatctgaaaagaatccggaaagttttgcaaagtccaggcctggctacagctcagctgcccttagatagacacggagagacttgtatacaaaggtccaaatcttgcccatag

SEQ ID NO: 300628 - DNA, 240 bp, Artificial Sequence
  derived and/or modified sequence
atgtcccaatggaatcaggtgcagcagcttgagataaagtttctcgagcaggtggatcagttctacgacgataactttcccatggaaatccgacatcttctggcccagtggatcgaaaaccaggactgggaggccgcgagcaataatgagaccatggctacaatactcctccagaatctcctgattcagctggatgaacagcttgggcgagtgagtaaggaaaaaaacctgctcctgtag

SEQ ID NO: 300629 - DNA, 354 bp, Artificial Sequence
  derived and/or modified sequence
atgagccagtggaaccaggtgcagcagctggagatcaagttcctggagcaggtggaccagttctatgatgacaacttccccatggagatccgccacctgctggcccagtggattgagaaccaggactgggaggccgccagcaacaatgagaccatggccaccatcctgctgcagaacctgctgatccagctggatgagcagctgggccgggtgtccaaggagaagaacctgctgctgatccacaacctgaagaggatcaggaaggtgctgcagagccctggcctggccacagcccagctgcccctggacagacatggagagacctgcatccagaggagcaagagctgcccctag

SEQ ID NO: 300630 - DNA, 240 bp, Artificial Sequence
  derived and/or modified sequence
atgagccagtggaaccaggtgcagcagctggagatcaagttcctggagcaggtggaccagttctatgatgacaacttccccatggagatccgccacctgctggcccagtggattgagaaccaggactgggaggccgccagcaacaatgagaccatggccaccatcctgctgcagaacctgctgatccagctggatgagcagctgggccgggtgtccaaggagaagaacctgctgctgtag

SEQ ID NO: 300631 - DNA, 354 bp, Artificial Sequence
  derived and/or modified sequence
atgagccagtggaaccaggtgcagcagctggagatcaagttcctggagcaggtggaccagttttacgacgataacttcccaatggaaattcggcacctgctggcacagtggatagaaaatcaggattgggaggctgcctcaaacaacgaaacaatggctaccatccttctccagaatctgttaattcagctcgatgagcagttgggtagagtgagcaaggaaaagaatttgctactgattcataatttaaaaagaatcaggaaagtgcttcagagtcctgggctggctactgctcagctgccgctggatcgccatggtgagacctgcattcaacggtcaaaatcatgtccgtag

SEQ ID NO: 300632 - DNA, 240 bp, Artificial Sequence
  derived and/or modified sequence
atgagccagtggaaccaggtgcagcagctggagatcaagttcctggaacaagtagaccagttctacgatgataactttccaatggagattcgacatctgcttgctcagtggattgaaaatcaggactgggaggccgcatcaaataatgaaaccatggctaccatactgctgcagaacctgctaatccagctggatgagcagcttggaagagtttcgaaagagaaaaaccttctgctgtag

SEQ ID NO: 300633 - DNA, 354 bp, Artificial Sequence
  derived and/or modified sequence
atgagccagtggaatcaagttcagcagctggagattaaattcttggagcaggtggaccaattctatgacgacaacttccccatggagataaggcatctgttagcccagtggattgagaatcaggattgggaggcagcatccaacaacgagacaatggccactatcctgctgcaaaatctgttgatacaactggatgaacagcttggacgggtgtccaaggagaagaacctgctgctgattcacaacttgaaaaggattcgcaaggttctgcaatcacctggcttggcaacagcccaattgccactggatagacacggagaaacttgtatacagcgtagtaagtcctgtccctag

SEQ ID NO: 300634 - DNA, 240 bp, Artificial Sequence
  derived and/or modified sequence
atgtctcagtggaatcaggtacagcagcttgaaatcaagttcctcgagcaggtggatcagttctacgatgacaattttcccatggagatcaggcatctgttggcccaatggatcgagaaccaggactgggaagccgcttctaataatgaaactatggccactattctcctgcagaatctgctcatacagctggatgaacagttggggagggttagcaaggagaagaaccttctcctgtag

SEQ ID NO: 300635 - DNA, 709 bp, Artificial Sequence
  derived and/or modified sequence
gggacctgtgctgagagagcgctagcatgtctcagtggaatcaagtccaacagttagaaatcaagtttttggagcaggtggatcaattctatgatgacaactttcccatggaaattcggcatctgttggcccaatggattgaaaatcaagactgggaggcagcttctaacaatgaaaccatggcaacgattcttcttcaaaacttgttaatacaactggatgaacagttaggtcgtgtttccaaagagaaaaacctactcttgatacacaatctaaaaagaattaggaaggtccttcagtccccagggttggctacagcacagctgcccttggatcgacatggagaaacctgcattcaaaggtccaaatcttgtccctaggacttagcttcttcacctgggacattcagatgatactaattgaggaaaccaagatacaggaatttagtacccatctattccttctaatacaaaacatcggagaattctggcttttgcaaactgttgttgacattttatacccagatgttaccattacctttgaagcctcttgtgcctcctccctgacaccactctgctctctttccgcctggagcaaccactgacccaaaatttgcatttgtcattttttttctttttgttgccattttaccacatacatttgcatccctaaacaataaagtgtctaggtttgaaagctgctaaatcca

SEQ ID NO: 300636 - DNA, 474 bp, Artificial Sequence
  derived and/or modified sequence
ggggcaaggctactcaaggagagtaggaggaggctaggtcaggaagggcaagcactggtggcctacccaggacttggcccaaccctctgggtcaggtcaccctcgtcggagtgagcggaccccgctggaattggagcccagtaaggtctatgagtttggtgttttgatcctggctacccatcccttccatcccaggggtggttcaccaggctgagtggagccttatactagggagagaggaagctgaagaactgggctccaggaaagcctcaagtgggaggagaaatgcaaatcccctactgatgatggcgtcagcggctttctcctagggactgtgaggggcgcttctgactttggacttgagcactgcctgggacctgtgctgagagagcgctagcatgtctcagtggaatcaagtccaacagttagaaatcaagtttttggagcaggtggatcaattctatgatgacaact

SEQ ID NO: 300637 - DNA, 569 bp, Artificial Sequence
  derived and/or modified sequence
aggggcaaggctactcaaggagagtaggaggaggctaggtcaggaagggcaagcactggtggcctacccaggacttggcccaaccctctgggtcaggtcaccctcgtcggagtgagcggaccccgctggaattggagcccagtaaggtctatgagtttggtgttttgatcctggctacccatcccttccatcccaggggtggttcaccaggctgagtggagccttatactagggagagaggaagctgaagaactgggctccagggactgtgaggggcgcttctgactttggacttgagcactgcctgggacctgtgctgagagagcgctagcatgtctcagtggaatcaagtccaacagttagaaatcaagtttttggagcaggtggatcaattctatgatgacaactttcccatggaaattcggcatctgttggcccaatggattgaaaatcaagactgggaggcagcttctaacaatgaaaccatggcaacgattcttcttcaaaacttgttaatacaactggatgaacagttaggtcgtgtttccaaagagaaaaacctactcttg

SEQ ID NO: 300638 - protein, 103 aa, Artificial Sequence
  derived and/or modified sequence
MSVSRTMEDSCELDLVYVTERIIAVSFPSTANEENFRSNLREVAQMLKSKHGGNYLLFNLSERRPDITKLHAKVLEFGWPDLHTPALEKICSICKAMDTWLNA

SEQ ID NO: 300639 - protein, 416 aa, Artificial Sequence
  derived and/or modified sequence
MVPFQQRKDCVLEGSTRVTPSVQPHLQPIRNMSVSRTMEDSCELDLVYVTERIIAVSFPSTANEENFRSNLREVAQMLKSKHGGNYLLFNLSERRPDITKLHAKVLEFGWPDLHTPALEKICSICKAMDTWLNADPHNVVVLHNKGNRGRIGVVIAAYMHYSNISASADQALDRFAMKRFYEDKIVPIGQPSQRRYVHYFSGLLSGSIKMNNKPLFLHHVIMHGIPNFESKGGCRPFLRIYQAMQPVYTSGIYNIPGDSQTSVCITIEPGLLLKGDILLKCYHKKFRSPARDVIFRVQFHTCAIHDLGVVFGKEDLDDAFKDDRFPEYGKVEFVFSYGPEKIQGMEHLENGPSVSVDYNTSDPLIRWDSYDNFSGHRDDGMEDGNKQNTNSQSIGSISGGLEDQYTWPDTHWPSQS

SEQ ID NO: 300640 - DNA, 1251 bp, Artificial Sequence
  derived and/or modified sequence
atggtgcccttccagcagagaaaggactgcgtgctggagggcagcaccagagtgacccccagcgtgcagccccacctgcagcccatcagaaacatgagcgtgagcagaaccatggaggacagctgcgagctggacctggtgtacgtgaccgagagaatcatcgccgtgagcttccccagcaccgccaacgaggagaacttcagaagcaacctgagagaggtggcccagatgctgaagagcaagcacggcggcaactacctgctgttcaacctgagcgagagaagacccgacatcaccaagctgcacgccaaggtgctggagttcggctggcccgacctgcacacccccgccctggagaagatctgcagcatctgcaaggccatggacacctggctgaacgccgacccccacaacgtggtggtgctgcacaacaagggcaacagaggcagaatcggcgtggtgatcgccgcctacatgcactacagcaacatcagcgccagcgccgaccaggccctggacagattcgccatgaagagattctacgaggacaagatcgtgcccatcggccagcccagccagagaagatacgtgcactacttcagcggcctgctgagcggcagcatcaagatgaacaacaagcccctgttcctgcaccacgtgatcatgcacggcatccccaacttcgagagcaagggcggctgcagacccttcctgagaatctaccaggccatgcagcccgtgtacaccagcggcatctacaacatccccggcgacagccagaccagcgtgtgcatcaccatcgagcccggcctgctgctgaagggcgacatcctgctgaagtgctaccacaagaagttcagaagccccgccagagacgtgatcttcagagtgcagttccacacctgcgccatccacgacctgggcgtggtgttcggcaaggaggacctggacgacgccttcaaggacgacagattccccgagtacggcaaggtggagttcgtgttcagctacggccccgagaagatccagggcatggagcacctggagaacggccccagcgtgagcgtggactacaacaccagcgaccccctgatcagatgggacagctacgacaacttcagcggccacagagacgacggcatggaggacggcaacaagcagaacaccaacagccagagcatcggcagcatcagcggcggcctggaggaccagtacacctggcccgacacccactggcccagccagagctag

SEQ ID NO: 300641 - DNA, 1251 bp, Artificial Sequence
  derived and/or modified sequence
atggtgccattccagcagagaaaggactgtgtcctggaaggctcgactagggtgacaccttccgtgcagccacacctgcagcccatccgcaatatgagcgtgagtcggactatggaagattcttgtgaactcgatctggtgtatgtaaccgagagaattatcgcagtcagcttcccttctacagcgaatgaggagaactttaggtcaaacctgcgggaggtggcccagatgctgaaaagcaagcacgggggcaactacctcctgtttaacctatcggagcgcaggccggacatcacgaagctgcatgctaaggtgcttgaatttgggtggcccgatctccacacaccagctctggaaaagatctgctcaatctgcaaggcgatggacacatggctgaacgccgacccccataatgtcgttgtcctgcacaataagggcaacaggggcaggatcggtgtggtgatcgccgcctatatgcactactctaacatatcagcctcagctgaccaggcactggatcgattcgccatgaagagattctatgaagacaaaattgtgcctatcggacaaccatcccagagacgctatgttcattacttctccggcctcttgtccgggtccatcaaaatgaacaataaacctctgttcctgcaccacgtgatcatgcatggtattccgaactttgagagcaagggggggtgtcgcccgtttcttaggatttatcaagccatgcagcctgtctatacctctgggatatataacattcctggcgattcccagaccagcgtgtgcatcactattgaacccggattactgcttaaaggtgatattctgcttaagtgctaccataagaaattcagaagcccagctcgagatgtgatctttagggtacaatttcatacctgcgcgatccatgacctcggagtagtcttcggtaaagaggatctggatgatgctttcaaagatgatcgcttccccgagtatggcaaagtggagttcgtcttctcatatggcccagagaagatccaaggcatggaacacctggagaacggccccagcgtgtccgttgattacaacactagcgacccactcattagatgggacagttatgacaatttttctggacatagggacgacggaatggaagatggaaacaaacaaaacacaaattcccagtccatcggtagtattagtggcggcctcgaggatcagtatacctggccagatacacattggccttctcaatcctag

SEQ ID NO: 300642 - DNA, 1251 bp, Artificial Sequence
  derived and/or modified sequence
atggtgcccttccagcagaggaaggactgtgtgctggagggcagcaccagggtgaccccatctgtgcagccccacctgcagcccatccggaacatgtctgtgtccaggaccatggaggacagctgtgagctggacctggtgtatgtgacagagcgcatcatcgctgtgtccttccccagcacagccaatgaggagaacttccgcagcaacctgcgggaggtggcccagatgctgaagagcaagcacggcggcaactacctgctcttcaacctgtctgagcggcggccagacatcaccaagctgcacgccaaggtgctggagtttggctggccagacctgcacaccccagccctggagaagatctgcagcatctgcaaggccatggacacctggctgaatgctgacccccacaacgtggtggtgctgcacaacaagggcaacagaggaagaattggagtggtgattgctgcctacatgcactacagcaacatcagcgccagcgctgaccaggccctggacagatttgccatgaagcgcttctatgaggacaagatcgtgcccatcggccagcccagccagaggcgctacgtgcactacttcagcggcctgctgagcggcagcatcaagatgaacaacaagcccctcttcctgcaccacgtgatcatgcacggcatccccaactttgagagcaaaggaggctgccggcccttcctgcgcatctaccaggccatgcagcctgtgtacaccagcggcatctacaacatccctggggacagccagacctctgtgtgcatcaccatcgagcccggcctgctgctgaagggggacatcctgctgaagtgctaccacaagaagttccgcagccctgccagagatgtgatcttccgggtgcagttccacacctgtgccatccatgacctgggcgtggtgtttgggaaggaggacctggatgatgccttcaaggatgaccgcttcccagaatatggcaaggtggagtttgtgttctcctatggccctgagaagatccagggcatggagcacctggagaatggccccagcgtgtctgtggactacaacaccagtgaccccctcatccgctgggacagctatgacaacttcagcggccacagagatgatggcatggaggatggcaacaagcagaacaccaacagccagagcatcggcagcatcagcggcggcctggaggaccagtacacctggccagacacccactggcccagccagagctag

SEQ ID NO: 300643 - DNA, 1251 bp, Artificial Sequence
  derived and/or modified sequence
atggtgcccttccagcagcggaaggactgcgtgctggagggcagcacaagggtaacaccaagtgttcagccccacctccagccaattagaaacatgagtgtgagtcgcactatggaggattcttgcgagttagacctagtctacgttacagagagaattatcgctgttagcttccccagcacggcaaatgaagaaaacttcaggtcaaacctgcgggaagtggctcagatgctgaaatccaaacatggcgggaactacctactcttcaatctctccgagagaaggcctgatattactaagttgcacgcaaaggtactggagtttggctggcccgatttgcacactcccgcactggaaaaaatctgttcgatttgtaaggctatggatacttggctgaacgcggatccccacaacgtggtggtactgcataacaaagggaaccgggggcggattggcgtggtgattgccgcctatatgcactacagcaatatatccgctagcgcggatcaggcactcgatcgtttcgccatgaagagattctacgaggacaagatagtgccgatcggccagccaagccagaggcggtatgtacactatttcagcgggcttctgtctggttccatcaagatgaataataagccgctgtttctgcatcacgtgataatgcacggaatccccaacttcgaatctaagggcgggtgccggccgttccttaggatttatcaggctatgcagcccgtgtacacctccggaatctacaacatacccggagattctcaaacctccgtgtgcattaccatagagcctggtctgctgctgaagggtgacatcctgctcaaatgttatcataaaaaattccgttcccctgccagagacgtcatatttagggttcagttccacacttgtgcaattcatgatctcggggtagtattcggcaaggaggacttagatgatgccttcaaagacgacagattccctgagtatgggaaagtcgaattcgtcttcagttacggccctgagaagatccaaggcatggagcaccttgaaaacggaccgtccgtgagcgtcgactataacacaagcgaccccttgattaggtgggactcctatgataacttctcaggacatagagatgacggtatggaggacggcaacaaacagaataccaactcccagtcaattgggagcataagtgggggtctggaggatcaatatacctggccggacacgcactggccaagccagtcatag

SEQ ID NO: 300644 - DNA, 1251 bp, Artificial Sequence
  derived and/or modified sequence
atggtgccctttcaacagcgcaaggattgtgtgttagagggttctactagagtgactccttctgtacagcctcatttacaacccatcaggaatatgtcggtgtcgagaacgatggaagacagttgtgagctagatttagtttacgtcaccgaacgcattatcgctgtcagcttcccatcgactgccaatgaagaaaacttcagatccaatttgagagaagttgcacaaatgcttaaatcaaaacacggtgggaactatcttctattcaatcttagtgagcggagacccgacattaccaagctgcacgctaaagttttggagttcgggtggccagatctgcatacaccagccctcgaaaaaatttgtagcatatgcaaggctatggatacttggttgaatgcagatccacataatgtggtcgtgcttcataataagggcaatagggggagaattggagtggttatcgccgcatatatgcattacagcaacatatccgcatcagccgaccaagccctggacagattcgccatgaagagattctacgaggataagatagtacccatcggccagccaagtcagcgtcgctatgtccactacttcagcgggctcttatctgggagcattaaaatgaataataaacccctcttccttcaccatgtaatcatgcacggaattcccaacttcgaaagcaaggggggttgccgccctttcctgaggatttaccaggccatgcagcctgtgtacacctctgggatatataatattcccggtgattctcagacctcagtgtgtataacaatcgaacccggactgctgctaaagggggatattttactgaaatgctatcataaaaaattccgctctcccgcacgggatgtgatcttccgagtgcagttccatacctgtgccatccacgacttgggtgttgtttttggtaaggaagatcttgatgacgctttcaaagacgaccgttttcctgaatacgggaaagttgagttcgtcttctcttacggccctgagaagatccagggcatggagcatcttgaaaacggccctagcgtgtcagttgactacaatacatcagacccactgattcgatgggatagttacgataatttcagtggccacagggacgacgggatggaggacggtaacaagcaaaacactaatagtcagagtatcgggtctatctccggaggtttagaagaccagtatacttggccagatacacattggccttctcaatcctag

SEQ ID NO: 300645 - DNA, 1792 bp, Artificial Sequence
  derived and/or modified sequence
gagccacccagtagtgtctgagtggtgatccactcttgcctgcaatgaggaccaaggcaaaaagagttggctgaatctgcagcaggaaggatgagggttagataccaggaggaaattcctgacagtgagaaaagtaagacactctgtctgggaggctgtcgaatttcctttcatggtgccctttcagcaaaggaaggattgtgttttggagggctccaccagggtcaccccgagtgtccagccccacctccagcccatcagaaacatgagtgtgagccggaccatggaggacagctgtgagctggacctggtgtacgtcacagagaggatcatcgctgtctccttccccagcacagccaatgaggagaacttccggagcaacctccgtgaggtggcgcagatgctcaagtccaaacatggaggcaactacctgctgttcaacctctctgagcggagacctgacatcacgaagctccatgccaaggtactggaatttggctggcccgacctccacaccccagccctggagaagatctgcagcatctgtaaggccatggacacatggctcaatgcagaccctcacaatgtcgttgttctacacaacaagggaaaccgaggcaggataggagttgtcatcgcggcttacatgcactacagcaacatttctgccagtgcggaccaggctctggaccggtttgcaatgaagcggttctatgaggataagattgtgcccattggccagccatcccaaagaaggtacgtgcattacttcagtggcctgctctccggctccatcaaaatgaacaacaagcccttgtttctgcaccacgtgatcatgcacggcatccccaactttgagtctaaaggaggatgtcggccatttctccgcatctaccaggccatgcaacctgtgtacacatctggcatctacaacatcccaggagacagccagactagcgtctgcatcaccatcgagccaggactgctcttgaagggagacatcttgctgaagtgctaccacaagaagttccgaagcccagcccgagacgtcatcttccgtgtgcagttccacacctgtgccatccatgacctgggggttgtctttgggaaggaggaccttgatgatgctttcaaagatgatcgatttccagagtatggcaaagtggagtttgtattttcttatgggccagagaaaattcaaggcatggagcacctggagaacgggccgagcgtgtctgtggactataacacctccgaccccctcatccgctgggactcctacgacaacttcagtgggcatcgagatgacggcatggaggatgggaacaaacagaataccaatagccagtcaattggaagcatctcaggtggcctggaggatcaatatacctggccagacacacactggccttcccaaagttaggccctccaaaatgtcaagttgccaagccagaatccaaagctttgcactgagaacttcatgttggggctcctgtcccctcctggagccctgcctgggtgacaccccagtccttctattcaggtcctgtgttcacctctgggaagtgcaggaccctgtggggttttttctttttccttttccaagccaaggaagtgttctggctcctggactctgccctgtggaggggaaagggggagagagagggaaaaaaagatttccaccttattgttcagcagctggaaaattgttgtcatctgttctgccttccatttgctgagaatggaaaaaaaatgtggaaaatttggggaaataaatctcaataccctcata

SEQ ID NO: 300646 - DNA, 312 bp, Artificial Sequence
  derived and/or modified sequence
atgagcgtgagcagaaccatggaggacagctgcgagctggacctggtgtacgtgaccgagagaatcatcgccgtgagcttccccagcaccgccaacgaggagaacttcagaagcaacctgagagaggtggcccagatgctgaagagcaagcacggcggcaactacctgctgttcaacctgagcgagagaagacccgacatcaccaagctgcacgccaaggtgctggagttcggctggcccgacctgcacacccccgccctggagaagatctgcagcatctgcaaggccatggacacctggctgaacgcctag

SEQ ID NO: 300647 - DNA, 186 bp, Artificial Sequence
  derived and/or modified sequence
atgagcgtgagcagaaccatggaggacagctgcgagctggacctggtgtacgtgaccgagagaatcatcgccgtgagcttccccagcaccgccaacgaggagaacttcagaagcaacctgagagaggtggcccagatgctgaagagcaagcacggcggcaactacctgctgttcaacctgagctag

SEQ ID NO: 300648 - DNA, 75 bp, Artificial Sequence
  derived and/or modified sequence
atgagcgtgagcagaaccatggaggacagctgcgagctggacctggtgtacgtgaccgagagaatcatcgcctag

SEQ ID NO: 300649 - DNA, 312 bp, Artificial Sequence
  derived and/or modified sequence
atgtctgtcagtagaactatggaagactcctgtgagctggacttggtttatgtcaccgagcgcatcattgccgtgagctttccaagcaccgcaaacgaggaaaatttccggagtaatttaagggaggtggcccagatgcttaagtcaaagcacgggggcaattacctcctgtttaacctgtcagagcgaaggcccgatatcacaaaactgcacgctaaggtcctggagtttggatggccagacctccacacaccagcccttgaaaaaatttgcagcatatgcaaagcaatggacacatggctgaatgcttag

SEQ ID NO: 300650 - DNA, 186 bp, Artificial Sequence
  derived and/or modified sequence
atgagcgtttctaggactatggaagatagctgcgagctggatctagtgtacgtaacagaacgcatcattgccgtgtcttttccaagtaccgccaacgaagaaaatttcaggtccaatttgcgagaagtcgcccagatgctcaaaagcaaacacggtgggaattatctgctttttaacttgtcatag

SEQ ID NO: 300651 - DNA, 75 bp, Artificial Sequence
  derived and/or modified sequence
atgagtgtatctagaaccatggaggactcgtgtgaactcgatctcgtgtacgtgaccgagcgcatcatagcgtag

SEQ ID NO: 300652 - DNA, 312 bp, Artificial Sequence
  derived and/or modified sequence
atgtctgtgtccaggaccatggaggacagctgtgagctggacctggtgtatgtgacagagcgcatcatcgctgtgtccttccccagcacagccaatgaggagaacttccgcagcaacctgcgggaggtggcccagatgctgaagagcaagcatggaggcaactacctgctcttcaacctgtctgaaagaagaccagacatcaccaagctgcacgccaaggtgctggagtttggctggccagacctgcacaccccagccctggagaagatctgcagcatctgcaaggccatggacacctggctgaatgcctag

SEQ ID NO: 300653 - DNA, 186 bp, Artificial Sequence
  derived and/or modified sequence
atgtctgtgtccaggaccatggaggacagctgtgagctggacctggtgtatgtgacagagcgcatcatcgctgtgtccttccccagcacagccaatgaggagaacttccgcagcaacctgcgggaggtggcccagatgctgaagagcaagcatggaggcaactacctgctcttcaacctgtcctag

SEQ ID NO: 300654 - DNA, 75 bp, Artificial Sequence
  derived and/or modified sequence
atgtctgtgtccaggaccatggaggacagctgtgagctggacctggtgtatgtgacagagcgcatcatcgcctag

SEQ ID NO: 300655 - DNA, 312 bp, Artificial Sequence
  derived and/or modified sequence
atgagcgtgagccggaccatggaggacagctgcgagctggacctggtgtacgtcacagagcgcataatagccgtgtcttttccgtccacagcaaatgaggaaaattttaggtcaaacctgagggaagtggcccagatgctgaaaagtaaacacgggggcaactacctattgtttaacctgtcagagaggagaccagacataaccaaactccacgccaaagtgctcgagtttggctggccagatctgcatactccagctttggagaaaatttgttctatatgtaaggccatggatacttggctgaatgcgtag

SEQ ID NO: 300656 - DNA, 186 bp, Artificial Sequence
  derived and/or modified sequence
atgagcgtgagccggaccatggaggacagctgcgagctggacctggtttacgtaacggaaagaatcatagccgttagctttcctagtactgcaaacgaggaaaacttccggtccaacttgcgcgaagtggcacagatgcttaaaagcaaacacggaggcaactatctcttattcaacctttcctag

SEQ ID NO: 300657 - DNA, 75 bp, Artificial Sequence
  derived and/or modified sequence
atgagcgtgagccggaccatggaggacagctgcgagctggacctggtttatgtgactgagcggatcattgcgtag

SEQ ID NO: 300658 - DNA, 312 bp, Artificial Sequence
  derived and/or modified sequence
atgtccgtgagccggaccatggaggattcctgtgagctggaccttgtgtatgtgacagaaagaattattgccgtgtcgtttccttccacagccaacgaggagaactttagaagcaacctgcgggaggtggcccagatgttgaaatctaaacacggcggtaactatcttctcttcaacttgagtgaacgccgacccgacattacaaagttacatgccaaggtgcttgagttcggatggcccgatttacacaccccagccctggagaaaatctgtagtatctgcaaggcaatggacacctggctgaacgcctag

SEQ ID NO: 300659 - DNA, 186 bp, Artificial Sequence
  derived and/or modified sequence
atgtctgtctccagaaccatggaagacagctgcgagcttgacctcgtttatgtgaccgagcggattattgctgtgtcgtttccttccaccgcgaacgaggagaattttcgaagtaacctgcgcgaggtggctcagatgctgaagtctaaacacggcggaaattacctcttattcaatctgagttag

SEQ ID NO: 300660 - DNA, 75 bp, Artificial Sequence
  derived and/or modified sequence
atgtcagtgtcccggacgatggaagactcgtgtgaattggatctcgtatacgttaccgagagaattatcgcttag

SEQ ID NO: 300661 - protein, 472 aa, Artificial Sequence
  derived and/or modified sequence
MYIYEASEEAVLEEKVLVTQPQKTKPKLAKVPEPPKKVVPEDKIYVTIPKKRETPATKEPDTTRGIFPEVEPPEAIPEIPEHPPTEEFEVFKEVIPEGETPIVKRRKTPSPTAPEAMKEVVPEMKIFEDVPEEPETPRMKTPEAPQEIIPAKTVPSKKREPPSVKVPEALQEIVPEKKTLVVPLRKPEVLPDEVPEALREVVPEKKVHPPQRAEVVPVKVHEAPKEIIPEKKVSVVPPKKPEVPPVKVPEASKEVIREEKVPLAPPKEPEVPPVKVPEPPKEVVPEKKAPVAPPKEPEVPPVKVPEAPKEVVPEKKVPVPPPKKPEVPPTKVPEVPKAAVPEKKLPEAIPPKPESPPPEVPEVLPPKEVVPEKKVPVPPAKKPEAPPPKVPEAPKEVVLEKKASVAVPKKPEAPRAKVPEAAQEVVPEKKIPKAPIKKPEAPAVTVPEVPQEIVPEKKTLVLPKKPEVPPVT

SEQ ID NO: 300662 - DNA, 96 bp, Artificial Sequence
  derived and/or modified sequence
aatggaattatcatcgaatggaatcgaatggaatcaacatcaaacggaaaaaaacggaattatcgaatggaatcgaagagaatcatcgaatggacc

SEQ ID NO: 300663 - DNA, 88 bp, Artificial Sequence
  derived and/or modified sequence
tatcatcgaatggaatcgaatggaatcaacatcaaacggaaaaaaacggaattatcgaattgaatcgaagagaatcatcgaatggacc

SEQ ID NO: 300664 - DNA, 1692 bp, Artificial Sequence
  derived and/or modified sequence
gcatgttgttgcggaggcggctgcacgtgttgcggatgtacatgcacaaccggatgctgtactacctgtacctgctgtgcttgtgcttgtacaaccggcaccaccactggggcgggtgcttgttgtactggagggtgtgcagctgggggtaccggatgtgggggagcaggctgttgttgcacatgttgcgccggagccgccggtactggttgtggagggacatgtgctgccgggtgtggaggctgtgccgggtgcgggggtgccggtgcttgcggtggctgtggcgcggggtgctgcgcaggcggcgcggcttgttgcacctgctgttgctgctgctgcggatgcggcacctgttgctgctgtgccggatgtaccacatgctgctgcgctgggtgtggtacaggaggatgtggaggatgtggcggagcagcctgttgctgctgttgcggcggcgctggagccgccgccggggccgcgaccgccgctgctggcgcctgtacgggcggagcgacagcatgtgccggcggaacctgctgtgccacaaccgcatgcggaacatgtgctaccacttgtaccgggtgcgccggggggtgctgtgcagctaccactacagctacaggcgcgggcggggcagccacttgttgtgctgcaggtgctacaggagccgccactacaacagggggagcgggatgtgcagggggtgccggcgccggcggctgttgtggtaccactactggaacgtgcactggatgtgcaggcacaggatgctgttgttgtgccggaggctgcacaggatgcacatgttgctgcgccgggtgtgggtgtactacctgctgttgcgccgcatgcgccggggcggggggggcttgttgtgccacgtgcactggcgccaccggagcaactacctgtgctaccgcaggtggatgtgcatgcgccgcagcgtgcgcgacaggtgccgctgccacgggcgcctgcacaacaaccggagctgccggaacgactacatgctgtactacctgtgctgctacagcggcagccgcggcttgcgccggtgcctgtgctgctactgccaccgggacaaccgcaacctgcgccggcgccacatgcgcagccgcttgtacatgctgtggcgcctgctgttgttgcgcagcctgcggcgctggcgctactacgtgctgtaccggggccgccggagctgcctgtactggttgcggagccggaggagccggcggaactggcgggggatgctgtacgtgcactacctgcgccggctgcggcgcaggatgtacaggtggggcatgcaccggctgtacctgctgttgtacgggcggcgctggctgcgcatgcggagcaggcactacttgcgccgggggggccgccggcggctgcacatgcgctgggggagcagctggagccggaggcgctggcgctggctgcgcagggtgtgccgcaggctgtggcggagccgctactgcgacttgtacatgcggggctacaggttgtgctacagctgctaccgggtgtgcaggtaccaccggaggcacaggaggcggcggatgctgtgcaacaggagcctgtggggggggggggtgttgttgtgggggagcagcttgtacctgcgcctgttgtgcaggatgcacaacagctgggtgtgcaggttgcggatgtacttgtggagggtgtacagggtag

SEQ ID NO: 300665 - DNA, 651 bp, Artificial Sequence
  derived and/or modified sequence
atgagccccaagccccgggccagcggcccccccgccaaggccaaggaggccggcaaacggaagagctcttctcaaccttccccaagcgatcctaagaaaaagacaaccaaggtcgcgaagaaagggaaagctgtacgccgtgggaggcgagggaagaagggtgccgccaccaaaatggccgccgttactgccccagaggcggaaagcggcccggcagccccagggccctcggatcagccctcacaggaactgccacagcacgagctccctcctgaggagccagtaagcgaaggaacccagcacgatcctctgagccaggaatccgaattggaagaacctctctcccaggaatcggaagtcgaagagcctctttctcaagaatcacaagtggaagagcccctgtcccaggagagcgaggtggaagagcctctctcccaagagtcccaggtagaggaaccgctgtctcaggaaagcgaagtggaggaaccactgtctcaagagtctcaggtggaagaacctctgtcgcaagaaagcgagatggaggagccgctgagtcaagagtctcaagtggaagagcccctcagccaagaatcagagatggaggagcccctttcacaggagagcgagatggaggaactgccctccgtttag

SEQ ID NO: 300666 - DNA, 1285 bp, Artificial Sequence
  derived and/or modified sequence
gttgttcctgaaaagaaggtgcctctggtggttcccaaaaagccagaagccccacctgctaaagtgcctgaagttccaaaagaagttgttccagaaaagaaagtagctgttcccaaaaagccagaagtcccaccagcaaaagtgccagaagtgccaaagaaacctgtcttggaagagaaaccagctgttcctgttccagaaagagcggagtctcctcccccagaagtatatgaagaacctgaggaaattgctcctgaagaggaaattgctcctgaagaggaaaagccagttcctgttgcagaagaggaggaaccagaggttccacctccagcagtgcctgaagagcccaagaagatcatcccagagaagaaagttcctgtcatcaaaaaaccagaagcaccgcctcctaaagaacctgagatgccaaagaaagttgttccagtgaagaaggtcccaactgttaagaagccagaaacaccagcagctaaagtgcctgaggtgcccaagaaacttgttccagtaaagaaagaacctgtgcctgttaccaaaaaaccagaagttcttccagaaaaagtgcccaaagtgcctgagaaaatcatcccagaaaaggaagtgtctgtgcctatccctgcagagccagaagttccacctgctgaagttgaagagactcctgaggaaataatatatgaagaaaaagcatctataaccattggtagaaaagagactccccctgttgaagaacgtgaaattgaaaagtatattaaacctgaagagcccgaacctgaaccacagcctgaagaaataccagtaaaagaacctgaacctgaaaaggttattgagaagccaaaactcaaaccaagacccccacctcctccacctgctccacctaaggaagatgtgaaggagaaaatattccaacttaaagctattccaaagaagaaagttcctgaaaaacctcaggttccagaaaaagtggagcttacacctctgaaagtaccagaaccaccacctccaaaacctgttgaagaggttgaagtacctactgttacaaaaagggaaaggaagattcctgaaccaacaaaagtgcctgaaatcaagccagcaatacctctccctgcacctgaaccgaaaccaaagcccgaagcagaagtgaaaacaatcaaaccacctcctgtggaacctgaaccaacccccatcgctgccccagtaacagtgccagtggttggaaagaaagcaggtgtacccaaaaagactccttcaccaatagaagccgaaaggagaaagt

SEQ ID NO: 300667 - RNA, 1692 nt, Artificial Sequence
  derived and/or modified sequence
gcauguuguugcggaggcggcugcacguguugcggauguacaugcacaaccggaugcuguacuaccuguaccugcugugcuugugcuuguacaaccggcaccaccacuggggcgggugcuuguuguacuggagggugugcagcuggggguaccggaugugggggagcaggcuguuguugcacauguugcgccggagccgccgguacugguuguggagggacaugugcugccggguguggaggcugugccgggugcgggggugccggugcuugcgguggcuguggcgcggggugcugcgcaggcggcgcggcuuguugcaccugcuguugcugcugcugcggaugcggcaccuguugcugcugugccggauguaccacaugcugcugcgcugggugugguacaggaggauguggaggauguggcggagcagccuguugcugcuguugcggcggcgcuggagccgccgccggggccgcgaccgccgcugcuggcgccuguacgggcggagcgacagcaugugccggcggaaccugcugugccacaaccgcaugcggaacaugugcuaccacuuguaccgggugcgccggggggugcugugcagcuaccacuacagcuacaggcgcgggcggggcagccacuuguugugcugcaggugcuacaggagccgccacuacaacagggggagcgggaugugcagggggugccggcgccggcggcuguugugguaccacuacuggaacgugcacuggaugugcaggcacaggaugcuguuguugugccggaggcugcacaggaugcacauguugcugcgccggguguggguguacuaccugcuguugcgccgcaugcgccggggcggggggggcuuguugugccacgugcacuggcgccaccggagcaacuaccugugcuaccgcagguggaugugcaugcgccgcagcgugcgcgacaggugccgcugccacgggcgccugcacaacaaccggagcugccggaacgacuacaugcuguacuaccugugcugcuacagcggcagccgcggcuugcgccggugccugugcugcuacugccaccgggacaaccgcaaccugcgccggcgccacaugcgcagccgcuuguacaugcuguggcgccugcuguuguugcgcagccugcggcgcuggcgcuacuacgugcuguaccggggccgccggagcugccuguacugguugcggagccggaggagccggcggaacuggcgggggaugcuguacgugcacuaccugcgccggcugcggcgcaggauguacagguggggcaugcaccggcuguaccugcuguuguacgggcggcgcuggcugcgcaugcggagcaggcacuacuugcgccgggggggccgccggcggcugcacaugcgcugggggagcagcuggagccggaggcgcuggcgcuggcugcgcagggugugccgcaggcuguggcggagccgcuacugcgacuuguacaugcggggcuacagguugugcuacagcugcuaccgggugugcagguaccaccggaggcacaggaggcggcggaugcugugcaacaggagccugugggggggggggguguuguugugggggagcagcuuguaccugcgccuguugugcaggaugcacaacagcugggugugcagguugcggauguacuuguggaggguguacaggguag

SEQ ID NO: 300668 - protein, 885 aa, Artificial Sequence
  derived and/or modified sequence
MVEKSSIDENSISLEKEVRHVQEQNLDILKTDLSLKSFSEEIYSESCALLPTSSADIEETDLSEKSCPLENGGRSSISHLKKAASEEKPLGVGEMEEECTLEPELAAFPKQDGGTQEYTDATLEDHRGDVQEADTLHRQLSLSQCFPLLMTEEQQNPGEQISTNIHASGEEKCYEEVQVQNEASFSTLEGEMIETSFSQNIPKLDEAHTTEAAESETSLTQYLLAAGKREVPETKDTRDQAKLVQSESITSMEVEEVTFNTVYEYYNQKQESLGRPLSPESDISIGVGSTTSEEISELDQFYTPPSSVEYFESPKSPDLYFNPSDITKQSSIHSGGETVERYSTPLGEVAERYSTPSEGEVGERYSTPPGETLERYSTPPGETLERYSTPPGEALERYSIPTGGPNPTGTFKTYPSKIEREDGTPNEHFYTPTEERGSAYEIWRSDSFGTPNEAIEPKDNEMPPSFIEPLTKRKVYENTTLGFIVEVEGLPVPGVKWYRNKSLLEPDERIKMERVGNVCSLEISNIQKGEGGEYMCHAVNIIGEAKSFANVDIMPQEERVVALPPPVTHQHVMEFDLEHTTSSRTPSPQEIVLEVELSEKDVKEFEKQVKIVTVPEFTPDHKSMIVSLDVLPFNFVDPNMDSREGEDKELKIDLEVFEMPPRFIMPICDFKIPENSDAVFKCSVIGIPTPEVKWYKEYMCIEPDNIKYVISEEKGSHTLKIRNVCLSDSATYRCRAVNCVGEAICRGFLTMGDSEIFAVIAKKSKVTLSSLMEELVLKSNYTDSFFEFQVVEGPPRFIKGISDCYAPIGTAAYFQCLVRGSPRPTVYWYKDGKLVQGRRFTVEESGTGFHNLFITSLVKSDEGEYRCVATNKSGMAESFAALTLT

SEQ ID NO: 300669 - DNA, 438 bp, Artificial Sequence
  derived and/or modified sequence
gaggacacctaccagctggagatcgccgaggcctaccccgaggacgagggcacctacaccttcgtggccagcaacgccgtgggccaggtgagcagcaccgccaacctgagcctggaggcccccgagagcatcctgcacgagagaatcgagcaggagatcgagatggagatgaaggagctgttcagcgagggcgagagcgagcacagcgagagagacaccagagacgccttcagcgacagcgaggacatcgaccacaagagcatggccgccaagagatacgccagcagaatcagcagcaccagcagctggcccgagtacttcaagcccagcttcacccagaagctgaccttcaagtacgtgctggagggcgagcccgtggtgttcacctgcagactgatcgcctgccccacccccgagatgacctggttccacaactag

SEQ ID NO: 300670 - DNA, 438 bp, Artificial Sequence
  derived and/or modified sequence
gaggatacttaccagctagagattgcagaggcctatcccgaggacgagggcacctatacatttgttgcatcaaacgccgtgggccaggtgtctagtacagccaatctgtcgctggaggccccagagagcatattacacgaacggatcgagcaggagattgagatggagatgaaagaactgtttagtgagggcgagtcagagcactctgagcgggatacgcgggatgctttcagcgatagcgaagatattgaccacaaaagcatggccgcaaagaggtatgccagccgcatcagctcgacaagctcttggcccgagtacttcaagccctctttcacccagaagctgacattcaagtatgtactagaaggcgaaccagtggtcttcacctgtaggcttattgcatgtccaacccctgaaatgacttggtttcacaactag

SEQ ID NO: 300671 - DNA, 438 bp, Artificial Sequence
  derived and/or modified sequence
gaagacacctaccagctggagattgctgaggcctacccagaagatgagggcacctacacctttgtggccagcaatgctgtgggccaggtgagcagcacagccaacctgagcctggaggcccctgagagcatcctgcacgagagaattgagcaggagattgagatggagatgaaggagctgttcagcgagggggagagcgagcacagcgagcgggacaccagagatgccttcagtgacagtgaagatattgaccacaagtccatggccgccaagagatatgccagccgcatcagcagcaccagctcctggccagagtacttcaagcccagcttcacccagaagctgaccttcaagtatgtgctggagggggagcctgtggtgttcacctgccgcctgattgcctgccccaccccagagatgacctggttccacaactag

SEQ ID NO: 300672 - DNA, 438 bp, Artificial Sequence
  derived and/or modified sequence
gaggacacctaccagctggagatcgccgaggcctaccccgaggacgagggtacctatacattcgtggcatctaatgcagtgggacaggtcagttctaccgccaacttgtctttggaggcaccagagtccattctacatgaacggatcgaacaggagattgagatggaaatgaaggagctgttttctgagggcgaaagcgagcattctgaacgagacacccgcgacgccttcagcgattccgaggacatcgaccacaaaagtatggcagcaaaacgatacgctagcagaatctcaagcacctcatcttggccggagtactttaaaccgtcctttacccaaaaactgacattcaaatacgttcttgagggtgagccggtcgtctttacctgtagactgattgcctgcccaacacccgaaatgacatggttccataattag

SEQ ID NO: 300673 - DNA, 438 bp, Artificial Sequence
  derived and/or modified sequence
gaagacacatatcagttggagatcgcagaagcgtatcctgaagacgaaggaacctacacgttcgtggcctcaaacgccgttgggcaagtcagctctacagcaaacctctctctcgaagcccctgagagtattctgcatgagagaatagaacaagaaattgagatggagatgaaagaactgttttcagaaggtgagagcgaacacagcgagcgggatacccgagacgctttctcagacagcgaggatatagatcacaagtccatggccgcaaaaaggtatgcctctaggattagctcaacctcaagctggcccgaatacttcaaacctagcttcactcagaagctcacctttaaatatgtgcttgagggagagccagttgtctttacttgtcgacttattgcttgtcctacccccgagatgacctggttccacaattag

SEQ ID NO: 300674 - DNA, 17305 bp, Artificial Sequence
  derived and/or modified sequence
gagcagtcgtgcattcccagcctcgcctcgggtgtagggattgcatagaaaagcaaaactacacagtcttgactgtgtagttttgtttttaggattagaggctcaccgattcatgtcggagatggtcagaaaaaccaactctccataggacgtcgtttcagaagcaaccttgggcttagtcccaccctttttaggcactcttgagaaatcagagtgcctagaaagatgacaactcaagcaccgacgtttacgcagccgttacaaagcgttgtggtactggagggtagtaccgcaacctttgaggctcacattagtggttttccagttcctgaggtgagctggtttagggatggccaggtgatttccacttccactctgcccggcgtgcagatctcctttagcgatggccgcgctaaactgacgatccccgccgtgactaaagccaacagtggacgatattccctgaaagccaccaatggatctggacaagcgactagtactgctgagcttctcgtgaaagctgagacagcaccacccaacttcgttcaacgactgcagagcatgaccgtgagacaaggaagccaagtgagactccaagtgagagtgactggaatccctacacctgtggtgaagttctaccgggatggagccgaaatccagagctcccttgatttccaaatttcacaagaaggcgacctctacagcttactgattgcagaagcataccctgaggactcagggacctattcagtaaatgccaccaatagcgttggaagagctacttcgactgctgaattactggttcaaggtgaagaagaagtacctgctaaaaagacaaagacaattgtttcgactgctcagatctcagaatcaagacaaacccgaattgaaaagaagattgaagcccactttgatgccagatcaattgcaacagttgagatggtcatagatggtgccgctgggcaacagctgccacataaaacacctcccaggattcctccgaagccaaagtcaagatccccaacaccaccgtctattgctgccaaagcacagctggctcggcagcagtccccatcgcccataagacactccccttccccggtcagacacgtgcgggcaccgaccccatctccggtcaggtccgtgtctccagcagcaagaatctccacatcccccatcaggtctgttaggtctccattgctcatgcgtaagactcaggcatccaccgtggccacaggtcctgaagtgcctcccccttggaagcaagagggctacgtggcctcctcatctgaggctgagatgagagagacaacgctgacaacctctactcagatcaggacagaagagagatgggaagggagatacggtgtccaggagcaagtgaccatcagtggtgctgcgggtgctgccgccagtgtgtcggccagtgctagctacgcagcagaggctgttgccactggtgctaaagaggtgaaacaagatgctgacaaaagtgcagctgttgcgactgttgttgctgccgttgatatggccagagtgagagaaccagtgatcagcgctgtagagcagactgctcagaggacaaccacgactgctgtgcacatccaacctgctcaagaacaggtaagaaaggaagcggagaagactgctgtaactaaggtagtagtggccgccgataaagccaaggaacaagaattaaaatcaagaaccaaagaagtaattaccacaaagcaagagcagatgcacgtaactcatgagcagataagaaaagaaactgaaaaaacatttgtaccaaaggtagtaatttccgcagctaaagccaaagaacaagaaactagaatttctgaagaaattactaagaaacagaaacaagtaactcaagaagcaataagacaggaaactgagataactgctgcatccatggtggtagttgccactgcaaagtccacaaaactagaaacagtcccgggagctcaagaagaaactaccacacaacaagatcaaatgcacctaagttatgaaaagataatgaaggaaactaggaaaacagttgtacctaaagtcatagttgccacacccaaagtcaaagaacaagatttagtatcaagaggtagagaaggcattactaccaaaagagaacaagtgcaaataactcaggagaagatgagaaaggaagccgagaaaactgccttgtctacaatagcagttgctactgctaaagccaaagaacaagaaacaatactgagaactagagaaactatggctactagacaagaacaaatccaagttacccatggaaaggtggacgttggaaaaaaggctgaagctgtagcaacagttgttgctgcagtagaccaggcccgagtcagagagcccagagagcctgggcatcttgaagaatcctatgctcagcagaccactttggagtacggatataaggaacgcatttccgccgcaaaggtagctgagcctccccaacgtccagcctcagaaccccacgttgtccctaaagcagtcaagcctagagtaatccaggctccttctgagactcatatcaaaactactgatcaaaagggaatgcacatatcatcacagatcaagaaaactacagatctaacaacggaaagattagtccatgtggataaacgcccccgcacagctagccctcactttactgtttcaaaaatttctgttcctaagacagaacatggatatgaggcatcaatagccggtagtgctattgccacattacaaaaagagttgtcagccacatcttctgctcagaagatcaccaaatcggtgaaggctcctactgtgaagcccagtgagactagagtaagggcagagcccacacccttgccacagttccccttcgctgacacaccagatacttacaagagtgaagctggcgttgaggtgaaaaaggaagtaggggtgagcatcactggcaccaccgtccgtgaagagcgctttgaagtactgcacggacgcgaagccaaggtaacagaaacagcaagagtaccagcacctgttgaaattcctgttactccaccaactttggtctcgggcttaaaaaatgtgactgtcatagaaggtgaatctgtcaccttggagtgccacatctctggatacccatccccgacagtgacatggtacagggaagactaccaaatcgaaagttccattgacttccagataaccttccagagtggaattgctcgtcttatgattcgcgaagcatttgcggaagacagcgggcgatttacttgcagtgctgtaaatgaggctggaaccgtcagcacatcctgctatctggctgtgcaggtgtcagaagaatttgaaaaggaaaccacagccgtgactgagaaatttactacagaagagaaacgctttgttgagtcaagagatgtggttatgactgatactagcctcacagaggaacaagcagggcctggagaacctgccgcgccttactttattacaaaaccagtggtccagaaactggtggaaggtgggagcgtggtgtttggatgccaagttggcggcaacccaaagccccatgtatactggaaaaaatctggtgttcctctaaccactggatacagatacaaagtgagttacaacaaacaaaccggtgaatgcaagctggtgatttctatgacttttgctgatgatgctggagaatacactattgttgttcgcaataagcatggagaaacttctgcatctgcttccttgcttgaagaagctgattatgagttactgatgaagtcccagcaagaaatgctttatcagacacaagtgactgcatttgttcaagaacctaaagttggagaaacagcacctggatttgtatactctgagtatgaaaaagagtatgaaaaagaacaagccttaattaggaagaaaatggccaaagatactgtagtggtcagaacttatgtagaagatcaggaattccatatttcttcctttgaagagagacttattaaagaaattgaatatagaataataaagactacattagaagaacttcttgaagaagatggagaagaaaagatggcagttgacatttctgaatctgaagctgttgaatcaggatttgattcaagaatcaagaattatagaattcttgaggggatgggtgtcacttttcattgcaagatgtctggatatccattaccaaagattgcttggtacaaagatggcaagcgcatcaaacatggagaaagataccaaatggactttctacaagatggcagagctagtctgcgtatacctgttgttcttccagaagatgaaggaatctacactgcatttgccagcaatattaaaggaaatgcaatttgctcagggaaattgtatgtggagcctgctgcaccacttggagctccgacttacattcccacactagagccagtgagcagaatcagatctctctctccacgttcagtgagcaggtctcctatacgcatgtctcctgcacggatgtcacctgcaaggatgtctcctgcacggatgtcccctgcaagaatgtcccctggacgtaggctggaggagacagatgagtcacaacttgagagactatataaaccagtctttgtgttaaaacctgtttctttcaaatgtttagaagggcaaactgccagatttgacttaaaggttgttggtagacctatgccagagacgttctggtttcatgatggccagcaaattgtcaatgactatacccataaagtagtcattaaagaagatggtactcaatcactaattattgtccctgccacacccagtgattctggggaatggactgtggttgcccaaaacagggcaggcagatcttcaatttcagtgattttaactgtggaagctgtggaacatcaggtaaaaccgatgtttgtagaaaaactgaaaaatgtcaatataaaggaaggttcccgacttgaaatgaaagtcagagctacgggtaaccccaaccctgacattgtatggttgaaaaacagtgacatcattgtgcctcataaatatcccaaaatcagaattgaaggaaccaagggagaagctgcccttaaaatcgattccactgtcagccaagattctgcctggtatactgcgactgctattaataaagctggcagagacactacaagatgcaaagtaaatgttgaagttgagtttgcagagcctgagccagagagaaagttaatcatcccacgggggacatatagagcaaaggagattgcagccccagaactggagcccctccatttgcgatatggccaagagcaatgggaagaaggtgatctctatgacaaagagaaacaacagaaaccatttttcaagaaaaaactcacttccttaagacttaagcgctttgggcctgcccactttgaatgcaggctaacacccattggtgacccaacgatggtggtggagtggctccatgatggaaagccacttgaagcagccaacaggctccgtatgatcaatgaatttgggtactgcagccttgattatggcgttgcatattctagagacagtggtatcattacttgcagagccactaacaaatatggaacagatcacacatctgctacccttattgttaaagatgagaaaagtcttgtggaagaatcccaattgcctgaggggaggaaaggcttacagagaattgaagaattagagagaatggctcatgaaggtgcacttacaggtgtaacaacagatcagaaagaaaagcaaaagccagacattgtcttgtacccagagccagttagagtacttgaaggggagactgcaaggttccgctgcagggtaacaggctaccctcagcccaaagtcaactggtacctcaatggacagctcatccgcaaaagcaaaaggttcagagttcgctatgatggtatccattacctggacatcgtggactgcaaatcatatgacacaggtgaagtgaaggtcaccgcggaaaatcctgaaggtgtgatagagcataaagtgaagcttgagattcaacagagggaagattttaggtctgtccttaggagagctcctgaaccaaggcctgagtttcacgtacatgaaccaggaaagcttcagtttgaagtacaaaaagtggatagacctgttgacaccactgaaaccaaagaagttgtgaagttgaaaagggctgaaagaattacccatgaaaaagtgcctgaagagtcggaagagctgcgcagtaaattcaagcgcagaacagaagagggctattatgaagccattaccgctgtggagctcaagtctcgaaagaaggatgaatcctatgaggaactcctcaggaagacaaaagatgaacttctccactggaccaaagagttaactgaagaggaaaagaaagctcttgccgaagaaggcaaaatcacgattccaacttttaaacctgacaagattgaactaagtcctagtatggaggctccaaaaatcttcgaaagaatccagagccaaacagtgggccaaggatctgatgcacacttccgggtcagagtcgtggggaaaccagaccccgaatgtgaatggtacaaaaatggtgtcaaaattgaacggtctgaccggatctactggtactggcccgaagacaatgtttgtgaattggtcataagagatgtgactgctgaggactctgccagcatcatggtaaaagccatcaacatagctggagaaacctccagtcacgcattcttacttgtccaagccaagcaattgatcactttcacacaggaattacaagatgttgttgctaaggaaaaagacactatggcaacctttgaatgtgaaacttcagaaccatttgtcaaagtgaaatggtataaagatggtatggaggttcatgagggagataaatacaggatgcactctgacagaaaggttcacttcctctccatactgaccattgatacgtctgatgctgaagattacagctgtgtacttgtggaagatgaaaatgtcaaaacgactgctaaacttattgttgaaggtgcagttgttgagtttgtgaaagaacttcaggacatagaagttccagaatcatattcaggagaattagagtgcattgtatccccagaaaatatagaaggaaaatggtatcataatgatgtggagcttaaatccaatggcaaatatacaattacatctcgtcgtggacgtcagaacctcacggtcaaggatgtaaccaaggaggaccagggagaatacagctttgtcatcgacgggaaaaagacaacctgtaaattaaagatgaaaccccgccccattgctatcctacaaggacttagtgaccaaaaagtctgtgagggtgacattgttcagcttgaagttaaagtctccttggaaagtgtggaaggcgtctggatgaaagacggccaagaagtgcagcccagtgacagggttcacattgtgatagacaaacaatctcatatgctgctcattgaagacatgactaaggaagatgctggaaattactctttcaccattccagcccttggcctctccaccagtgggcgtgtctctgtctatagtgtggacgtgataacacctctaaaagatgttaatgtgattgaaggcaccaaggctgtgcttgaatgtaaggtgtcagtccctgatgtgacttctgttaagtggtacttaaatgatgaacaaatcaagcctgatgaccgtgtacaggccattgtgaaaggtactaaacagcgactagtcattaaccgaactcatgcttcagacgaaggaccttacaagctgatagttggcagagttgaaaccaactgtaatctctctgtagaaaaaattaaaattatcagaggtcttcgtgaccttacctgtacagaaactcaaaatgtggtgtttgaggttgagctgtcccactctggaattgatgtcctgtggaattttaaggacaaggaaatcaagcccagttctaaatataaaattgaagcacatggaaaaatatataaattgacagttctaaatatgatgaaagatgatgaaggaaaatacacattttacgcgggagaaaatatgacatctggaaaacttactgtggcaggtggggccatctccaagccactcacagatcagaccgtagctgaatcccaggaagctgtgtttgaatgtgaagttgccaacccagattccaaaggcgaatggttgagggatggcaaacacctaccactgactaacaacatcagaagtgagtctgatggccacaaaaggagacttatcattgctgccaccaaattagatgacattggagaatatacctacaaggtggccacctccaaaacatctgccaaactcaaagttgaagctgtcaaaattaagaagactctgaagaacctcacagtgacagaaacacaggatgctgttttcactgtcgagcttacacaccctaatgtcaaaggtgtccagtggatcaaaaatggagttgtgctggaatccaatgaaaagtatgctatctctgtcaaaggaacaatttactctctgaggattaaaaactgtgccatcgtggatgagtctgtttatggcttcaggcttggaaggcttggagccagtgccagactgcacgtggagactgtcaagatcattaaaaagccaaaggatgtgacagccttggaaaatgccactgttgcctttgaagttagtgtttcccatgacactgttccagtaaaatggttccataagagtgtggaaattaagccaagtgacaaacacagactggtctcagaaaggaaagtccacaagctgatgctgcagaacatctccccctcagatgctggggaatacacagctgtggtcgggcaattggaatgcaaagcaaaactgtttgtggagacattacatattacaaaaaccatgaaaaatatcgaggtgcctgagaccaaaactgcctcttttgagtgtgaggtgtcccacttcaatgtcccttccatgtggctgaagaatggtgtggaaattgagatgagtgaaaagttcaagatagttgtgcagggaaaactccatcagctgatcatcatgaacaccagcacagaggactcggcagaatacacatttgtctgtggcaatgaccaagtcagtgccaccctgacagtcaccccaatcatgattacttccatgctgaaagacatcaacgctgaagaaaaagacactattacttttgaggtgacagtgaactatgaaggcatctcttacaaatggttaaagaatggtgtggaaatcaaatcaactgacaagtgccagatgagaaccaaaaagctcacacactcactgaacatcaggaatgttcactttggggatgctgctgactacacctttgtggctggaaaagcaacatcaacagccacactttatgtggaagctcgtcatatagaatttaggaaacacattaaggacattaaggtactggagaagaagcgagccatgtttgaatgtgaagtttctgaacctgacatcactgtacagtggatgaaagatgaccaggaactgcagatcacagacagaataaagattcagaaggagaaatatgtccaccgccttctgatcccatccacccggatgtctgatgctgggaagtacacagtggtggcaggaggcaacgtgtcaactgcaaaactctttgtagaaggcagagatgttcgcatccgaagtattaaaaaggaggttcaggtcattgagaaacagcgtgctgttgttgaatttgaggtcaatgaagacgatgttgatgcccactggtataaagatggcattgaaatcaatttccaagttcaagaacgacacaaatatgtagtggaaagaagaatccaccgaatgtttatctctgagaccagacagagcgatgcaggagaatacacctttgtggcaggaaggaacaggagttctgtcactctctatgtcaatgctcctgaaccgccccaagttctgcaggagctccagcctgtcactgtgcagtctggcaagcctgcccgcttctgtgccgtgatatccggaagaccacagcccaaaatttcctggtacaaggaagagcagctgctttccactggcttcaagtgcaaatttcttcatgatgggcaagaatacacgcttttgctaattgaagccttcccagaggatgcggcagtctatacctgtgaagccaagaatgactatggtgttgccacaacatcagcttcactctcagtggaagttccagaagttgtgtctcctgatcaggaaatgcctgtttatccacctgccatcatcaccccgcttcaggacactgtcacttctgaagggcagccagcccgttttcaatgccgggtttctggaacagatctaaaagtgtcgtggtacagcaaagacaagaaaatcaagccatctcggttctttagaatgactcaatttgaagacacttatcaactggaaattgccgaagcttatccagaagatgaaggaacttacacgtttgttgctagtaatgctgtaggccaagtatcaagcacagccaacctgagtctggaagctcctgaatcaattttgcatgagaggattgaacaagagattgagatggaaatgaaagaattattctctgagggggaatctgaacattcagaaagggatacacgtgacgccttttcagattctgaagacatagaccacaaatccatggctgctaaaagatatgcaagtagaatatcatctacaagctcctggcctgaatattttaagccttcttttacccagaaacttacatttaaatatgttttagagggtgaaccggttgtttttacatgtagattaattgcctgtccaactccagaaatgacttggtttcataacaatcggcccatcccaacaggtcttcgtcggattataaaagctgagagtgatttacaccatcactcttccagcttagagattaaaagggtccaagacagagattctggaagttataggttactagcaattaatagtgaagggtctgcagaatcaactgcatcattgcttgttatccaaaaagggcaagatgagaaatatttagaatttctgaaaagagcagaacggacacatgaaaatgtggaggctttagttgaaaggggagaagataggataaaggttgacctgaggtttactggctctccctttaacaaaaaacaagatgtggaacaaaagggaatgatgagaactatacattttaagacaatgagttctgccaagaaaacagattacatgtatgatgaagaatatttagaaagtaaatctgacataagaggttggcttaatgtaggtgaaagtttcctggacaaggagaccaaagtgaagttgcaacgtttaagggaggctagaaaaacattaatggagaaaaagaaattatctcttttagatacgtcttctgaaataagctcaagaactttgagaagtgaagctagtgataaagatattctgttctctagagaggacatgaaaatcagatctatgtctgatctagctgaaagttataaggtagatcattcagctgagagtattgtgcaaaatccacatgccctttctaatcaaatggatcaaaatatagaatctgaggaacttcccacaagctttcaaactattgttgatgaagaaattttccagactgaaataagaatgagccaagaagcactggtaaaggaaagtctaccaaaagaccatttatatggtgaaattctagtaaatgaaaatacccaagcaagaggacagctggaagaaattatggccaatactacaattggagagtcatccacatatatcactaatgtatgtgagaaggaggaagtatatgagactcctgaaaatgtgtctcaagctattacaccacatgccagcgaatcttttggtacacttgtaaatgttgaagaaagtgaagaaatagctagtgaaagaataaaaaaggatgatttgagagaattacaactctctgcttctacacgaattgatgaattcaaaaccgaacagaaggaagaaaacatgagattttttgaaaattcttttcgaaaacgcccacaacgttgcccaccttcatttcttcaagaaattgaatctcaagaagtttatgaaggtgacagttgtaattttgtgtgtcattttcaaggatatcctcaacctatagtgacgtggtataacaatgacatgccaatcccacgtaatcaaaactttatcattcattcgttggaaaactattcaatattaactctttcatctgttcatcatcagaatgaaggttctattacttgtgtgctatttaaccaatatggaacagtaaaaacaaccagtatgcttaaagtgaaagcaaaacaaaaacatgatgtcaaagcacataaagtcccagtgttccatgactacttggatgaggaagaagagttagcattggtgtttgaccaagcaaaaggcgcccatccatctatgagtcaagagggccaaacaaatcttcatttgttaaaaactaacccaccagttcctccctctggagacacagaattgctttcctttcctgtagaaattcaggtaacagcagctactcctatcccagaacaggataaagagtctaaagaagtgtttcaaactgaggagctggaacctaaagcaatgcctcaagatcaagttactcaatcaccaaaacacagatttgtatttttgtctgatattactaatgaaccaccaaaaatgttacaagaaatgccaaagcatgccaggtgtagagaaggggattccatcattcttgaatgtttaatatctggtgagccccagccagttgtaacatggtttcaaaatggagtccttttaaagcagaaccagaagtttcagtttgaagaagttaattgtagccaccaattatatattaaggatgttaattctcaagattctggaaaatataaatgtgttgctgaaaacaattcaggggcagttgaaagtgtttcagatctaacagtggagcctgtcacttatagagaaaatagtcaattcgaaaatattggtgaaatttatggaaaatattccagagatcagcaactgcaagaccagggagaatctgtaagggcacatttttatgattatccagctggtccctttactccctggacaaatgtaaaagaatattcagtaagggactattttcaaagccttgagactattgagcaaatagaccagaaagagcaggtgcgttgcataccttctagagaaaaaattcccagatttgtgcatggtgcttcaagaaccataaaaatcagcaagcccatcagggctgaattcatacaatgtcaggctgaagggaaagagagacatgtaagtgaaaaatcaaagctgcaccaagcagagggtactgtttatccatttgttgatgatttcagtgatgtcactattaagaaagaaataagaaataattttggaaaacttggtagatcagaaaaggaaaatgtacaagaatgtgcccaaagtgactatttaccaaatattcactctgagagaatttctgacagttacaatacaaaagattcatctgccattgtatatgaagaatcccttggtgaagagatacactacccggggaaaaaggtgaagcatagaattatcgaatttgaaaaattacatgtagaaaaaggagttctagaaaaaagacctaccagaacatcaattgttaatcctcctcaaaagaagattgatgacaaagccttttcattaaagcaaagagaatcaagatcaagcaatctaaatgcaaatatgtatcaggcagagaaaatgtctccaaatactgaatcagattcatctaacattgcaataaatttaaagctgctttcctctcaaactcataaagaatttgacgcacaagaaagggaacaacaggaaaaaataagtcttatagataaacctgcaatttctaaaagagctgaacatgaatcacctattacatttgacttaaagcagtttcacactcaaataaaacacacagatgtgaaattccaagaattagatagtggtcaaccagaagaagcttattttaaaatccaacatcctgctgacactgagaacattgtatttgatctaaaacaaatgtattctcatataggagatccagctctggagttccaagggcaagaaactagggaacagcaggaaatacattataaagaaaaaattcctagccctgaaacgttacaacctgacacacacaatatctctaaaagtgtgcaaaataatgtatttgccagtcaagaaatttcttccagtcaagagctttcaaatagaactatggtggagaaaagtagtattgatgaaaattccatttctttagaaaaagaagtccgacatgtacaggaacaaaacttagacattttaaaaactgatctttctcttaaatccttttctgaagaaatctatagtgaatcatgtgccctacttccaacctcatctgcagatatagaagaaactgatctttctgagaaaagttgtcctctagaaaatggaggcagaagttccatctcacatttgaaaaaagcagcaagtgaggaaaagcctttaggggttggtgaaatggaagaagaatgcactctagaaccagagttggcagcatttccaaagcaggatggtgggacacaggaatatacagatgccactttggaagaccacagaggtgatgttcaggaagctgacacactccatagacagctctccctgagtcagtgcttcccactcttgatgactgaagaacaacagaatccaggtgaacaaataagtacaaacattcatgcctctggagaagaaaaatgttatgaagaagttcaagttcagaatgaagcttctttctccactttagaaggagaaatgatagaaactagtttttctcaaaatattcctaaattagatgaggcacataccactgaggcagcagaatctgagacctccctaacacaatatttacttgctgctggaaagcgtgaggttcctgaaactaaagacaccagagaccaggcaaagcttgtccagagtgaatcaatcacttcaatggaggtggaagaagtaactttcaacactgtgtatgaatactacaaccagaaacaggaatcactaggtcgtccactttctcctgagtctgacatttccattggtgtgggaagtacaaccagtgaagaaatatctgagttagatcagttttataccccaccatcatctgttgaatattttgaatctccaaagtcccctgacttatattttaatccttcagatataactaaacaatcctcaatacattcaggaggtgagacagttgaaagatattccacacctttaggggaagttgctgaaagatattcaacaccttccgaaggtgaggtaggagaaagatactccacacccccaggggagacactagagagatactccacacctccaggagagactctagagagatactccacacccccaggagagactctagagagatattccacacccccaggagagactctggagagatactccacacccccaggagagactctagagcgatattccacacccccaggggaggcactagagagatattctattcctactggaggaccaaaccccactggtacttttaaaacatatccatcaaaaatagaaagggaagacggtacaccaaatgagcatttctacacacctacagaagagaggggttcagcttatgaaatatggcgttccgattcatttggtacacccaatgaagccattgagccaaaagacaatgaaatgcctccatcttttattgaacctctgaccaaaaggaaggtatatgaaaacacaacactaggcttcattgttgaagttgaaggtcttccagttcctggtgtgaaatggtatcgaaataaatctttactagagccagatgaaagaatcaaaatggaaagagtgggtaatgtgtgttcactggaaatttctaacattcaaaaaggagaagggggagagtacatgtgtcatgctgtaaacatcataggggaagcaaagagctttgcaaatgtagacataatgccccaggaagaaagagtggtggcactaccacctccagtaacacatcagcatgtcatggagtttgatttggaacacaccacatcatcaagaacaccttctcctcaagaaattgtcctggaagttgaattaagtgaaaaagacgttaaagaatttgagaagcaggtgaaaatagtgacagttcccgaatttactcctgaccataaaagtatgattgtgagtctagatgttcttccatttaattttgtagatccaaatatggattcaagggagggagaagacaaagaactaaaaattgatttagaagtatttgaaatgcctcctcgctttataatgcctatttgtgattttaaaattccagaaaattcagatgctgtattcaaatgttcagtcatagggatcccgactcccgaagttaagtggtataaagaatatatgtgtattgagccagataatattaaatacgtgattagcgaggagaagggaagtcacactcttaaaattcgaaatgtctgtctttctgatagtgcaacatacaggtgcagagctgtgaattgtgtaggagaggctatctgtcggggattcctcaccatgggagattctgaaatatttgctgtgatagcaaagaaaagcaaagtgactttaagcagtttaatggaagaattggtcttaaagagcaactacacagacagtttttttgaatttcaggtggtggaagggcctcccaggtttatcaaaggtatttctgactgttatgcaccaataggtacagcagcatattttcagtgcttagttcgtggctctccaagacccacggtttactggtacaaagatggaaaattagtccaaggaagaaggttcactgttgaggaaagtggcacagggttccataacctgtttataacaagcttagtaaagagtgatgaaggagagtataggtgtgtagctacaaacaaatcaggaatggctgagagctttgcagcactcaccttaacttaaaatgtaatgttttagtgcctcagtaattattagcattgatctgagtgctttcatattttccaaattatgtggatctaataaacttccaaacaggtccaccatatttgaattcattaccttggagacccctaaagaaataatctctatgtagaaatctcatctttgtaatacatgtaaatattttgttatctgaactgtggaatcatcacttgtgtcaatcatgctgtgtaatatcaaacacaattaaatctctccttggctacct

SEQ ID NO: 300675 - DNA, 436 bp, Artificial Sequence
  derived and/or modified sequence
gaagacacttatcaactggaaattgccgaagcttatccagaagatgaaggaacttacacgtttgttgctagtaatgctgtaggccaagtatcaagcacagccaacctgagtctggaagctcctgaatcaattttgcatgagaggattgaacaagagattgagatggaaatgaaagaattattctctgagggggaatctgaacattcagaaagggatacacgtgacgccttttcagattctgaagacatagaccacaaatccatggctgctaaaagatatgcaagtagaatatcatctacaagctcctggcctgaatattttaagccttcttttacccagaaacttacatttaaatatgttttagagggtgaaccggttgtttttacatgtagattaattgcctgtccaactccagaaatgacttggtttcataaca

SEQ ID NO: 300676 - DNA, 381 bp, Artificial Sequence
  derived and/or modified sequence
atgggcctgcccgcccccagcctgcacgccaccagcaccctgcggcccgatcagttctctccccatacaaatcctagtctcagtttaccttgcctcaaatcttttcctgtatcactgtggccctggggaagggcttctctgctgtgccatctctcacggttgtttgtctgtcaccgtcctctgacaccaacgtcacaggcaccaaatatgttcagctgcgtgtcctcttctctgactctcgccgcttccagcgcctggcccgcctcacatcttccaatttctcactcgcctttcctcccgccgcacctgctcaggagccagctgagcgtgacatcatcacgtgaacccaggctgagcttacctcttcaactaggacaatag

SEQ ID NO: 300677 - protein, 325 aa, Artificial Sequence
  derived and/or modified sequence
MLPRRPLAWPAWLLRGAPGAAGSWGRPVGPLARRGCCSAPGTPEVPLTRERYPVRRLPFSTVSKQDLAAFERIVPGGVVTDPEALQAPNVDWLRTLRGCSKVLLRPRTSEEVSHILRHCHERNLAVNPQGGNTGMVGGSVPVFDEIILSTARMNRVLSFHSVSGILVCQAGCVLEELSRYVEERDFIMPLDLGAKGSCHIGGNVATNAGGLRFLRYGSLHGTVLGLEVVLADGTVLDCLTSLRKDNTGYDLKQLFIGSEGTLGIITTVSILCPPKPRAVNVAFLVTCVPPACGPGSPRPARLPHPALRTPGLRQESLASSCHAHV

SEQ ID NO: 300678 - DNA, 978 bp, Artificial Sequence
  derived and/or modified sequence
atgctgccgagacggcccctggcttggcccgcttggttgctcaggggggccccaggggctgccggctcatggggtaggcctgtcggcccacttgcccgccgtggctgctgttcagccccgggaacccccgaggtgccacttacacgcgaacggtatcccgtgagaaggctacccttttcgaccgtttcaaagcaggatctcgctgccttcgagagaatcgtgcctggaggcgttgtgaccgaccctgaggcactccaggcccctaatgtagactggctgaggacattacggggctgctcaaaagtcttgctgcgaccaagaacaagcgaggaagtatcccatatcttaaggcactgccatgaaagaaacctggccgtgaacccccagggcggtaacactggtatggtgggcggctcggttcctgtgttcgatgaaatcatcctcagcacagctcgcatgaacagagtgctgtccttccactccgtctctggcattctcgtatgccaggcagggtgtgtcttggaagaactgtctaggtacgtagaggaacgggactttattatgccacttgatttaggagccaaagggagctgccacattgggggcaacgtggcaacaaacgcaggtgggctccggttcctgcggtacggatcgttgcacgggaccgtcttgggacttgaggtggtgctggcagatggcactgtcctggactgcctgacatctctccgcaaagacaacaccggctatgatctgaaacagctgttcattggatccgaaggcacactcggaatcataaccaccgtgagcatcctctgtcctcccaagcccagagccgtgaacgttgccttcctggtgacttgtgtgccccctgcctgtggcccaggttcacctcggccagcgaggctgccccatcctgcactgcgcacaccaggtcttagacaagagtccctggcttcttcctgccatgcgcatgtgtag

SEQ ID NO: 300679 - DNA, 978 bp, Artificial Sequence
  derived and/or modified sequence
atgctgccccggcggcccctggcctggccagcctggctgctgcggggggcccctggagctgctggctcctggggccggcctgtgggccccctggcccggcggggctgctgcagcgcccctggcaccccagaggtgcccctgacccgggagcgctaccctgtgcggcggctgcccttcagcacagtgtccaagcaggacctggccgcctttgaaagaattgtgcctggaggagtggtgacagatcctgaggccctgcaggccccaaatgtggactggctgcggaccctgcggggctgcagcaaggtgctgctgcggcccaggaccagcgaggaggtgagccacatcctgcggcactgccacgagaggaacctggccgtgaacccccagggcggcaacacaggcatggtgggcggctctgtgcctgtgtttgatgagatcatcctgagcacagccaggatgaacagagtgctgtccttccacagcgtgtctggcatcctggtgtgccaggccggctgtgtgctggaggagctgagccgctacgtggaggagcgggacttcatcatgcccctggacctgggcgccaagggcagctgccacatcggcggcaatgtggccaccaatgctgggggcctgcgcttcctgcgctatggcagcctgcacggcaccgtgctgggcctggaggtggtgctggctgatggcaccgtgctggactgcctgaccagcctgaggaaggacaacacaggctatgacctgaagcagctgttcatcggcagcgagggcaccctgggcatcatcaccaccgtgtccatcctgtgcccccccaagcccagggctgtgaatgtggccttcctggtgacctgtgtgcccccagcctgtggccctggcagccccaggcctgcccggctgccccacccagccctgcggaccccaggcctgcggcaggagagcctggccagcagctgccacgcccacgtgtag

SEQ ID NO: 300680 - DNA, 978 bp, Artificial Sequence
  derived and/or modified sequence
atgctgccccggcggcccctggcctggcccgcctggctgctgcggggtgctcctggcgctgcggggtcctggggccggccagtgggcccccttgcccgtcggggttgttgtagtgcacctggtacgcctgaggtaccgttgacccgagaaagataccctgtccgccgcctgcctttttccacagtgtccaagcaagacctggccgcattcgagcggatcgtccccggcggagtggtcactgaccctgaggctctacaggcgccaaatgtagattggttaaggaccctgcggggatgctccaaagtgttactgcggccccgaaccagtgaagaagtttcacacatactccgacactgccatgaaagaaatctagctgtgaaccctcaggggggtaatactggaatggtgggcggctcagttcctgtgttcgacgaaatcatactttccactgccagaatgaaccgtgtattgagcttccactcagtctccggcattttagtgtgccaagcaggctgtgtccttgaggaattgtcgcgatacgttgaagagcgggatttcattatgccccttgatttgggcgctaaaggatcttgccatataggcggtaacgtcgccaccaatgctggcgggttacggttcctcaggtatggttccctgcacggcactgtgcttggtctggaagtcgtactggcagacggcaccgtcctcgattgtctgacctctcttcgaaaagacaatacgggctatgacctgaagcagttgtttatcgggtccgagggcaccctgggaataattacgaccgtgtctatcctgtgtcctcccaagcccagggcagtcaacgtcgccttcctggttacctgcgtgcctcctgcttgcggtcccggaagcccgcgacctgccagactgccacaccctgcgctcagaacacctggcctccgccaagagtctctcgcatcgagctgtcatgcacacgtttag

SEQ ID NO: 300681 - DNA, 978 bp, Artificial Sequence
  derived and/or modified sequence
atgttgcctcggaggccgttggcttggcctgcgtggcttttaaggggggctcccggtgcagctgggtcatggggccgtccagtaggccctctcgctaggaggggttgttgctctgccccaggaacacctgaagtgcctctgactagagagcggtaccccgtgcgcagactcccctttagtactgtatccaagcaggacctggctgctttcgaacggatcgtgcctgggggtgtggtcacagaccctgaagcactccaggctccgaatgttgactggctgcggactttgagaggctgtagcaaggtattattacggcctagaacgtccgaggaggtgagccacatactcagacactgccatgagaggaacctcgctgtaaatccccaggggggtaacacgggcatggtggggggtagtgtacccgtgtttgacgagattattctgtcgacagctagaatgaatagggtgctgtcttttcatagtgtcagcggcatcctggtctgtcaggcaggttgcgtactggaggagctgagcagatatgttgaggagcgggattttataatgccgctcgacctgggcgcaaaaggctcctgccatatcgggggaaacgttgcaaccaacgctggcggactgcgattcctgagatatggctccctccacggcaccgttctgggcctggaagtcgtgttggccgacggaactgtgctcgattgtttgaccagcttgcgcaaggacaatacaggctatgatctgaagcagctgttcataggctcagaaggcactctgggcatcataaccacagtatcgatcctgtgtcccccaaagccaagggctgtcaacgtggcgtttctggttacatgtgtaccaccggcttgtggtcccggaagcccacggccagctaggttaccacaccccgcactgaggactcccggattacgccaggaatccctggcctcctcttgccatgctcacgtgtag

SEQ ID NO: 300682 - DNA, 1312 bp, Artificial Sequence
  derived and/or modified sequence
ttcggccgctgggcggagccgtcaatgcgcaggcgcggcgtcgccccgcccactccggctcggcggctctgggcctgcggcgggcgctgcgggttggagctcgggacgtgatcgtgggcgcgcagccagcggctccctgcccttcccctccgggccctgagtaccggccccccaccaaggaggagcccgaggtctccgtcccggcggcgatgctgccccgtcggcctctggcgtggcccgcgtggctgttgcggggtgctccgggagccgcgggttcttggggtcggccggttggccccctggcccgcagaggctgctgctccgccccggggacccccgaggtgccgctgacccgggagcgctaccccgtgcggcgcttgccgttctccacggtgtctaagcaggacctggccgcctttgagcgcatcgtgcccggcggggtcgtcacggacccggaagcgctgcaggctcccaacgtggactggttgcggacgctgcgaggctgtagcaaggtgctgctgaggccacggacgtcggaggaggtgtcccacatcctcaggcactgccacgagaggaacctggccgtgaacccacaggggggcaacacaggcatggtgggtggcagcgtccccgtctttgacgagatcatcctctccactgcccgcatgaaccgggtcctcagcttccacagcgtgtctggaattctggtttgccaggcgggctgcgtcctggaggagctgagccggtatgtggaggaacgggacttcatcatgccgctggacttaggagccaagggcagctgccacatcgggggaaacgtggcaaccaacgctggaggcctgcggtttcttcgatatggctcactgcatgggactgtcctgggcctggaagtggtgctggccgacggcactgtcctggactgcctgacctccctgaggaaggacaacacgggctatgacctgaagcagctgttcatcgggtcggagggcactttggggatcatcaccacggtgtccatcttgtgtccacccaagcccagggctgtgaacgtggctttcctcgtcacctgtgtgccgcccgcctgtggtcctgggagcccgaggccagcccggctgccgcatcctgctcttcgcactccaggtctcagacaggagtcactcgcctcttcgtgccacgcccacgtctaagccgggtggaacaggccctgtgaggatggtcctggtgtccctcgtgctcgtgggctcggtccagctctccagggccccagtcagccctggctcctgctctcctgcagctggggcgacttccgacg

SEQ ID NO: 300683 - DNA, 978 bp, Artificial Sequence
  derived and/or modified sequence
atgctgcccagaagacccctggcctggcccgcctggctgctgagaggcgcccccggcgccgccggcagctggggcagacccgtgggccccctggccagaagaggctgctgcagcgcccccggcacccccgaggtgcccctgaccagagagagataccccgtgagaagactgcccttcagcaccgtgagcaagcaggacctggccgccttcgagagaatcgtgcccggcggcgtggtgaccgaccccgaggccctgcaggcccccaacgtggactggctgagaaccctgagaggctgcagcaaggtgctgctgagacccagaaccagcgaggaggtgagccacatcctgagacactgccacgagagaaacctggccgtgaacccccagggcggcaacaccggcatggtgggcggcagcgtgcccgtgttcgacgagatcatcctgagcaccgccagaatgaacagagtgctgagcttccacagcgtgagcggcatcctggtgtgccaggccggctgcgtgctggaggagctgagcagatacgtggaggagagagacttcatcatgcccctggacctgggcgccaagggcagctgccacatcggcggcaacgtggccaccaacgccggcggcctgagattcctgagatacggcagcctgcacggcaccgtgctgggcctggaggtggtgctggccgacggcaccgtgctggactgcctgaccagcctgagaaaggacaacaccggctacgacctgaagcagctgttcatcggcagcgagggcaccctgggcatcatcaccaccgtgagcatcctgtgcccccccaagcccagagccgtgaacgtggccttcctggtgacctgcgtgccccccgcctgcggccccggcagccccagacccgccagactgccccaccccgccctgagaacccccggcctgagacaggagagcctggccagcagctgccacgcccacgtgtag

SEQ ID NO: 300684 - protein, 319 aa, Artificial Sequence
  derived and/or modified sequence
MLPRRPLAWPAWLLRGAPGAAGSWGRPVGPLARRGCCSAPGTPEVPLTRERYPVRRLPFSTVSKQDLAAFERIVPGGVVTDPEALQAPNVDWLRTLRGCSKVLLRPRTSEEVSHILRHCHERNLAVNPQGGNTGMVGGSVPVFDEIILSTARMNRVLSFHSVSGILVCQAGCVLEELSRYVEERDFIMPLDLGAKGSCHIGGNVATNAGGLRFLRYGSLHGTVLGLEVVLADGTVLDCLTSLRKDNTGYDLKQLFIGSEGTLGIITTVSILCPPKPRAVNVAFLVTCVPPACGPGSPRPARLPHPALRTPGVCPQPLRL

SEQ ID NO: 300685 - DNA, 960 bp, Artificial Sequence
  derived and/or modified sequence
atgctgccacgcaggccgctggcttggcccgcttggttgttgcggggagcgccaggagctgcaggaagctggggtcgtccggtgggccccctagcccgccgcggttgctgtagcgcccccgggactccggaagtaccccttacccgggaacgatacccagtgaggcgtctgccattttcaactgtgtctaaacaagacttggctgcttttgaaaggattgtcccaggcggtgtagtgaccgaccctgaggccttgcaggctcccaatgttgattggctgaggaccttgcggggctgctccaaggtcctgctccgccctagaaccagtgaagaagtatctcacatcctgcgccactgccacgagcgcaacctcgctgtcaatcctcagggagggaatacaggcatggtcggcgggagcgtccccgttttcgacgagattattctgagtaccgcacgtatgaatagggttctcagcttccattctgtatctggcatcctcgtgtgtcaggcggggtgcgtcctggaggagctttctaggtatgtcgaggagagggatttcattatgcccctggatttgggcgcaaagggtagttgccatatcgggggcaatgtagcaacgaatgccggcggccttaggttcctgcgatacggaagtcttcatgggaccgtcctcggcctagaagttgtgctagccgacggaactgtcttggattgcctcactagtcttaggaaagataatactgggtacgacttgaaacaactgttcatcggttcagaaggtaccctgggcattattacaacagtttccatactctgtccacctaaaccccgggccgtgaatgtagctttcttagttacttgcgtgcctcctgcctgcggaccaggcagtccaagacctgcccgcctgcctcaccccgctcttagaactcccggggtgtgcccgcagcccctgcgcctctag

SEQ ID NO: 300686 - DNA, 960 bp, Artificial Sequence
  derived and/or modified sequence
atgctgccccggcggcccctggcctggccagcctggctgctgcggggggcccctggagctgctggctcctggggccggcctgtgggccccctggcccggcggggctgctgcagcgcccctggcaccccagaggtgcccctgacccgggagcgctaccctgtgcggcggctgcccttcagcacagtgtccaagcaggacctggccgcctttgaaagaattgtgcctggaggagtggtgacagatcctgaggccctgcaggccccaaatgtggactggctgcggaccctgcggggctgcagcaaggtgctgctgcggcccaggaccagcgaggaggtgagccacatcctgcggcactgccacgagaggaacctggccgtgaacccccagggcggcaacacaggcatggtgggcggctctgtgcctgtgtttgatgagatcatcctgagcacagccaggatgaacagagtgctgtccttccacagcgtgtctggcatcctggtgtgccaggccggctgtgtgctggaggagctgagccgctacgtggaggagcgggacttcatcatgcccctggacctgggcgccaagggcagctgccacatcggcggcaatgtggccaccaatgctgggggcctgcgcttcctgcgctatggcagcctgcacggcaccgtgctgggcctggaggtggtgctggctgatggcaccgtgctggactgcctgaccagcctgaggaaggacaacacaggctatgacctgaagcagctgttcatcggcagcgagggcaccctgggcatcatcaccaccgtgtccatcctgtgcccccccaagcccagggctgtgaatgtggccttcctggtgacctgtgtgcccccagcctgtggccctggcagccccaggcctgcccggctgccccacccagccctgcggaccccaggagtgtgcccccagcccctgcggctgtag

SEQ ID NO: 300687 - DNA, 960 bp, Artificial Sequence
  derived and/or modified sequence
atgctgccccggcggcccctggcctggcccgcctggctgctgcggggagctcccggcgctgccggatcttggggccgccctgtcggaccgctcgcccggcgaggctgttgctccgcgccaggcacacccgaagttccactgactagagagagatatcccgtacggaggttacccttcagcactgtatccaaacaggacctagccgccttcgaacgaattgtgccaggcggtgtggtgaccgacccagaggccttgcaggctcccaatgttgactggctgagaactctgcgcggttgcagcaaggtgctgctgcggccacgtacctccgaagaggtgtcccacatcctgaggcactgccacgagagaaatctggccgttaacccgcaaggggggaacaccggaatggtgggcggcagcgttccagtgttcgacgagataatcctctcaactgcacgtatgaaccgagtcctgagtttccattccgtctctggtattctcgtgtgccaggcggggtgcgtactcgaggagctctcccgatacgtggaagagcgtgatttcataatgccccttgacctgggcgctaaaggatcctgtcatattggcggaaatgtggccactaatgccggagggctaaggtttttgcgttacgggtccctacatggcaccgtcctcgggctggaggtcgtgcttgcagacggaaccgtactcgattgtcttacgagcctgagaaaagataatactgggtacgacttaaagcaactattcattggttctgagggaaccttaggtatcataactacagtgagtattctctgtccgccaaaaccacgggcagtcaatgtcgcctttctcgtgacctgcgtcccccccgcctgcgggccaggatcccctagaccagcacgtctgccgcaccctgcattgcggacaccaggcgtgtgcccgcagcctctcaggctttag

SEQ ID NO: 300688 - DNA, 960 bp, Artificial Sequence
  derived and/or modified sequence
atgctgcccagaagaccactggcgtggccagcctggctcctgcgcggagctccaggcgcagccggatcctgggggagacctgtgggtcccctggctaggagaggctgttgtagcgcgccaggaacacccgaagtgccactcacgcgtgaacgctacccagtgaggcgactgccattttctacagtgtctaagcaggacctagcagctttcgaaaggatcgttcccggtggggtggttacagatcccgaggctctgcaagcccctaacgtggattggctgcgaacccttcggggttgcagcaaagtgctattgcgacccagaacttccgaagaagtgtcacatattttgcggcactgccacgagcggaacctggcagtcaaccctcaggggggtaacaccgggatggtgggtggcagcgtcccagtattcgatgaaattatactgagtacagctcggatgaacagggtcttgtctttccactctgtcagcggcattttggtgtgtcaggcaggatgcgtgctggaggagctttcccgatatgtggaggagagagattttatcatgcctctcgacctgggagctaaagggagttgccacatcggaggaaacgtagccaccaacgctggaggtctcagattcctgcgttatgggtccctccacggcaccgtgctggggctggaggttgtgcttgcagacggcactgtgctggattgcctgacatctctgcgaaaagacaatactggatacgatttgaaacagctgttcattggttcagagggcacgcttgggattatcaccaccgtttcgattctgtgccctccaaaacccagggccgtaaatgtggcattcctagtcacctgcgttcctccagcttgtggaccaggaagccctcggcctgctcgccttcctcacccagctctgcggacgcccggtgtgtgtcctcaacccctaaggctgtag

SEQ ID NO: 300689 - DNA, 1118 bp, Artificial Sequence
  derived and/or modified sequence
actccggctcggcggctctgggcctgcggcgggcgctgcgggttggagctcgggacgtgatcgtgggcgcgcagccagcggctccctgcccttcccctccgggccctgagtaccggccccccaccaaggaggagcccgaggtctccgtcccggcggcgatgctgccccgtcggcctctggcgtggcccgcgtggctgttgcggggtgctccgggagccgcgggttcttggggtcggccggttggccccctggcccgcagaggctgctgctccgccccggggacccccgaggtgccgctgacccgggagcgctaccccgtgcggcgcttgccgttctccacggtgtctaagcaggacctggccgcctttgagcgcatcgtgcccggcggggtcgtcacggacccggaagcgctgcaggctcccaacgtggactggttgcggacgctgcgaggctgtagcaaggtgctgctgaggccacggacgtcggaggaggtgtcccacatcctcaggcactgccacgagaggaacctggccgtgaacccacaggggggcaacacaggcatggtgggtggcagcgtccccgtctttgacgagatcatcctctccactgcccgcatgaaccgggtcctcagcttccacagcgtgtctggaattctggtttgccaggcgggctgcgtcctggaggagctgagccggtatgtggaggaacgggacttcatcatgccgctggacttaggagccaagggcagctgccacatcgggggaaacgtggcaaccaacgctggaggcctgcggtttcttcgatatggctcactgcatgggactgtcctgggcctggaagtggtgctggccgacggcactgtcctggactgcctgacctccctgaggaaggacaacacgggctatgacctgaagcagctgttcatcgggtcggagggcactttggggatcatcaccacggtgtccatcttgtgtccacccaagcccagggctgtgaacgtggctttcctcgtcacctgtgtgccgcccgcctgtggtcctgggagcccgaggccagcccggctgccgcatcctgctcttcgcactccaggtgtctgcccccagcctctgcgcctgtga

SEQ ID NO: 300690 - DNA, 960 bp, Artificial Sequence
  derived and/or modified sequence
atgctgcccagaagacccctggcctggcccgcctggctgctgagaggcgcccccggcgccgccggcagctggggcagacccgtgggccccctggccagaagaggctgctgcagcgcccccggcacccccgaggtgcccctgaccagagagagataccccgtgagaagactgcccttcagcaccgtgagcaagcaggacctggccgccttcgagagaatcgtgcccggcggcgtggtgaccgaccccgaggccctgcaggcccccaacgtggactggctgagaaccctgagaggctgcagcaaggtgctgctgagacccagaaccagcgaggaggtgagccacatcctgagacactgccacgagagaaacctggccgtgaacccccagggcggcaacaccggcatggtgggcggcagcgtgcccgtgttcgacgagatcatcctgagcaccgccagaatgaacagagtgctgagcttccacagcgtgagcggcatcctggtgtgccaggccggctgcgtgctggaggagctgagcagatacgtggaggagagagacttcatcatgcccctggacctgggcgccaagggcagctgccacatcggcggcaacgtggccaccaacgccggcggcctgagattcctgagatacggcagcctgcacggcaccgtgctgggcctggaggtggtgctggccgacggcaccgtgctggactgcctgaccagcctgagaaaggacaacaccggctacgacctgaagcagctgttcatcggcagcgagggcaccctgggcatcatcaccaccgtgagcatcctgtgcccccccaagcccagagccgtgaacgtggccttcctggtgacctgcgtgccccccgcctgcggccccggcagccccagacccgccagactgccccaccccgccctgagaacccccggcgtgtgcccccagcccctgagactgtag

SEQ ID NO: 300691 - protein, 586 aa, Artificial Sequence
  derived and/or modified sequence
MAEGVPASPSSGEGSRGPHSGVIQWLVDNFCICEECSVPRCLMYEIYVETCGQNTENQVNPATFGKLVRLVFPDLGTRRLGTRGSARYHYDGICIKKSSFFYAQYCYLIGEKRYHSGDAIAFEKSTNYNSIIQQEATCEDHSPMKTDPVGSPLSEFRRCPFLEQEQAKKYSCNMMAFLADEYCNYCRDILRNVEDLLTSFWKSLQQDTVMLMSLPDVCQLFKCYDVQLYKGIEDVLLHDFLEDVSIQYLKSVQLFSKKFKLWLLNALEGVPALLQISKLKEVTLFVKRLRRKTYLSNMAKTMRMVLKSKRRVSVLKSDLQAIINQGTLATSKKALASDRSGADELENNPEMKCLRNLISLLGTSTDLRVFLSCLSSHLQAFVFQTSRSKEEFTKLAASFQLRWNLLLTAVSKAMTLCHRDSFGSWHLFHLLLLEYMIHILQSCLEEEEEEEDMGTVKEMLPDDPTLGQPDQALFHSLNSSLSQACASPSMEPLGVMPTHMGQGRYPVGVSNMVLRILGFLVDTAMGNKLIQVLLEDETTESAVKLSLPMGQEALITLKDGQQFVIQISDVPQSSEDIYFRENNANV

SEQ ID NO: 300692 - DNA, 1761 bp, Artificial Sequence
  derived and/or modified sequence
atggcggagggagtaccagcctcccctagctcaggcgaaggatccagaggtccccacagcggtgtgatccagtggctggttgacaatttctgtatttgcgaggagtgcagcgtgcctcgatgcctaatgtatgaaatttatgtcgaaacatgcggacagaacactgagaaccaggttaaccccgccacgttcggcaagctggtgagacttgtattccctgatctggggactcggcgtttagggacacgcggctcagcaagatatcattacgatggtatttgcatcaagaagtctagctttttctacgcgcagtactgctacctgattggggagaaaaggtatcactctggagacgccattgccttcgagaagagtactaactacaactctataatccaacaagaagccacatgtgaagaccattctccaatgaagacagatccagtgggaagccctctgtctgaattccgacgctgcccattcctggagcaagagcaagccaagaagtactcctgtaacatgatggcgtttctagccgacgagtactgtaattactgcagggacattttacgcaatgtcgaggacctgctcaccagcttttggaagagcctgcagcaggataccgtgatgctgatgtcgctccctgacgtgtgccaactgttcaagtgctatgatgttcagctctataagggcatagaggacgtactgctccacgattttctggaagacgtaagtatccagtatttgaaatctgtgcaactgtttagcaaaaaattcaagctttggctgctgaacgccttagaaggtgttccagcccttctccagataagtaagttgaaggaagtgactctcttcgtaaagcggctgcggagaaagacatacttatccaacatggcgaagacaatgcgcatggtgcttaaaagcaaaaggcgagttagcgtactgaagagtgacttgcaggcgatcatcaaccaggggactctggccacgtcaaaaaaagcactagctagtgaccgttcaggagccgatgagctggagaacaacccagagatgaaatgtctccgtaatttgatcagccttctggggactagcaccgatctgagagtctttctcagctgtctcagctcacacctccaagcctttgtttttcaaacctctcgcagcaaagaggagtttactaagcttgccgcgagctttcaactgcgttggaatctactgctgaccgcagtgagcaaggctatgaccctgtgtcatcgggactcctttggatcctggcacctcttccaccttctcttacttgagtacatgatacacatcctccagtcttgcctggaggaagaagaagaggaagaagatatggggacagttaaggaaatgttgcccgatgacccaacgctgggtcaaccggaccaagccctgtttcacagcctaaattcaagcctctcacaggcatgtgcctcgccatctatggaaccccttggcgttatgcctacgcacatgggtcagggtaggtaccccgtgggggtcagtaatatggttcttcggatcctgggcttccttgtcgatacggctatgggcaacaagctcatacaggttctcctagaggacgagaccaccgagtctgctgtcaaactgtcgctacccatgggacaggaagccttaattacactcaaagatggtcagcaattcgtgattcagatatcagacgtgccacaaagctcggaagatatctatttccgagagaataatgccaacgtatag

SEQ ID NO: 300693 - DNA, 1761 bp, Artificial Sequence
  derived and/or modified sequence
atggccgagggcgtgcctgccagccccagcagtggagagggcagccggggcccccacagcggggtcatccagtggctggtggacaacttctgcatctgtgaagaatgttctgtgccccgctgcctgatgtatgagatctacgtggagacctgtggccagaacacagagaaccaggtgaacccagccaccttcggcaagctggtgcggctggtgtttcctgacctgggcacccggcggctgggcacccggggcagcgcccgctaccactatgatggcatctgcatcaagaagagcagcttcttctacgcccagtactgctacctgattggagagaagcgctaccacagcggagatgccatcgcctttgagaagagcaccaactacaacagcatcatccagcaggaggccacctgtgaggaccacagccccatgaagacagatcctgtgggcagccccctgtctgagttccgccgctgccccttcctggagcaggagcaggccaagaagtacagctgcaacatgatggccttcctggctgatgagtactgcaactactgccgggacatcctgagaaatgtggaggacctgctgaccagcttctggaagagcctgcagcaggacacagtgatgctgatgagcctgcctgatgtgtgccagctgttcaagtgctatgatgtgcagctgtacaagggcattgaagatgtgctgctgcatgacttcctggaggatgtgtccatccagtacctgaagtctgtgcagctgttcagcaagaagttcaagctgtggctgctgaatgccctggagggcgtgcctgccctgctgcagatcagcaagctgaaggaggtgaccctgtttgtgaagaggctgcggaggaagacctacctgagcaacatggccaagaccatgaggatggtgctgaagagcaagagaagagtgtctgtgctgaagagtgacctgcaggccatcatcaaccagggcaccctggccaccagcaagaaggccctggccagtgacagaagtggagcagatgagctggagaacaaccctgagatgaagtgcctgaggaacctgatcagcctgctgggcaccagcacagacctgcgggtcttcctgagctgcctgagcagccacctgcaggcctttgtgttccagaccagccgcagcaaggaggagttcaccaagctggccgccagcttccagctgcgctggaacctgctgctgacagctgtgtccaaggccatgaccctgtgccaccgggacagctttggctcctggcacctgttccacctgctgctgctggagtacatgatccacatcctgcagagctgcctggaggaggaggaggaggaggaggacatgggcaccgtgaaggagatgctgcctgatgaccccaccctgggccagcctgaccaggccctcttccacagcctgaacagcagcctgagccaggcctgtgccagccccagcatggagcccctgggcgtgatgcccacccacatgggccagggccgctaccctgtgggcgtgagcaacatggtgctgcgcatcctgggcttcctggtggacacagccatgggcaacaagctgatccaggtgctgctggaggatgagaccacagaatctgctgtgaagctgagcctgcccatgggccaggaggccctgatcaccctgaaggatggccagcagtttgtgatccagatcagtgatgtgccccagagcagcgaggacatctacttcagagaaaataatgccaacgtgtag

SEQ ID NO: 300694 - DNA, 1948 bp, Artificial Sequence
  derived and/or modified sequence
atggccgagggggtgccggcctcgccgtcgagcggcgagggtagccggggcccgcacagcggcgtcatccagtggttggtcgacaacttctgcatttgcgaagagtgcagcgtccctcgctgtctcatgtatgagatttacgtggagacctgtgggcaaaacactgagaaccaagtcaacccggccacctttgggaagcttgtgagattggtttttccggaccttggcacccggaggctgggcactagaggaagtgccaggtatcattatgatggaatctgtatcaagaaaagctctttcttctatgcccagtattgctacctgataggtgaaaaaaggtatcacagtggagatgccattgcctttgaaaaatctactaattataacagcattatccaacaagaagcaacatgtgaagatcattcaccgatgaagacagacccagttggatcccctttgtctgaattcaggagatgtccatttctggagcaagaacaggcaaagaaatactcctgtaatatgatggccttccttgctgacgaatactgcaactattgtcgagacattttacgaaatgtggaggacttgcttacttccttctggaagtctctgcagcaagacacagtcatgctgatgtcattgcctgacgtgtgccagctctttaaatgctacgacgtccagctgtacaagggaattgaggatgttctccttcatgacttcttggaagatgtttctattcagtacctgaaatctgtgcagttatttagtaagaaatttaagctgtggctccttaatgctttggaaggtgttccagccctcttgcagatctccaaactcaaagaagttactctatttgtcaaaagactaagaagaaagacgtacctttccaacatggctaagactatgcgaatggtattgaaaagtaagaggcgtgtcagcgttttgaagtcagatctacaggccatcatcaatcaaggcactttggctacttctaagaaagccctggcaagtgaccggagtggcgcagatgaactggagaacaacccagagatgaaatgtttaagaaacttaatttctttgctgggaacatcaacagatctcagggtattcctcagctgtctgtcttcacatctccaagcatttgtgttccagacaagcagaagcaaagaagagtttaccaaattggccgccagcttccagctgagatggaatcttcttctcactgctgtaagcaaagccatgaccctctgccacagagatagttttggctcctggcatctgtttcacttgttgcttttggaatatatgattcatatacttcagtcatgcctagaggaggaagaggaggaggaggacatggggactgtcaaggaaatgctaccagatgacccgactctcggccagccagaccaggcacttttccattctctgaattcctcactgtcgcaggcgtgtgccagccccagcatggagccactgggggtgatgcccacacacatgggccagggccgatatcccgtgggtgtgagcaacatggtcctcaggatcctgggcttcctggtggacactgccatgggcaataagctcatccaggtgctgttggaagatgaaaccactgaaagcgcagttaaactcagccttcctatgggacaagaagccctcataaccctaaaagatggacaacaatttgtgattcagatatcagatgtaccccaaagctctgaagatatttatttcagagaaaacaatgctaatgtgtgagattatttatttgaatagagaataagaaaactgatagacttgcattcttaaaaatattaaatactaaagtttttctattgacgaaagatgatgttatgtatataatagatgtagcattgtctattttatgtttatatgtatttcaaggaggtggtttcgataaaatatgtaaactgatttggagaat

SEQ ID NO: 300695 - DNA, 1761 bp, Artificial Sequence
  derived and/or modified sequence
atggccgagggcgtgcccgccagccccagcagcggcgagggcagccggggcccccacagtggcgttattcagtggttggtagataatttttgtatatgtgaggagtgcagcgtcccccgatgtctgatgtacgagatttacgtggagacttgtggacagaacactgaaaaccaagtgaatccagcaacttttggcaagctggttcgacttgtatttcccgatctgggaacaaggcgtctggggacgcggggatccgctcgctaccactacgacggcatatgcatcaaaaaaagctctttcttttacgcccagtattgctaccttataggggagaaaagatatcactctggagacgccatcgcattcgagaaatccaccaattataactcaatcatccagcaggaagctacttgcgaggaccattcacctatgaaaacggaccccgttgggtcacctttatctgaattcaggagatgtccgttcttagaacaagagcaggctaaaaagtactcctgcaacatgatggccttcctggccgatgaatactgcaactattgtcgcgacatcctgcggaacgttgaagacttactcacgagcttctggaagagtctacagcaggacacagtcatgctcatgtccttgcccgacgtttgtcagctcttcaagtgctacgatgtgcagttgtacaagggaattgaggacgttttacttcacgacttcctggaggatgtaagcattcagtaccttaaatccgtgcagctgtttagcaagaagttcaagctgtggctgctcaatgcactcgaaggagtgcccgccctcctccagatttctaaactaaaggaggtgacacttttcgtgaagcgtctccgccgaaagacctacctttcgaatatggctaaaaccatgcgaatggtgctgaagtccaagcggcgcgtaagcgtgctgaagagcgacttgcaggccattataaatcagggtaccttggctaccagcaagaaagctctggcaagcgatcgatccggggcggatgagctggaaaacaatcctgagatgaaatgcttgagaaacctcatctcactgttgggaacatctaccgatttgagggtgtttctttcctgcctgagcagccatctccaagccttcgtcttccagacaagccgtagcaaggaagaatttacaaagctcgcggcaagctttcagctccggtggaacctcctgttaaccgctgtgtccaaagccatgaccctgtgccatcgtgactctttcgggtcatggcatctgttccaccttcttttgctggagtacatgatacacatcctgcagtcgtgtcttgaagaggaagaggaagaagaggacatgggaaccgtcaaggaaatgttgcctgacgatcccactctgggacaaccagatcaggcgctgtttcacagcctgaacagctctctcagtcaggcctgtgcaagtccctccatggagcctctgggagtgatgccaactcacatgggtcagggacggtaccctgtgggcgttagcaatatggtccttagaatacttggatttctagtggacaccgccatggggaacaagctcatacaggtactcctcgaggatgagacaacagaatcagctgtcaagctatccctgcctatgggccaagaggccctaatcactctgaaagatggccagcagttcgtgatccagattagcgatgtaccgcaatccagtgaagacatatacttccgggagaacaatgccaacgtgtag

SEQ ID NO: 300696 - DNA, 1761 bp, Artificial Sequence
  derived and/or modified sequence
atggccgagggggtacccgcttccccatctagtggagagggttctcgcggtccccactctggagtaattcagtggctggtggataacttctgcatatgcgaagagtgttcggtgcctaggtgtctgatgtacgagatatacgttgagacatgcggccagaacaccgagaatcaagtgaacccagccactttcggaaaactggtccggttagtgttccctgaccttggcacgcgaaggttaggtacaaggggtagtgcgagataccactatgacggaatatgtattaagaagtccagttttttctatgcccaatactgttacctaatcggagaaaagcgatatcactcaggcgacgcgatcgccttcgaaaagtccacaaattataattccattattcagcaagaagctacctgtgaagatcacagtcccatgaagacagacccggtgggctcacctttgagcgagttcagacgctgtcctttcttagagcaggagcaagccaaaaagtatagttgcaacatgatggcttttctggcggacgagtactgcaactattgccgcgatatcttacgcaacgttgaggaccttttgacctcattctggaagagtttgcagcaggacacagtgatgctgatgagcctgcccgatgtctgccagctctttaagtgctatgatgtgcagttgtacaaggggattgaagacgtattactgcacgacttcctggaagatgtttccatccagtatctgaagtccgtccagctgttctccaaaaaatttaagctttggctcctgaacgccttggagggggtgcccgcacttcttcagatcagcaagcttaaggaagttactctgtttgtgaagcggctcaggcggaagacttatctgagtaacatggccaagaccatgcgcatggtgctgaaaagtaagagacgggtgtccgtgctcaagagcgacctgcaggcaattatcaaccagggtacccttgctacaagcaagaaggccctggcgagcgacaggagtggcgctgatgagttggagaataatcctgagatgaagtgcctgcgaaacctgatctcactactggggacctccactgatctcagagtgtttctcagctgtctctcatcacacctgcaagcattcgtttttcagacctcgagatctaaggaggagtttaccaaactcgctgcctcttttcaactgaggtggaacctcctgttgactgccgtctctaaggccatgaccctttgtcatagggactccttcggctcctggcacctgtttcatctgctcctgctcgagtacatgattcacattctccagtcttgcctcgaggaggaggaggaggaagaagacatgggcactgttaaggaaatgttgccagacgacccgacacttggtcagcccgaccaggccctgtttcactcccttaactcctccttgtcccaagcctgcgcctcaccctctatggagccgttgggggtcatgcctacgcatatgggacaaggaagatacccagtaggtgtatcaaacatggtgctgagaattctgggctttcttgttgacacagccatgggtaacaaattgatacaggttctgttagaagatgagacaactgagtcagcggttaaactgtccctgcctatgggccaggaggccctcattacattaaaggatggccaacaattcgtgatacaaatcagcgacgtgccgcagtcgtccgaagacatctactttagagagaataatgcgaacgtgtag

SEQ ID NO: 300697 - DNA, 1761 bp, Artificial Sequence
  derived and/or modified sequence
atggccgagggcgtgcccgccagccccagcagcggcgagggcagcagaggcccccacagcggcgtgatccagtggctggtggacaacttctgcatctgcgaggagtgcagcgtgcccagatgcctgatgtacgagatctacgtggagacctgcggccagaacaccgagaaccaggtgaaccccgccaccttcggcaagctggtgagactggtgttccccgacctgggcaccagaagactgggcaccagaggcagcgccagataccactacgacggcatctgcatcaagaagagcagcttcttctacgcccagtactgctacctgatcggcgagaagagataccacagcggcgacgccatcgccttcgagaagagcaccaactacaacagcatcatccagcaggaggccacctgcgaggaccacagccccatgaagaccgaccccgtgggcagccccctgagcgagttcagaagatgccccttcctggagcaggagcaggccaagaagtacagctgcaacatgatggccttcctggccgacgagtactgcaactactgcagagacatcctgagaaacgtggaggacctgctgaccagcttctggaagagcctgcagcaggacaccgtgatgctgatgagcctgcccgacgtgtgccagctgttcaagtgctacgacgtgcagctgtacaagggcatcgaggacgtgctgctgcacgacttcctggaggacgtgagcatccagtacctgaagagcgtgcagctgttcagcaagaagttcaagctgtggctgctgaacgccctggagggcgtgcccgccctgctgcagatcagcaagctgaaggaggtgaccctgttcgtgaagagactgagaagaaagacctacctgagcaacatggccaagaccatgagaatggtgctgaagagcaagagaagagtgagcgtgctgaagagcgacctgcaggccatcatcaaccagggcaccctggccaccagcaagaaggccctggccagcgacagaagcggcgccgacgagctggagaacaaccccgagatgaagtgcctgagaaacctgatcagcctgctgggcaccagcaccgacctgagagtgttcctgagctgcctgagcagccacctgcaggccttcgtgttccagaccagcagaagcaaggaggagttcaccaagctggccgccagcttccagctgagatggaacctgctgctgaccgccgtgagcaaggccatgaccctgtgccacagagacagcttcggcagctggcacctgttccacctgctgctgctggagtacatgatccacatcctgcagagctgcctggaggaggaggaggaggaggaggacatgggcaccgtgaaggagatgctgcccgacgaccccaccctgggccagcccgaccaggccctgttccacagcctgaacagcagcctgagccaggcctgcgccagccccagcatggagcccctgggcgtgatgcccacccacatgggccagggcagataccccgtgggcgtgagcaacatggtgctgagaatcctgggcttcctggtggacaccgccatgggcaacaagctgatccaggtgctgctggaggacgagaccaccgagagcgccgtgaagctgagcctgcccatgggccaggaggccctgatcaccctgaaggacggccagcagttcgtgatccagatcagcgacgtgccccagagcagcgaggacatctacttcagagagaacaacgccaacgtgtag

SEQ ID NO: 300698 - DNA, 4065 bp, Artificial Sequence
  derived and/or modified sequence
gggaacaaacttcagaaggaggagagacaccgggcccagggcaccctcgcgggcggacccaagcagtgagggcctgcagccggccggccagggcagcggcaggcgcggcccggacctacgggaggaagccccgagccctcggcgggctgcgagcgactccccggcgatgcctcacaactccatcagatctggccatggagggctgaaccagctgggaggggcctttgtgaatggcagacctctgccggaagtggtccgccagcgcatcgtagacctggcccaccagggtgtaaggccctgcgacatctctcgccagctccgcgtcagccatggctgcgtcagcaagatccttggcaggtactacgagactggcagcatccggcctggagtgatagggggctccaagcccaaggtggccacccccaaggtggtggagaagattggggactacaaacgccagaaccctaccatgtttgcctgggagatccgagaccggctcctggctgagggcgtctgtgacaatgacactgtgcccagtgtcagctccattaatagaatcatccggaccaaagtgcagcaaccattcaacctccctatggacagctgcgtggccaccaagtccctgagtcccggacacacgctgatccccagctcagctgtaactcccccggagtcaccccagtcggattccctgggctccacctactccatcaatgggctcctgggcatcgctcagcctggcagcgacaagaggaaaatggatgacagtgatcaggatagctgccgactaagcattgactcacagagcagcagcagcggaccccgaaagcaccttcgcacggatgccttcagccagcaccacctcgagccgctcgagtgcccatttgagcggcagcactacccagaggcctatgcctcccccagccacaccaaaggcgagcagggcctctacccgctgcccttgctcaacagcaccctggacgacgggaaggccaccctgaccccttccaacacgccactggggcgcaacctctcgactcaccagacctaccccgtggtggcagatcctcactcacccttcgccataaagcaggaaacccccgaggtgtccagttctagctccaccccttcctctttatctagctccgcctttttggatctgcagcaagtcggctccggggtcccgcccttcaatgcctttccccatgctgcctccgtgtacgggcagttcacgggccaggccctcctctcagggcgagagatggtggggcccacgctgcccggatacccaccccacatccccaccagcggacagggcagctatgcctcctctgccatcgcaggcatggtggcaggaagtgaatactctggcaatgcctatggccacaccccctactcctcctacagcgaggcctggcgcttccccaactccagcttgctgagttccccatattattacagttccacatcaaggccgagtgcaccgcccaccactgccacggcctttgaccatctgtagttgccatggggacagtgggagcgactgagcaacaggaggactcagcctgggacaggccccagagagtcacacaaaggaatctttatttattacatgaaaaataaccacaagtccagcattgcggcacactccctgtgtggttaatttaatgaaccatgaaagacaggatgaccttggacaaggccaaactgtcctccaagactccttaatgaggggcaggagtcccagggaaagagaaccatgccatgctgaaaaagacaaaattgaagaagaaatgtagcccccagccggtacccaccaaaggagagaagaagcaatagccgaggaacttggggggatggcgaatggttcctgcccgggcccaaggggtgcacagggcacctccatggctccattattaacacaactctagcaattatggaccataagcacttccctccagcccacaagtcacagcctggtgccgaggctctcctcaccagccacccagggagtcacctccctcagcctcccgcctgccccacacggaggctctggctgtcctctttctccactccatttgcttggctctttctacacctccctcttgggcatgggctgagggctggagcgagtccctcagaaattccaccaggctgtcagctgacctcttttgcctgctgctgtgaaggtatagcaccaccccaggtcctcctgcagtgcggcatccccttggcagctgccgtcagccaggccagccccagggagcttaaaacagacattccacagggcctgggcccctgggaggtgaggtgtggtgtgcggcttcacccagggcagaacaaggcagaatcgcaggaaacccgcttccccttcctgacagctcctgccaagccaaatgtgcttcctgcagctcacgcccaccagctactgaagggacccaaggcaccccctgaagccagcgatagagggtccctctctgctccccagcagctcctgcccccaaggcctgactgtatatactgtaaatgaaactttgtttgggtcaagcttccttctttctaacccccagactttggcctctgagtgaaatgtctctctttgccctgtggggcttctctccttgatgcttctttctttttttaaagacaacctgccattaccacatgactcaataaaccattgctcttcatctcaggctttggggttggctggggaaggaggcatcccggggctgggctttctcccaagaacatcagagctgagtagccgacaaactcactttggggccgtgggctggaagggaccatctgatgccccagagctctggcttggccttctccctctgcctttaattcacgttgaacgctgggtacctcactcatcccaagttcttcaacactgagcaaatgcaaggatagcacagtactgagccaaccatagactccccacaaggagttgctgttgttattaacaggaagccagagaatcagcagggtgggttagtgagggatccgggaatagctgtgactggagcctgcataaacagctctgaagggagagagaagactgggctctcttgtgtgccaggcacagtatggaaggcttcatataagttaagctgaaattagccctgttttacatacagcttcattttacatatgaggaaactgaggctttgaaaaaaatgagatgtcttgtccaagatgaaaagtagtagattcaaccaagtcctcttactctaagcccaacgcttttacccaaaaccccagagtcctcatcagggatgccaaatggttctagacccagtggaggttctggagctgccactggggatttaatttcttttgatttgctaaagatttgacctgactgaatggagaggtagagtgtagtgtggccaggacaaggtgagggaggctgtagagacttagcactttaggccaaccacctccaggaaatctgggaaatgcaatgtgacagctcgggctctgcactccagggggctgtctggtgtccacatggaccttctccatgtgggacacagctggaacaagggggcaggggcctgcagctgggatgcccaggtgaatatgggcagctggacaaacaacactgggattgagtcagatagaaggggcccaaggactccagggctgggaggacagaggctgggagagagggctcttacctccttaggcctcccaaagagcggttagggatgctgccatggatggcatggcagggggaaccctcctggaagaaaatccatctcttctgaagggatctgagatgcggctggtttttcaatggcagaacttccctctgcagcgcgactccgaatccatgacatctgagagtcttcctgaccacaaacctctgggatcccgagggctccctacccaagaatcactttgagcacagcatcccaaggagcccatagagcgatcccttgcattcacagccacagcccctctggggacactctgtacccccggcagaccctttccaactcacaaccaataaaggggcttgggctgtgctttgactaaggtgaaaaaaaaaaa

SEQ ID NO: 300699 - DNA, 4084 bp, Artificial Sequence
  derived and/or modified sequence
ataaaaccggtcggtgatgccgggtggatgggaacaaacttcagaaggaggagagacaccgggcccagggcaccctcgcgggcggacccaaccagtgagggcctgcagccggccggccagggcagcggcaggcgcggcccggacctacgggaggaagccccgagccctcggcgggctgcgagcgactccccggcgatgcctcacaactccatcagatctggccatggagggctgaaccagctgggaggggcctttgtgaatggcagacctctgccggaagtggtccgccagcgcatcgtagacctggcccaccagggtgtaaggccctgcgacatctctcgccagctccgcgtcagccatggctgcgtcagcaagatccttggcaggtactacgagactggcagcatccggcctggagtgatagggggctccaagcccaaggtggccacccccaaggtggtggagaagattggggactacaaacgccagaaccctaccatgtttgcctgggagatccgagaccggctcctggctgagggcgtctgtgacaatgacactgtgcccagtgtcagctccattaatagaatcatccggaccaaagtgcagcaaccattcaacctccctatggacagctgcgtggccaccaagtccctgagtcccggacacacgctgatccccagctcagctgtaactcccccggagtcaccccagtcggattccctgggctccacctactccatcaatgggctcctgggcatcgctcagcctggcagcgacaagaggaaaatggatgacagtgatcaggatagctgccgactaagcattgactcacagagcagcagcagcggaccccgaaagcaccttcgcacggatgccttcagccagcaccacctcgagccgctcgagtgcccatttgagcggcagcactacccagaggcctatgcctcccccagccacaccaaaggcgagcagggcctctacccgctgcccttgctcaacagcaccctggacgacgggaaggccaccctgaccccttccaacacgccactggggcgcaacctctcgactcaccagacctaccccgtggtggcagatcctcactcacccttcgccataaagcaggaaacccccgaggtgtccagttctagctccaccccttcctctttatctagctccgcctttttggatctgcagcaagtcggctccggggtcccgcccttcaatgcctttccccatgctgcctccgtgtacgggcagttcacgggccaggccctcctctcagggcgagagatggtggggcccacgctgcccggatacccaccccacatccccaccagcggacagggcagctatgcctcctctgccatcgcaggcatggtggcaggaagtgaatactctggcaatgcctatggccacaccccctactcctcctacagcgaggcctggcgcttccccaactccagcttgctgagttccccatattattacagttccacatcaaggccgagtgcaccgcccaccactgccacggcctttgaccatctgtagttgccatggggacagtgggagcgactgagcaacaggaggactcagcctgggacaggccccagagagtcacacaaaggaatctttatttattacatgaaaaataaccacaagtccagcattgcggcacactccctgtgtggttaatttaatgaaccatgaaagacaggatgaccttggacaaggccaaactgtcctccaagactccttaatgaggggcaggagtcccagggaaagagaaccatgccatgctgaaaaagacaaaattgaagaagaaatgtagcccccagccggtacccaccaaaggagagaagaagcaatagccgaggaacttggggggatggcgaatggttcctgcccgggcccaaggggtgcacagggcacctccatggctccattattaacacaactctagcaattatggaccataagcacttccctccagcccacaagtcacagcctggtgccgaggctctcctcaccagccacccagggagtcacctccctcagcctcccgcctgccccacacggaggctctggctgtcctctttctccactccatttgcttggctctttctacacctccctcttgggcatgggctgagggctggagcgagtccctcagaaattccaccaggctgtcagctgacctcttttgcctgctgctgtgaaggtatagcaccaccccaggtcctcctgcagtgcggcatccccttggcagctgccgtcagccaggccagccccagggagcttaaaacagacattccacagggcctgggcccctgggaggtgaggtgtggtgtgcggcttcacccagggcagaacaaggcagaatcgcaggaaacccgcttccccttcctgacagctcctgccaagccaaatgtgcttcctgcagctcacgcccaccagctactgaagggacccaaggcaccccctgaagccagcgatagagggtccctctctgctccccagcagctcctgcccccaaggcctgactgtatatactgtaaatgaaactttgtttgggtcaagcttccttctttctaacccccagactttggcctctgagtgaaatgtctctctttgccctgtggggcttctctccttgatgcttctttctttttttaaagacaacctgccattaccacatgactcaataaaccattgctcttcatctcaggctttggggttggctggggaaggaggcatcccggggctgggctttctcccaagaacatcagagctgagtagccgacaaactcactttggggccgtgggctggaagggaccatctgatgccccagagctctggcttggccttctccctctgcctttaattcacgttgaacgctgggtacctcactcatcccaagttcttcaacactgagcaaatgcaaggatagcacagtactgagccaaccatagactccccacaaggagttgctgttgttattaacaggaagccagagaatcagcagggtgggttagtgagggatccgggaatagctgtgactggagcctgcataaacagctctgaagggagagagaagactgggctctcttgtgtgccaggcacagtatggaaggcttcatataagttaagctgaaattagccctgttttacatacagcttcattttacatatgaggaaactgaggctttgaaaaaaatgagatgtcttgtccaagatgaaaagtagtagattcaaccaagtcctcttactctaagcccaacgcttttacccaaaaccccagagtcctcatcagggatgccaaatggttctagacccagtggaggttctggagctgccactggggatttaatttcttttgatttgctaaagatttgacctgactgaatggagaggtagagtgtagtgtggccaggacaaggtgagggaggctgtagagacttagcactttaggccaaccacctccaggaaatctgggaaatgcaatgtgacagctcgggctctgcactccagggggctgtctggtgtccacatggaccttctccatgtgggacacagctggaacaagggggcaggggcctgcagctgggatgcccaggtgaatatgggcagctggacaaacaacactgggattgagtcagatagaaggggcccaaggactccagggctgggaggacagaggctgggagagagggctcttacctccttaggcctcccaaagagcggttagggatgctgccatggatggcatggcagggggaaccctcctggaagaaaatccatctcttctgaagggatctgagatgcggctggtttttcaatggcagaacttccctctgcagcgcgactccgaatccatgacatctgagagtcttcctgaccacaaacctctgggatcccgagggctccctacccaagaatcactttgagcacagcatcccaaggagcccatagagcgatcccttgcattcacagccacagcccctctggggacactctgtacccccggcagaccctttccaactcacaaccaataaaggggcttgggctgtgctttgactaaggtga

SEQ ID NO: 300700 - DNA, 3966 bp, Artificial Sequence
  derived and/or modified sequence
ttcagaaggaggagagacaccgggcccagggcaccctcgcgggcggacccaaccagtgagggcctgcagccggccggccagggcagcggcaggcgcggcccggacctacgggaggaagccccgagccctcggcgggctgcgagcgactccccggcgatgcctcacaactccatcagatctggccatggagggctgaaccagctgggaggggcctttgtgaatggcagacctctgccggaagtggtccgccagcgcatcgtagacctggcccaccagggtgtaaggccctgcgacatctctcgccagctccgcgtcagccatggctgcgtcagcaagatccttggcaggtactacgagactggcagcatccggcctggagtgatagggggctccaagcccaaggtggccacccccaaggtggtggagaagattggggactacaaacgccagaaccctaccatgtttgcctgggagatccgagaccggctcctggctgagggcgtctgtgacaatgacactgtgcccagtgtcagctccattaatagaatcatccggaccaaagtgcagcaaccattcaacctccctatggacagctgcgtggccaccaagtccctgagtcccggacacacgctgatccccagctcagctgtaactcccccggagtcaccccagtcggattccctgggctccacctactccatcaatgggctcctgggcatcgctcagcctggcagcgacaagaggaaaatggatgacagtgatcaggatagctgccgactaagcattgactcacagagcagcagcagcggaccccgaaagcaccttcgcacggatgccttcagccagcaccacctcgagccgctcgagtgcccatttgagcggcagcactacccagaggcctatgcctcccccagccacaccaaaggcgagcagggcctctacccgctgcccttgctcaacagcaccctggacgacgggaaggccaccctgaccccttccaacacgccactggggcgcaacctctcgactcaccagacctaccccgtggtggcagctccgcctttttggatctgcagcaagtcggctccggggtcccgcccttcaatgcctttccccatgctgcctccgtgtacgggcagttcacgggccaggccctcctctcagggcgagagatggtggggcccacgctgcccggatacccaccccacatccccaccagcggacagggcagctatgcctcctctgccatcgcaggcatggtggcaggaagtgaatactctggcaatgcctatggccacaccccctactcctcctacagcgaggcctggcgcttccccaactccagcttgctgagttccccatattattacagttccacatcaaggccgagtgcaccgcccaccactgccacggcctttgaccatctgtagttgccatggggacagtgggagcgactgagcaacaggaggactcagcctgggacaggccccagagagtcacacaaaggaatctttatttattacatgaaaaataaccacaagtccagcattgcggcacactccctgtgtggttaatttaatgaaccatgaaagacaggatgaccttggacaaggccaaactgtcctccaagactccttaatgaggggcaggagtcccagggaaagagaaccatgccatgctgaaaaagacaaaattgaagaagaaatgtagcccccagccggtacccaccaaaggagagaagaagcaatagccgaggaacttggggggatggcgaatggttcctgcccgggcccaaggggtgcacagggcacctccatggctccattattaacacaactctagcaattatggaccataagcacttccctccagcccacaagtcacagcctggtgccgaggctctcctcaccagccacccagggagtcacctccctcagcctcccgcctgccccacacggaggctctggctgtcctctttctccactccatttgcttggctctttctacacctccctcttgggcatgggctgagggctggagcgagtccctcagaaattccaccaggctgtcagctgacctcttttgcctgctgctgtgaaggtatagcaccaccccaggtcctcctgcagtgcggcatccccttggcagctgccgtcagccaggccagccccagggagcttaaaacagacattccacagggcctgggcccctgggaggtgaggtgtggtgtgcggcttcacccagggcagaacaaggcagaatcgcaggaaacccgcttccccttcctgacagctcctgccaagccaaatgtgcttcctgcagctcacgcccaccagctactgaagggacccaaggcaccccctgaagccagcgatagagggtccctctctgctccccagcagctcctgcccccaaggcctgactgtatatactgtaaatgaaactttgtttgggtcaagcttccttctttctaacccccagactttggcctctgagtgaaatgtctctctttgccctgtggggcttctctccttgatgcttctttctttttttaaagacaacctgccattaccacatgactcaataaaccattgctcttcatctcaggctttggggttggctggggaaggaggcatcccggggctgggctttctcccaagaacatcagagctgagtagccgacaaactcactttggggccgtgggctggaagggaccatctgatgccccagagctctggcttggccttctccctctgcctttaattcacgttgaacgctgggtacctcactcatcccaagttcttcaacactgagcaaatgcaaggatagcacagtactgagccaaccatagactccccacaaggagttgctgttgttattaacaggaagccagagaatcagcagggtgggttagtgagggatccgggaatagctgtgactggagcctgcataaacagctctgaagggagagagaagactgggctctcttgtgtgccaggcacagtatggaaggcttcatataagttaagctgaaattagccctgttttacatacagcttcattttacatatgaggaaactgaggctttgaaaaaaatgagatgtcttgtccaagatgaaaagtagtagattcaaccaagtcctcttactctaagcccaacgcttttacccaaaaccccagagtcctcatcagggatgccaaatggttctagacccagtggaggttctggagctgccactggggatttaatttcttttgatttgctaaagatttgacctgactgaatggagaggtagagtgtagtgtggccaggacaaggtgagggaggctgtagagacttagcactttaggccaaccacctccaggaaatctgggaaatgcaatgtgacagctcgggctctgcactccagggggctgtctggtgtccacatggaccttctccatgtgggacacagctggaacaagggggcaggggcctgcagctgggatgcccaggtgaatatgggcagctggacaaacaacactgggattgagtcagatagaaggggcccaaggactccagggctgggaggacagaggctgggagagagggctcttacctccttaggcctcccaaagagcggttagggatgctgccatggatggcatggcagggggaaccctcctggaagaaaatccatctcttctgaagggatctgagatgcggctggtttttcaatggcagaacttccctctgcagcgcgactccgaatccatgacatctgagagtcttcctgaccacaaacctctgggatcccgagggctccctacccaagaatcactttgagcacagcatcccaaggagcccatagagcgatcccttgcattcacagccacagcccctctggggacactctgtacccccggcagaccctttccaactcacaaccaataaaggggcttgggctgtgctttgactaaggtga

SEQ ID NO: 300701 - DNA, 3735 bp, Artificial Sequence
  derived and/or modified sequence
ttcagaaggaggagagacaccgggcccagggcaccctcgcgggcggacccaaccagtgagggcctgcagccggccggccagggcagcggcaggcgcggcccggacctacgggaggaagccccgagccctcggcgggctgcgagcgactccccggcgatgcctcacaactccatcagatctggccatggagggctgaaccagctgggaggggcctttgtgaatggcagacctctgccggaagtggtccgccagcgcatcgtagacctggcccaccagggtgtaaggccctgcgacatctctcgccagctccgcgtcagccatggctgcgtcagcaagatccttggcaggtactacgagactggcagcatccggcctggagtgatagggggctccaagcccaaggtggccacccccaaggtggtggagaagattggggactacaaacgccagaaccctaccatgtttgcctgggagatccgagaccggctcctggctgagggcgtctgtgacaatgacactgtgcccagtgtcagctccattaatagaatcatccggaccaaagtgcagcaaccattcaacctccctatggacagctgcgtggccaccaagtccctgagtcccggacacacgctgatccccagctcagctgtaactcccccggagtcaccccagtcggattccctgggctccacctactccatcaatgggctcctgggcatcgctcagcctggcagcgacaagaggaaaatggatgacagtgatcaggatagctgccgactaagcattgactcacagagcagcagcagcggaccccgaaagcaccttcgcacggatgccttcagccagcaccacctcgagccgctcgagtgcccatttgagcggcagcactacccagaggcctatgcctcccccagccacaccaaaggcgagcagggcgagagatggtggggcccacgctgcccggatacccaccccacatccccaccagcggacagggcagctatgcctcctctgccatcgcaggcatggtggcaggaagtgaatactctggcaatgcctatggccacaccccctactcctcctacagcgaggcctggcgcttccccaactccagcttgctgagttccccatattattacagttccacatcaaggccgagtgcaccgcccaccactgccacggcctttgaccatctgtagttgccatggggacagtgggagcgactgagcaacaggaggactcagcctgggacaggccccagagagtcacacaaaggaatctttatttattacatgaaaaataaccacaagtccagcattgcggcacactccctgtgtggttaatttaatgaaccatgaaagacaggatgaccttggacaaggccaaactgtcctccaagactccttaatgaggggcaggagtcccagggaaagagaaccatgccatgctgaaaaagacaaaattgaagaagaaatgtagcccccagccggtacccaccaaaggagagaagaagcaatagccgaggaacttggggggatggcgaatggttcctgcccgggcccaaggggtgcacagggcacctccatggctccattattaacacaactctagcaattatggaccataagcacttccctccagcccacaagtcacagcctggtgccgaggctctcctcaccagccacccagggagtcacctccctcagcctcccgcctgccccacacggaggctctggctgtcctctttctccactccatttgcttggctctttctacacctccctcttgggcatgggctgagggctggagcgagtccctcagaaattccaccaggctgtcagctgacctcttttgcctgctgctgtgaaggtatagcaccaccccaggtcctcctgcagtgcggcatccccttggcagctgccgtcagccaggccagccccagggagcttaaaacagacattccacagggcctgggcccctgggaggtgaggtgtggtgtgcggcttcacccagggcagaacaaggcagaatcgcaggaaacccgcttccccttcctgacagctcctgccaagccaaatgtgcttcctgcagctcacgcccaccagctactgaagggacccaaggcaccccctgaagccagcgatagagggtccctctctgctccccagcagctcctgcccccaaggcctgactgtatatactgtaaatgaaactttgtttgggtcaagcttccttctttctaacccccagactttggcctctgagtgaaatgtctctctttgccctgtggggcttctctccttgatgcttctttctttttttaaagacaacctgccattaccacatgactcaataaaccattgctcttcatctcaggctttggggttggctggggaaggaggcatcccggggctgggctttctcccaagaacatcagagctgagtagccgacaaactcactttggggccgtgggctggaagggaccatctgatgccccagagctctggcttggccttctccctctgcctttaattcacgttgaacgctgggtacctcactcatcccaagttcttcaacactgagcaaatgcaaggatagcacagtactgagccaaccatagactccccacaaggagttgctgttgttattaacaggaagccagagaatcagcagggtgggttagtgagggatccgggaatagctgtgactggagcctgcataaacagctctgaagggagagagaagactgggctctcttgtgtgccaggcacagtatggaaggcttcatataagttaagctgaaattagccctgttttacatacagcttcattttacatatgaggaaactgaggctttgaaaaaaatgagatgtcttgtccaagatgaaaagtagtagattcaaccaagtcctcttactctaagcccaacgcttttacccaaaaccccagagtcctcatcagggatgccaaatggttctagacccagtggaggttctggagctgccactggggatttaatttcttttgatttgctaaagatttgacctgactgaatggagaggtagagtgtagtgtggccaggacaaggtgagggaggctgtagagacttagcactttaggccaaccacctccaggaaatctgggaaatgcaatgtgacagctcgggctctgcactccagggggctgtctggtgtccacatggaccttctccatgtgggacacagctggaacaagggggcaggggcctgcagctgggatgcccaggtgaatatgggcagctggacaaacaacactgggattgagtcagatagaaggggcccaaggactccagggctgggaggacagaggctgggagagagggctcttacctccttaggcctcccaaagagcggttagggatgctgccatggatggcatggcagggggaaccctcctggaagaaaatccatctcttctgaagggatctgagatgcggctggtttttcaatggcagaacttccctctgcagcgcgactccgaatccatgacatctgagagtcttcctgaccacaaacctctgggatcccgagggctccctacccaagaatcactttgagcacagcatcccaaggagcccatagagcgatcccttgcattcacagccacagcccctctggggacactctgtacccccggcagaccctttccaactcacaaccaataaaggggcttgggctgtgctttgactaaggtga

SEQ ID NO: 300702 - DNA, 3633 bp, Artificial Sequence
  derived and/or modified sequence
ttcagaaggaggagagacaccgggcccagggcaccctcgcgggcggacccaaccagtgagggcctgcagccggccggccagggcagcggcaggcgcggcccggacctacgggaggaagccccgagccctcggcgggctgcgagcgactccccggcgatgcctcacaactccatcagatctggccatggagggctgaaccagctgggaggggcctttgtgaatggcagacctctgccggaagtggtccgccagcgcatcgtagacctggcccaccagggtgtaaggccctgcgacatctctcgccagctccgcgtcagccatggctgcgtcagcaagatccttggcaggtactacgagactggcagcatccggcctggagtgatagggggctccaagcccaaggtggccacccccaaggtggtggagaagattggggactacaaacgccagaaccctaccatgtttgcctgggagatccgagaccggctcctggctgagggcgtctgtgacaatgacactgtgcccagtgtcagctccattaatagaatcatccggaccaaagtgcagcaaccattcaacctccctatggacagctgcgtggccaccaagtccctgagtcccggacacacgctgatccccagctcagctgtaactcccccggagtcaccccagtcggattccctgggctccacctactccatcaatgggctcctgggcatcgctcagcctggcagcgacaagaggaaaatggatgacagtgatcaggatagctgccgactaagcattgactcacagagcagcagcagcggaccccgaaagcaccttcgcacggatgccttcagccagcaccacctcgagccgctcgagtgcccatttgagcggcagcactacccagaggcctatgcctcccccagccacaccaaaggcgagcaggaagtgaatactctggcaatgcctatggccacaccccctactcctcctacagcgaggcctggcgcttccccaactccagcttgctgagttccccatattattacagttccacatcaaggccgagtgcaccgcccaccactgccacggcctttgaccatctgtagttgccatggggacagtgggagcgactgagcaacaggaggactcagcctgggacaggccccagagagtcacacaaaggaatctttatttattacatgaaaaataaccacaagtccagcattgcggcacactccctgtgtggttaatttaatgaaccatgaaagacaggatgaccttggacaaggccaaactgtcctccaagactccttaatgaggggcaggagtcccagggaaagagaaccatgccatgctgaaaaagacaaaattgaagaagaaatgtagcccccagccggtacccaccaaaggagagaagaagcaatagccgaggaacttggggggatggcgaatggttcctgcccgggcccaaggggtgcacagggcacctccatggctccattattaacacaactctagcaattatggaccataagcacttccctccagcccacaagtcacagcctggtgccgaggctctcctcaccagccacccagggagtcacctccctcagcctcccgcctgccccacacggaggctctggctgtcctctttctccactccatttgcttggctctttctacacctccctcttgggcatgggctgagggctggagcgagtccctcagaaattccaccaggctgtcagctgacctcttttgcctgctgctgtgaaggtatagcaccaccccaggtcctcctgcagtgcggcatccccttggcagctgccgtcagccaggccagccccagggagcttaaaacagacattccacagggcctgggcccctgggaggtgaggtgtggtgtgcggcttcacccagggcagaacaaggcagaatcgcaggaaacccgcttccccttcctgacagctcctgccaagccaaatgtgcttcctgcagctcacgcccaccagctactgaagggacccaaggcaccccctgaagccagcgatagagggtccctctctgctccccagcagctcctgcccccaaggcctgactgtatatactgtaaatgaaactttgtttgggtcaagcttccttctttctaacccccagactttggcctctgagtgaaatgtctctctttgccctgtggggcttctctccttgatgcttctttctttttttaaagacaacctgccattaccacatgactcaataaaccattgctcttcatctcaggctttggggttggctggggaaggaggcatcccggggctgggctttctcccaagaacatcagagctgagtagccgacaaactcactttggggccgtgggctggaagggaccatctgatgccccagagctctggcttggccttctccctctgcctttaattcacgttgaacgctgggtacctcactcatcccaagttcttcaacactgagcaaatgcaaggatagcacagtactgagccaaccatagactccccacaaggagttgctgttgttattaacaggaagccagagaatcagcagggtgggttagtgagggatccgggaatagctgtgactggagcctgcataaacagctctgaagggagagagaagactgggctctcttgtgtgccaggcacagtatggaaggcttcatataagttaagctgaaattagccctgttttacatacagcttcattttacatatgaggaaactgaggctttgaaaaaaatgagatgtcttgtccaagatgaaaagtagtagattcaaccaagtcctcttactctaagcccaacgcttttacccaaaaccccagagtcctcatcagggatgccaaatggttctagacccagtggaggttctggagctgccactggggatttaatttcttttgatttgctaaagatttgacctgactgaatggagaggtagagtgtagtgtggccaggacaaggtgagggaggctgtagagacttagcactttaggccaaccacctccaggaaatctgggaaatgcaatgtgacagctcgggctctgcactccagggggctgtctggtgtccacatggaccttctccatgtgggacacagctggaacaagggggcaggggcctgcagctgggatgcccaggtgaatatgggcagctggacaaacaacactgggattgagtcagatagaaggggcccaaggactccagggctgggaggacagaggctgggagagagggctcttacctccttaggcctcccaaagagcggttagggatgctgccatggatggcatggcagggggaaccctcctggaagaaaatccatctcttctgaagggatctgagatgcggctggtttttcaatggcagaacttccctctgcagcgcgactccgaatccatgacatctgagagtcttcctgaccacaaacctctgggatcccgagggctccctacccaagaatcactttgagcacagcatcccaaggagcccatagagcgatcccttgcattcacagccacagcccctctggggacactctgtacccccggcagaccctttccaactcacaaccaataaaggggcttgggctgtgctttgactaaggtga

SEQ ID NO: 300703 - protein, 229 aa, Artificial Sequence
  derived and/or modified sequence
MLRLYVLVMGVSAFTLQPAAHTGAARSCRFRGRHYKREFRLEGEPVALRCPQVPYWLWASVSPRINLTWHKNDSARTVPGEEETRMWAQDGALWLLPALQEDSGTYVCTTRNASYCDKMSIELRVFENTDAFLPFISYPQILTLSTSGVLVCPDLSEFTRDKTDVKIQWYKDSLLLDKDNEKFLSVRGTTHLLVHDVALEDAGYYRCVLTFAHEGQQYNITRSIELRIK

SEQ ID NO: 300704 - DNA, 690 bp, Artificial Sequence
  derived and/or modified sequence
atgctgaggctgtatgtgttggtaatgggagtttctgcattcactcttcagcctgcagcccatactggggcagcccggtcctgcagatttcgcgggaggcattataaaagggaatttcggttagaaggcgaaccagtggcactgcgatgcccacaggtgccctactggttgtgggctagtgtcagcccgcggataaatctgacctggcacaagaatgacagcgcaagaaccgtccccggggaagaagaaactcgtatgtgggctcaggacggcgccctgtggttgctgccggctttgcaagaagactccggcacttatgtctgcaccaccaggaacgccagctattgcgacaagatgtctatcgaattgagggtgttcgaaaatacggatgctttcctgccattcatctcttacccccagatcctgacgctaagcacctctggcgttttggtttgtcctgacctcagtgagtttaccagagataaaaccgatgttaagatccagtggtataaagactccctgctgttggataaagacaacgagaaatttttgtcggtcaggggaactacacacttactcgtacacgatgtcgctttagaggacgctgggtactacaggtgcgttctgacctttgcccatgagggccagcagtacaatatcacgcgtagcatcgaactgcgaataaagtag

SEQ ID NO: 300705 - DNA, 792 bp, Artificial Sequence
  derived and/or modified sequence
gactcagagatgagacagttgcctaaaaacttctgggaacaaggccacgtgctgctgggtctcagtcctccacttcccgtgtcctctggaagttgtcaggagcaatgttgcgcttgtacgtgttggtaatgggagtttctgccttcacccttcagcctgcggcacacacaggggctgccagaagctgccggtttcgtgggaggcattacaagcgggagttcaggctggaaggggagcctgtagccctgaggtgcccccaggtgccctactggttgtgggcctctgtcagcccccgcatcaacctgacatggcataaaaatgactctgctaggacggtcccaggagaagaagagacacggatgtgggcccaggacggtgctctgtggcttctgccagccttgcaggaggactctggcacctacgtctgcactactagaaatgcttcttactgtgacaaaatgtccattgagctcagagtttttgagaatacagatgctttcctgccgttcatctcatacccgcaaattttaaccttgtcaacctctggggtattagtatgccctgacctgagtgaattcacccgtgacaaaactgacgtgaagattcaatggtacaaggattctcttcttttggataaagacaatgagaaatttctaagtgtgagggggaccactcacttactcgtacacgatgtggccctggaagatgctggctattaccgctgtgtcctgacatttgcccatgaaggccagcaatacaacatcactaggagtattgagctacgcatcaaga

SEQ ID NO: 300706 - DNA, 690 bp, Artificial Sequence
  derived and/or modified sequence
atgctgcggctgtatgtgctggtgatgggcgtgtctgccttcaccctgcagcctgctgcccacactggagctgcccggagctgccgcttccggggccgccactacaagcgggagttccggctggagggggagcctgtggccctgcgctgcccccaggtgccctactggctgtgggcctctgtgagcccccgcatcaacctgacctggcacaagaatgacagcgccaggacagtgcctggagaggaggagaccaggatgtgggcccaggatggagccctgtggctgctgcctgccctgcaggaggacagcggcacctacgtgtgcaccaccagaaatgccagctactgtgacaagatgagcattgagctgcgggtgtttgaaaatacagatgccttcctgcccttcatctcctacccccagatcctgaccctgagcaccagcggcgtgctggtgtgcccagacctgtctgagttcacccgggacaagacagatgtgaagatccagtggtacaaggacagcctgctgctggacaaggacaatgagaagttcctgtctgtgcggggcaccacccacctgctggtgcatgatgtggccctggaggatgctggctactaccgctgtgtgctgacctttgcccacgagggccagcagtacaacatcaccaggagcattgagctgcgcatcaagtag

SEQ ID NO: 300707 - DNA, 690 bp, Artificial Sequence
  derived and/or modified sequence
atgctgcggctgtacgtgctggtgatgggcgtgagcgccttcaccttgcagccggcggctcacacaggggccgctcgctcatgtcggttcaggggtcggcactataagcgagagttcagattagagggtgaaccagtggcactacggtgccctcaagtgccttattggctgtgggcatctgtttcaccacgaataaatctgacatggcacaagaatgacagtgcccgcactgtgcctggagaagaagagacacgcatgtgggcccaggacggggctctgtggctactccctgcacttcaggaggacagtggcacctatgtgtgtaccacacggaatgcctcctactgtgacaagatgtccattgagttgagagtctttgagaacaccgatgcttttctccccttcatctcatacccgcagatcctgactctctccaccagtggtgtgttggtgtgccctgacctatcagagtttaccagagataagacagacgtcaagattcagtggtataaggactcacttctactggataaggacaacgagaagtttctgtctgtgcggggaactacccatctcttagtgcacgacgtggctctcgaggacgcggggtattatcgatgcgttcttacattcgcccatgaaggccagcagtacaatattacaagaagcatcgaactgcgcattaagtag

SEQ ID NO: 300708 - DNA, 690 bp, Artificial Sequence
  derived and/or modified sequence
atgctacggttgtacgtcctggttatgggagttagtgcctttactctgcagccggcagctcatacaggagcagcgagatcttgcagatttcggggaaggcattacaagagagaatttagactggagggagagcctgtagccctgcgttgcccacaagtaccttattggttgtgggcgtccgtgagcccaagaataaacctgacctggcacaaaaatgactcagcgcgaacagtgcctggcgaggaagaaacccggatgtgggcgcaggacggcgcactatggcttctccctgcattgcaggaagacagcggaacgtacgtttgtactaccagaaacgctagttattgtgacaaaatgagtatcgaactccgggtcttcgaaaacacagacgctttccttcccttcatatcctatcctcagatcctgaccttgtctacttcgggagttcttgtctgtcctgacctgagcgaattcacaagggacaagaccgatgtgaaaatacagtggtataaggatagtttgctcttagacaaagacaacgaaaaatttctttcggtacgcggtaccacccatctgctggtgcacgacgtggccctcgaggatgctggctattatcgatgtgtcctgacttttgcccacgaaggccagcaatacaacataacacgctccattgaactgagaattaaatag

SEQ ID NO: 300709 - DNA, 690 bp, Artificial Sequence
  derived and/or modified sequence
atgctgagactgtacgtgctggtgatgggcgtgagcgccttcaccctgcagcccgccgcccacaccggcgccgccagaagctgcagattcagaggcagacactacaagagagagttcagactggagggcgagcccgtggccctgagatgcccccaggtgccctactggctgtgggccagcgtgagccccagaatcaacctgacctggcacaagaacgacagcgccagaaccgtgcccggcgaggaggagaccagaatgtgggcccaggacggcgccctgtggctgctgcccgccctgcaggaggacagcggcacctacgtgtgcaccaccagaaacgccagctactgcgacaagatgagcatcgagctgagagtgttcgagaacaccgacgccttcctgcccttcatcagctacccccagatcctgaccctgagcaccagcggcgtgctggtgtgccccgacctgagcgagttcaccagagacaagaccgacgtgaagatccagtggtacaaggacagcctgctgctggacaaggacaacgagaagttcctgagcgtgagaggcaccacccacctgctggtgcacgacgtggccctggaggacgccggctactacagatgcgtgctgaccttcgcccacgagggccagcagtacaacatcaccagaagcatcgagctgagaatcaagtag

SEQ ID NO: 300710 - DNA, 85 bp, Artificial Sequence
  derived and/or modified sequence
aggaaataaaagaagacacaaacaaatggaagaacattccatgcttatggatagggagaatcagtatcgtgaaaatggccatact

SEQ ID NO: 300711 - DNA, 5621 bp, Artificial Sequence
  derived and/or modified sequence
aagaaaatcctgcttgacaaaaaccgtcacttaggaaaagatgtcctttcgggcagccaggctcagcatgaggaacagaaggaatgacactctggacagcacccggaccctgtactccagcgcgtctcggagcacagacttgtcttacagtgaaagcgacttggtgaattttattcaagcaaattttaagaaacgagaatgtgtcttctttaccaaagattccaaggccacggagaatgtgtgcaagtgtggctatgcccagagccagcacatggaaggcacccagatcaaccaaagtgagaaatggaactacaagaaacacaccaaggaatttcctaccgacgcctttggggatattcagtttgagacactggggaagaaagggaagtatatacgtctgtcctgcgacacggacgcggaaatcctttacgagctgctgacccagcactggcacctgaaaacacccaacctggtcatttctgtgaccgggggcgccaagaacttcgccctgaagccgcgcatgcgcaagatcttcagccggctcatctacatcgcgcagtccaaaggtgcttggattctcacgggaggcacccattatggcctgatgaagtacatcggggaggtggtgagagataacaccatcagcaggagttcagaggagaatattgtggccattggcatagcagcttggggcatggtctccaaccgggacaccctcatcaggaattgcgatgctgagggctattttttagcccagtaccttatggatgacttcacaagagatccactgtatatcctggacaacaaccacacacatttgctgctcgtggacaatggctgtcatggacatcccactgtcgaagcaaagctccggaatcagctagagaagtatatctctgagcgcactattcaagattccaactatggtggcaagatccccattgtgtgttttgcccaaggaggtggaaaagagactttgaaagccatcaatacctccatcaaaaataaaattccttgtgtggtggtggaaggctcgggccagatcgctgatgtgatcgctagcctggtggaggtggaggatgccctgacatcttctgccgtcaaggagaagctggtgcgctttttaccccgcacggtgtcccggctgcctgaggaggagactgagagttggatcaaatggctcaaagaaattctcgaatgttctcacctattaacagttattaaaatggaagaagctggggatgaaattgtgagcaatgccatctcctacgctctatacaaagccttcagcaccagtgagcaagacaaggataactggaatgggcagctgaagcttctgctggagtggaaccagctggacttagccaatgatgagattttcaccaatgaccgccgatgggagtctgctgaccttcaagaagtcatgtttacggctctcataaaggacagacccaagtttgtccgcctctttctggagaatggcttgaacctacggaagtttctcacccatgatgtcctcactgaactcttctccaaccacttcagcacgcttgtgtaccggaatctgcagatcgccaagaattcctataatgatgccctcctcacgtttgtctggaaactggttgcgaacttccgaagaggcttccggaaggaagacagaaatggccgggacgagatggacatagaactccacgacgtgtctcctattactcggcaccccctgcaagctctcttcatctgggccattcttcagaataagaaggaactctccaaagtcatttgggagcagaccaggggctgcactctggcagccctgggagccagcaagcttctgaagactctggccaaagtgaagaacgacatcaatgctgctggggagtccgaggagctggctaatgagtacgagacccgggctgttgagctgttcactgagtgttacagcagcgatgaagacttggcagaacagctgctggtctattcctgtgaagcttggggtggaagcaactgtctggagctggcggtggaggccacagaccagcatttcatcgcccagcctggggtccagaattttctttctaagcaatggtatggagagatttcccgagacaccaagaactggaagattatcctgtgtctgtttattatacccttggtgggctgtggctttgtatcatttaggaagaaacctgtcgacaagcacaagaagctgctttggtactatgtggcgttcttcacctcccccttcgtggtcttctcctggaatgtggtcttctacatcgccttcctcctgctgtttgcctacgtgctgctcatggatttccattcggtgccacacccccccgagctggtcctgtactcgctggtctttgtcctcttctgtgatgaagtgagacagtggtacgtaaatggggtgaattattttactgacctgtggaatgtgatggacacgctggggcttttttacttcatagcaggaattgtatttcggctccactcttctaataaaagctctttgtattctggacgagtcattttctgtctggactacattattttcactctaagattgatccacatttttactgtaagcagaaacttaggacccaagattataatgctgcagaggatgctgatcgatgtgttcttcttcctgttcctctttgcggtgtggatggtggcctttggcgtggccaggcaagggatccttaggcagaatgagcagcgctggaggtggatattccgttcggtcatctacgagccctacctggccatgttcggccaggtgcccagtgacgtggatggtaccacgtatgactttgcccactgcaccttcactgggaatgagtccaagccactgtgtgtggagctggatgagcacaacctgccccggttccccgagtggatcaccatccccctggtgtgcatctacatgttatccaccaacatcctgctggtcaacctgctggtcgccatgtttggctacacggtgggcaccgtccaggagaacaatgaccaggtctggaagttccagaggtacttcctggtgcaggagtactgcagccgcctcaatatccccttccccttcatcgtcttcgcttacttctacatggtggtgaagaagtgcttcaagtgttgctgcaaggagaaaaacatggagtcttctgtctgctgtttcaaaaatgaagacaatgagactctggcatgggagggtgtcatgaaggaaaactaccttgtcaagatcaacacaaaagccaacgacacctcagaggaaatgaggcatcgatttagacaactggatacaaagcttaatgatctcaagggtcttctgaaagagattgctaataaaatcaaataaaactgtatgaactctaatggagaaaaatctaattatagcaagatcatattaaggaatgctgatgaacaattttgctatcgactactaaatgagagattttcagacccctgggtacatggtggatgattttaaatcaccctagtgtgctgagaccttgagaataaagtgtgtgattggtttcatacttgaagacggatataaaggaagaatatttcctttatgtgtttctccagaatggtgcctgtttctctctgtgtctcaatgcctgggactggaggttgatagtttaagtgtgttcttaccgcctcctttttcctttaatcttatttttgatgaacacatatataggagaacatctatcctatgaataagaacctggtcatgctttactcctgtattgttattttgttcatttccaattgattctctacttttcccttttttgtattatgtgactaattagttggcatattgttaaaagtctctcaaattaggccagattctaaaacatgctgcagcaagaggaccccgctctcttcaggaaaagtgttttcatttctcaggatgcttcttacctgtcagaggaggtgacaaggcagtctcttgctctcttggactcaccaggctcctattgaaggaaccacccccattcctaaatatgtgaaaagtcgcccaaaatgcaaccttgaaaggcactactgactttgttcttattggatactcctcttattatttttccattaaaaataatagctggctattatagaaaatttagaccatacagagatgtagaaagaacataaattgtccccattaccttaaggtaatcactgctaacaatttctggatggtttttcaagtctattttttttctatgtatgtctcaattctctttcaaaattttacagaatgttatcatactacatatatactttttatgtaagctttttcacttagtattttatcaaatatgtttttattatattcatagccttcttaaacattatatcaataattgcataataggcaacctctagcgattaccataattttgctcattgaaggctatctccagttgatcattgggatgagcatctttgtgcatgaatcctattgctgtatttgggaaaattttccaaggttagattccaataaatatctatttattattaaatattaaaatatctatttattattaaaaccatttataaggctttttcataaatgtatagcaaataggaattattaacttgagcataagatatgagatacatgaacctgaactattaaaataaaatattatatttaacccttagtttaagaagaagtcaatatgcttatttaaatattatggatggtgggcagatcacttgaggtcaggagttcgagaccagcctggccaacatggcaaaaccacatctctactaaaaataaaaaaattagctgggtgtggtggtgcactcctgtaatcccagctactcagaaggctgaggtacaagaattgctggaacctgggaggcggaggttgcagtgaaccaagattgcaccactgcactccagccggggtgacagagtgagactccgactgaaaataaataaataaataaataaataaataaataaatattatggatggtgaagggaatggtatagaattggagagattatcttactgaacacctgtagtcccagctttctctggaagtggtcgtatttgagcaggatgtgcacaaggcaattgaaatgcccataattagtttctcagctttgaatacactataaactcactggctgaaggaggaaattttagaaggaagctactaaaagatctaatttgaaaaactacaaaagcattaactaaaaaagtttattttccttttgtctgggcagtagtgaaaataactactcacaacattcactatgtttgcaaggaattaacacaaataaaagatgcctttttacttaaacaccaagacagaaaacttgcccaatactgagaagcaacttgcattagagagggaactgttaaatgttttcaacccagttcatctggtggatgtttttgcaggttactctgagaattttgcttatgaaaaatcattatttttagtgtagttcacaataatgtattgaacatacttctaatcaaaggtgctatgtccttgtgtatggtactaaatgtgtcctgtgtacttttgcacaactgagaatcctgcagcttggtttaatgagtgtgttcatgaaataaataatggaggaattgtca

SEQ ID NO: 300712 - protein, 251 aa, Artificial Sequence
  derived and/or modified sequence
MGVGTKARASHWRRLLSLGATPEEPLLDFKIPDDNFSIPEGEEDLAKAIQMAQEQATDTEILERKTVLPSKHAVPEVIEDFLCNFLIKMGMTRTLDCFQSEWYELIQKGVTELRTVGNVPDVYTQIMLLENENKNLKKDLKHYKQAADKAREDLLKIQKERDFHRMHHKRIVQEKNKLINDLKGLKLHYASYEPTIRVLHEKHHTLLKEKMLTSLERDKVVGQISGLQETLKKLQRGHSYHGPQIKGKCKM

SEQ ID NO: 300713 - DNA, 756 bp, Artificial Sequence
  derived and/or modified sequence
atgggcgtgggcaccaaggccagagccagccactggagaagactgctgagcctgggcgccacccccgaggagcccctgctggacttcaagatccccgacgacaacttcagcatccccgagggcgaggaggacctggccaaggccatccagatggcccaggagcaggccaccgacaccgagatcctggagagaaagaccgtgctgcccagcaagcacgccgtgcccgaggtgatcgaggacttcctgtgcaacttcctgatcaagatgggcatgaccagaaccctggactgcttccagagcgagtggtacgagctgatccagaagggcgtgaccgagctgagaaccgtgggcaacgtgcccgacgtgtacacccagatcatgctgctggagaacgagaacaagaacctgaagaaggacctgaagcactacaagcaggccgccgacaaggccagagaggacctgctgaagatccagaaggagagagacttccacagaatgcaccacaagagaatcgtgcaggagaagaacaagctgatcaacgacctgaagggcctgaagctgcactacgccagctacgagcccaccatcagagtgctgcacgagaagcaccacaccctgctgaaggagaagatgctgaccagcctggagagagacaaggtggtgggccagatcagcggcctgcaggagaccctgaagaagctgcagagaggccacagctaccacggcccccagatcaagggcaagtgcaagatgtag

SEQ ID NO: 300714 - DNA, 756 bp, Artificial Sequence
  derived and/or modified sequence
atgggagtgggcacaaaagctagagcttcacactggcggcggctgctgtcccttggtgcgacgccagaggagcctttgctggatttcaagattccagacgacaacttcagcatcccagagggagaggaagatctcgcaaaggccatccaaatggcccaagagcaggctaccgatacggaaatattagaacgaaaaaccgtgttgccatcaaagcacgctgtacctgaagtaatcgaggactttctgtgtaactttctcatcaaaatgggtatgactagaacattagactgcttccagagtgagtggtacgaactgattcagaagggggtgaccgagttgcggacggtaggaaacgtacccgacgtttacacacagattatgctgctggagaatgaaaataagaatttgaagaaggacctcaaacattataagcaggcagccgacaaagcccgggaggacctgctgaagatccagaaagaacgggactttcatcgaatgcatcacaaacgtatcgtgcaggagaaaaataagttgatcaatgacctcaagggtttgaaactccactacgcttcgtatgagcccacaatacgcgttttgcatgaaaagcatcatacactgctgaaagaaaagatgctcacgtcactggagcgggacaaagttgtgggacagattagtggattacaagaaactctcaagaagcttcaaaggggtcattcctatcacggaccacaaattaaaggcaagtgcaagatgtag

SEQ ID NO: 300715 - DNA, 756 bp, Artificial Sequence
  derived and/or modified sequence
atgggcgtgggcaccaaggcccgggccagccactggaggcggctgctgagcctgggcgccaccccagaggagcccctgctggacttcaagatcccagatgacaacttcagcatccctgagggggaggaggacctggccaaggccatccagatggcccaggagcaggccacagacacagagatcctggagaggaagacagtgctgcccagcaagcatgctgtgcctgaggtgattgaggacttcctgtgcaacttcctgatcaagatgggcatgaccaggaccctggactgcttccagagcgagtggtatgagctgatccagaagggcgtgacagagctgaggacagtgggcaatgtgcctgatgtgtacacccagatcatgctgctggagaatgaaaacaagaacctgaagaaggacctgaagcactacaagcaggccgctgacaaggcccgggaggacctgctgaagatccagaaggagcgggacttccacaggatgcaccacaagagaattgtgcaggagaagaacaagctgatcaatgacctgaagggcctgaagctgcactacgccagctatgagcccaccatccgggtgctgcacgagaagcaccacaccctgctgaaggagaagatgctgaccagcctggagcgggacaaggtggtgggccagatcagcggcctgcaggagaccctgaagaagctgcagaggggccacagctaccacggcccccagatcaagggcaagtgcaagatgtag

SEQ ID NO: 300716 - DNA, 756 bp, Artificial Sequence
  derived and/or modified sequence
atgggcgtgggcaccaaggcccgggccagccactggcggcggctgctttctctcggagctacccccgaggagccactgttggacttcaagatacctgacgacaacttttctattccagagggcgaggaagacctggctaaggcgatacagatggctcaggaacaggccactgacaccgagatcctggagcgaaaaactgttctgccatctaaacacgccgtgcctgaggtaattgaggattttctctgtaacttcttgataaagatgggcatgacgcggacacttgattgctttcaaagcgaatggtatgaactcattcagaagggcgtcactgaactccggacagttggaaacgtgcccgatgtatacacccaaatcatgttgctggagaacgagaacaaaaatctgaaaaaagatctgaaacactacaaacaggctgccgataaagcacgcgaggatctccttaagatccagaaggaacgcgacttccaccgtatgcatcacaaacggattgtccaagagaaaaataagctaatcaatgacttgaagggcttgaaactccactacgcaagctacgaacccacaatccgcgtcctgcacgagaaacatcatacattattaaaagagaaaatgttgacatccttagagagggacaaggtggttggacagatctctggtctgcaagagacgctcaagaaactgcagcgtggccatagctatcacggccctcaaattaaaggaaaatgtaagatgtag

SEQ ID NO: 300717 - DNA, 756 bp, Artificial Sequence
  derived and/or modified sequence
atgggggttggtaccaaggcccgagcgtctcactggcgacggctgttaagcctgggtgctactccagaagaacccctgctggatttcaaaatcccagatgacaatttttctattccagagggcgaggaagatctggcgaaggctattcagatggcacaggagcaggcgacagacactgagatcctggaacgcaagacggtattgccatcgaagcatgctgtgcctgaggtgatcgaggattttttgtgcaatttcctcattaagatggggatgaccagaacccttgactgcttccaatccgagtggtatgagctgatccaaaaaggtgttacagagcttcgaactgtgggcaacgtgccagacgtatacacgcagatcatgttattggagaacgaaaacaagaatctaaaaaaagacctcaaacactacaagcaggctgctgacaaagctagggaagacttattaaagattcagaaagagagggacttccaccgtatgcaccataagcgcatcgtgcaagagaagaataagctcatcaacgaccttaagggactgaagctgcactacgcttcttacgagccaacaattagggtcctgcacgagaagcatcatacccttctaaaggaaaaaatgctcacatccctggagcgagataaagtggtcggccaaatctccggccttcaagaaactctgaaaaagctgcagagaggacattcctatcacgggcctcagatcaaaggcaaatgcaagatgtag

SEQ ID NO: 300718 - DNA, 2256 bp, Artificial Sequence
  derived and/or modified sequence
agcgtcttcgctgttgcccttagggacggctgtgggcctgctgggggtgggggcccgaagcgccagagatggctgctcagcgagggatgcccagctccgccgtgagggtcctggaagaggcgttgggcatgggtttgacggcagccggggacgcgagggacacggcggacgcggtggcggctgagggcgcctactacctggaacgtatccttcccgtggaggcgcggcccgctgcgctggcgggtaatgggtgttgggacgaaggcgagggcctcccactggcggcgccttttgagccttggggccactccggaggagcctctgttggacttcaagataccagatgacaattttagcatcccagaaggtgaagaagatctggcaaaagcaattcagatggcccaagaacaggctacagatactgaaattttggaacggaaaacagttcttccttcaaagcatgcagtacctgaagtaatagaagactttctctgcaatttcttgatcaaaatgggaatgaccagaactcttgattgctttcagtctgaatggtatgagttaatacagaaaggagtgactgaacttagaactgttgggaatgttccagatgtctacacccagattatgcttttggaaaatgagaacaaaaatttaaagaaagatttgaagcactacaaacaagcagctgacaaagctagagaagatttgctgaaaattcagaaagaacgtgattttcatcgaatgcatcataagcgaatagtccaggaaaaaaacaaattaattaatgacctcaaagggttgaagttacattatgcatcttatgaaccgactataagggtgttacatgagaaacaccacactttactgaaggagaaaatgctgacctccttggaaagagacaaagtagttgggcagatttctggacttcaagaaacattgaagaaactgcaaagaggacatagttaccatggtcctcaaattaaaggtaaatgtaaaatgtgatgaagctctcatttaatatagtttggtgatttctcaaccttatcagtgattaatattctagagatatttaaaggtgagtaagtggtggctatttcacaaattaaaattttaataaaaagattaagaagaaatatagatatcatactgtatggattaattatagagaaaaacaagtcaactataatggaaggacttctgcttctggtcattatacctggtaccagactagccttctctgtgtaaataactctaaagctaagctgtaagatcagacaactacttttaggcagtagaaaacagacagctcaagtaacagaaggcaattgacagaaggaaaatttataaggtgagctctgccatcaccatggctttgggtctgtggaaagttccaaactgagctttgtggagatggaagccaataagagcatgacaatcctgataattggaaatgtcagagaccctagttcacagcttttgaagccactggaatctgtagggaaagacaccagagaagagagctgcaatgaggagtggctcagtttgtgagggagtttactatgagtccttagctgaggctgcaatactatacataacaacactacctgacacttacaagagagatacaattatataggatcaagaggaggccagagattgtagaagttaagtagtgatgcgaaacattgcaaatctggccatgcctgggtggaaagacctctttcacaccttgttaacaacacagtaacattcagcatcccatatccgccttataaaaccaggaacaaagcttacacagcattcttagagaggacacagaatttggagtttgagtcttgccaagttatagggccttgagaaacatttagggctttccatggatccaccctaacgaagcataaaattaagcctaggattttagggtcatcagccaaaaatggaactgccttctagaacaaaaaatgacatccttttgaggaagacagtcatccagagtctttacaatcttttacccacattgcctagtacataattaaacatttctagatatgaataggaacaggaaaatgtgacccataatcaagacaacaagcaataaatggaaacctacccttaagtagctaaactgttgcatttagcagatagaaagtgctaaagtagatactttgattatgttcaaggacttaatggaaaatactaataagtgaacagatggggaatttaagcaaagaaatgagaacaagcatacattccaaa

SEQ ID NO: 300719 - protein, 255 aa, Artificial Sequence
  derived and/or modified sequence
DSEFPIDMQPNPNLNVSKESLSPAKFDYKLKNIFRLHELPVSCVSMQPHKDILVSCGEDRLWKVLGLPKCNVLLTGFGHTDWLSDCCFHPSERCRCTLYGHTDSVNSIEFFPFSNTLLTSSADKTLSIWDARTGICEQSLYGHMHSINDAIFDPRGHMIASCDACGVTKLWDFRKLLPIVSIDIGPSPGNEVNFDSSGRVLAQASGNGVIHLLDLKSGEIHKLMGHENEAHTVVFSHDGEILFSGGSDGTVRTWS

SEQ ID NO: 300720 - DNA, 768 bp, Artificial Sequence
  derived and/or modified sequence
gacagcgagttccccatcgacatgcagcccaaccccaacctgaacgtgagcaaggagagcctgagccccgccaagttcgactacaagctgaagaacatcttcagactgcacgagctgcccgtgagctgcgtgagcatgcagccccacaaggacatcctggtgagctgcggcgaggacagactgtggaaggtgctgggcctgcccaagtgcaacgtgctgctgaccggcttcggccacaccgactggctgagcgactgctgcttccaccccagcgagagatgcagatgcaccctgtacggccacaccgacagcgtgaacagcatcgagttcttccccttcagcaacaccctgctgaccagcagcgccgacaagaccctgagcatctgggacgccagaaccggcatctgcgagcagagcctgtacggccacatgcacagcatcaacgacgccatcttcgaccccagaggccacatgatcgccagctgcgacgcctgcggcgtgaccaagctgtgggacttcagaaagctgctgcccatcgtgagcatcgacatcggccccagccccggcaacgaggtgaacttcgacagcagcggcagagtgctggcccaggccagcggcaacggcgtgatccacctgctggacctgaagagcggcgagatccacaagctgatgggccacgagaacgaggcccacaccgtggtgttcagccacgacggcgagatcctgttcagcggcggcagcgacggcaccgtgagaacctggagctag

SEQ ID NO: 300721 - DNA, 768 bp, Artificial Sequence
  derived and/or modified sequence
gatagcgagttcccaattgatatgcagccaaacccaaatctgaacgtttccaaggagtctctctcccccgctaaattcgattataaacttaagaatatttttagactccacgaattacctgtgtcttgcgtctcaatgcagccccacaaggacatccttgtctcctgcggtgaggacagattgtggaaggtgctcggactacctaaatgcaacgtcttactgactggctttggacacaccgattggctgtccgactgctgtttccatccgtctgaacgctgtcgttgcacattgtacgggcataccgacagcgtcaacagtatagaattcttcccattttccaacactctgctgacttcttctgccgataaaactctcagtatatgggacgcccgcaccgggatctgtgaacagagcctgtatggccacatgcatagcatcaatgacgctatatttgacccgagaggccacatgattgcatcctgcgatgcatgtggtgtgacaaaactctgggacttcaggaagctgctgccaatcgttagtattgatatcgggccaagccccggaaacgaggtgaatttcgacagcagcggtagagtgctcgcacaggcctcggggaacggggtgattcatctgctggacctgaagagcggagagatacacaagcttatggggcacgaaaacgaggcacacaccgttgtgttctcacacgacggcgagattctgttttccgggggctctgatggtaccgtgcggacttggtcctag

SEQ ID NO: 300722 - DNA, 768 bp, Artificial Sequence
  derived and/or modified sequence
gacagcgagttccccatcgacatgcagcccaaccccaacctgaatgtgtccaaggagagcctgagccctgccaagtttgactacaagctgaagaacatcttccggctgcacgagctgcctgtgtcctgtgtgtccatgcagccccacaaggacatcctggtgtcctgtggggaggaccggctgtggaaggtgctgggcctgcccaagtgcaatgtgctgctgactggatttggccacacagactggctgagtgactgctgcttccaccccagcgagcgctgccgctgcaccctgtatggccacacagacagcgtgaacagcattgagttcttccccttcagcaacaccctgctgaccagcagcgctgacaagaccctgagcatctgggatgccaggacaggcatctgtgagcagagcctgtatggccacatgcacagcatcaatgatgccatctttgacccccggggccacatgattgccagctgtgatgcctgtggggtgaccaagctgtgggacttcaggaagctgctgcccatcgtgtccattgacatcggccccagccctggaaatgaggtgaactttgacagcagcggccgggtgctggcccaggccagcggaaatggagtcatccacctgctggacctgaagtctggagagatccacaagctgatgggccatgaaaatgaggcccacacagtggtgttcagccatgatggagagatcctcttcagcggcggcagtgatggcaccgtgaggacctggagctag

SEQ ID NO: 300723 - DNA, 768 bp, Artificial Sequence
  derived and/or modified sequence
gacagcgagttccccatcgacatgcagcccaaccccaacctgaacgttagcaaagagtccctgtctcccgcgaaatttgactataagctcaaaaatattttccggctgcatgaattgcctgtgagttgtgtatcaatgcagccccacaaggacatcctggtgagctgtggagaggataggttgtggaaggtgctggggttgcccaaatgcaacgtgttactcactggctttggccacaccgattggctctccgactgctgctttcacccctcagaaagatgccgctgcacattatacgggcacaccgattctgtaaattctattgaatttttcccttttagtaacacattgttgacctcttccgcagacaagacactgtcaatctgggatgccaggacgggaatatgtgaacagtccctgtacggacacatgcattccatcaatgacgccatcttcgaccccagaggccacatgattgcttcgtgcgatgcctgcggagtcacgaagctttgggattttcggaaactattacccatcgtatccatcgacataggcccgtcgcctgggaatgaggttaactttgactcctccggccgagtgttggctcaggcgagtggcaacggggtgatccacctgttagatctgaagtctggggagattcacaaactgatgggtcacgaaaacgaggctcacaccgtggtctttagtcatgatggagaaatactcttctctgggggcagcgatggtacagtgcgcacttggtcttag

SEQ ID NO: 300724 - DNA, 768 bp, Artificial Sequence
  derived and/or modified sequence
gacagtgaatttccaatcgatatgcagccgaacccgaacctgaatgtgtctaaagagtctttgtcaccagctaagttcgattataaactgaagaacatcttccggctccatgagctgccagtgtcatgcgtgtctatgcagccgcataaagacatccttgtgtcatgtggcgaggaccgactctggaaggtcctgggattgccaaagtgcaacgttctgcttacaggctttggtcatactgattggttgtctgactgctgtttccaccctagtgaaagatgtaggtgtacactgtacgggcatacagactccgttaattctatagaattttttccattttccaatactctgttaacctccagtgccgacaaaacccttagtatttgggatgcccgaacaggaatctgtgagcagtccctgtatggacatatgcattccataaatgatgcaattttcgatccccgagggcacatgatcgcaagctgtgacgcatgtggggtgaccaagttgtgggatttccggaagctgttaccgatcgtgtccattgatattggcccatcccccggaaacgaagtgaacttcgacagctctggcagggtactggcccaggcatctggaaatggggtgattcacctcttggatctgaagtccggggagatacataaactcatggggcatgagaatgaagcccatactgtagtcttttcgcacgacggggagatcctctttagcgggggtagtgacggaaccgtcaggacctggtcttag

SEQ ID NO: 300725 - DNA, 771 bp, Artificial Sequence
  derived and/or modified sequence
gattcagaatttcccatagatatgcaaccaaatccaaacctgaatgtttctaaagaaagtctttctccagcaaaatttgactacaagctgaaaaacatttttagactccatgaacttccagtgagctgtgtctccatgcaaccccacaaagacatcctagtctcctgtggcgaggaccgactctggaaggtgttgggccttccaaaatgcaatgtgcttctcacgggatttggccacactgactggctttcagactgctgcttccatcccagtgaaagatgcagatgtactttgtatggacatacagattctgtgaacagcattgagttttttcctttctccaatactcttctcacaagctctgcagacaagaccctgtctatatgggatgcaagaacaggtatatgtgagcagtcactttatggtcacatgcattctatcaatgatgccatttttgatcccaggggtcacatgatagcatcctgtgatgcctgtggggttacaaagctgtgggactttcggaagctgttaccaattgtgtccatcgatataggtccaagtcctggcaatgaggtgaattttgattcatcaggtcgagttttagctcaggcaagtggcaatggtgttatccatttgctagatcttaaatctggggagattcacaaattgatgggccacgaaaacgaggcacacacggttgtgttttctcacgacggggagattctcttttctggaggctctgacggcacagttcgaacgtggtcttgaccg

SEQ ID NO: 300726 - protein, 537 aa, Artificial Sequence
  derived and/or modified sequence
MTMNMKRYQMTILASQKVKKIWQKQFRWPKNRLQILKFWYELIQKGVTELRTVGNVPDVYTQIMLLENENKNLKKDLKHYKQAADKAREDLLKIQKERDFHRMHHKRIVQEKNKLINDLKGLKLHYASYEPTIRVLHEKHHTLLKEKMLTSLERDKVVGQISGLQETLKKLQRGHSYHGPQIKVDHSREKENAPEGPTQKGLREAREQNKCKTKMKGNTKDSEFPIDMQPNPNLNVSKESLSPAKFDYKLKNIFRLHELPVSCVSMQPHKDILVSCGEDRLWKVLGLPKCNVLLTGFGHTDWLSDCCFHPSGDKLATSSGDTTVKLWDLCKGDCILTFEGHSRAVWSCTWHSCGNFVASSSLDKTSKIWDVNSERCRCTLYGHTDSVNSIEFFPFSNTLLTSSADKTLSIWDARTGICEQSLYGHMHSINDAIFDPRGHMIASCDACGVTKLWDFRKLLPIVSIDIGPSPGNEVNFDSSGRVLAQASGNGVIHLLDLKSGEIHKLMGHENEAHTVVFSHDGEILFSGGSDGTVRTWS

SEQ ID NO: 300727 - DNA, 1614 bp, Artificial Sequence
  derived and/or modified sequence
atgaccatgaacatgaagagataccagatgaccatcctggccagccagaaggtgaagaagatctggcagaagcagttcagatggcccaagaacagactgcagatcctgaagttctggtacgagctgatccagaagggcgtgaccgagctgagaaccgtgggcaacgtgcccgacgtgtacacccagatcatgctgctggagaacgagaacaagaacctgaagaaggacctgaagcactacaagcaggccgccgacaaggccagagaggacctgctgaagatccagaaggagagagacttccacagaatgcaccacaagagaatcgtgcaggagaagaacaagctgatcaacgacctgaagggcctgaagctgcactacgccagctacgagcccaccatcagagtgctgcacgagaagcaccacaccctgctgaaggagaagatgctgaccagcctggagagagacaaggtggtgggccagatcagcggcctgcaggagaccctgaagaagctgcagagaggccacagctaccacggcccccagatcaaggtggaccacagcagagagaaggagaacgcccccgagggccccacccagaagggcctgagagaggccagagagcagaacaagtgcaagaccaagatgaagggcaacaccaaggacagcgagttccccatcgacatgcagcccaaccccaacctgaacgtgagcaaggagagcctgagccccgccaagttcgactacaagctgaagaacatcttcagactgcacgagctgcccgtgagctgcgtgagcatgcagccccacaaggacatcctggtgagctgcggcgaggacagactgtggaaggtgctgggcctgcccaagtgcaacgtgctgctgaccggcttcggccacaccgactggctgagcgactgctgcttccaccccagcggcgacaagctggccaccagcagcggcgacaccaccgtgaagctgtgggacctgtgcaagggcgactgcatcctgaccttcgagggccacagcagagccgtgtggagctgcacctggcacagctgcggcaacttcgtggccagcagcagcctggacaagaccagcaagatctgggacgtgaacagcgagagatgcagatgcaccctgtacggccacaccgacagcgtgaacagcatcgagttcttccccttcagcaacaccctgctgaccagcagcgccgacaagaccctgagcatctgggacgccagaaccggcatctgcgagcagagcctgtacggccacatgcacagcatcaacgacgccatcttcgaccccagaggccacatgatcgccagctgcgacgcctgcggcgtgaccaagctgtgggacttcagaaagctgctgcccatcgtgagcatcgacatcggccccagccccggcaacgaggtgaacttcgacagcagcggcagagtgctggcccaggccagcggcaacggcgtgatccacctgctggacctgaagagcggcgagatccacaagctgatgggccacgagaacgaggcccacaccgtggtgttcagccacgacggcgagatcctgttcagcggcggcagcgacggcaccgtgagaacctggagctag

SEQ ID NO: 300728 - DNA, 1614 bp, Artificial Sequence
  derived and/or modified sequence
atgactatgaacatgaagcgttatcaaatgacaattttagcgtctcaaaaggttaagaaaatatggcaaaagcaatttagatggcccaagaacagattacagattctcaaattctggtacgaactcattcagaagggcgtcacagagctgcggacagtgggaaacgtgcctgacgtgtacacccagataatgttgttagagaatgaaaacaagaatctgaagaaagatctcaaacattacaaacaggccgccgataaagcccgcgaagatctgctgaagatccagaaggaacgggactttcaccggatgcaccacaaacggattgtgcaggagaagaataagctcatcaatgacctgaaaggcctcaagctgcactatgcatcctacgagccaaccattcgggtacttcatgaaaaacatcacacattactgaaggagaaaatgctgacctctctggaaagggataaagtcgttggccagatctcgggtctacaggagactctgaaaaagctacaacgtggccattcataccatggcccccaaatcaaagtggatcacagccgggaaaaggaaaatgcacctgaaggtccgactcagaagggactccgagaggcgagagagcaaaacaaatgcaaaacaaaaatgaagggcaacaccaaagactctgagttccccatcgacatgcagcccaatccgaacttaaatgtgtctaaggaatcacttagccctgctaaatttgattacaagctgaagaacattttccggctgcacgagctgcctgtgtcgtgcgtctcaatgcagccacataaggatatcttggtctcttgcggggaggatcggctctggaaggttttgggtcttcccaagtgcaatgtgttgctgactggttttggccatactgactggctcagcgattgttgcttccacccatccggagacaaactcgccaccagctccggcgatactacggtcaagctttgggacttgtgcaagggggattgcattttgaccttcgaaggccactcgcgggctgtgtggtcctgcacatggcacagttgcggcaattttgtagcctctagttccctggacaaaaccagcaagatttgggacgtgaattctgaacgatgtcgctgtacgctgtatgggcacaccgacagcgttaactccatcgagtttttccctttttctaacacactgctcacttccagcgcagataagacactgtccatatgggatgctcgcacgggaatttgtgagcagtcgttgtatggccacatgcacagtattaatgatgctatttttgaccccagaggacatatgatcgccagctgcgatgcttgtggcgtgactaaattgtgggattttcgaaaactgcttcctatcgtcagtatcgacattggccccagccctggcaatgaagtcaatttcgattcaagcgggcgtgtgctagctcaggccagcggaaatggagtgatccacctgctggatctgaaaagcggtgaaatccacaaactgatggggcatgagaatgaggcccatacagtcgttttctctcacgacggcgagattctgttttctggcgggtcggatggcacagtgcggacctggtcctag

SEQ ID NO: 300729 - DNA, 1614 bp, Artificial Sequence
  derived and/or modified sequence
atgaccatgaacatgaagcgctaccagatgaccatcctggccagccagaaggtgaagaagatctggcagaagcagttccgctggcccaagaaccggctgcagatcctgaagttctggtatgagctgatccagaagggcgtgacagagctgaggacagtgggcaatgtgcctgatgtgtacacccagatcatgctgctggagaatgaaaacaagaacctgaagaaggacctgaagcactacaagcaggccgctgacaaggcccgggaggacctgctgaagatccagaaggagcgggacttccacaggatgcaccacaagagaattgtgcaggagaagaacaagctgatcaatgacctgaagggcctgaagctgcactacgccagctatgagcccaccatccgggtgctgcacgagaagcaccacaccctgctgaaggagaagatgctgaccagcctggagcgggacaaggtggtgggccagatcagcggcctgcaggagaccctgaagaagctgcagaggggccacagctaccacggcccccagatcaaggtggaccacagccgggagaaggaaaatgcccctgagggccccacccagaagggcctgcgggaggcccgggagcagaacaagtgcaagaccaagatgaagggcaacaccaaggacagcgagttccccatcgacatgcagcccaaccccaacctgaatgtgtccaaggagagcctgagccctgccaagtttgactacaagctgaagaacatcttccggctgcacgagctgcctgtgtcctgtgtgtccatgcagccccacaaggacatcctggtgtcctgtggggaggaccggctgtggaaggtgctgggcctgcccaagtgcaatgtgctgctgactggatttggccacacagactggctgagtgactgctgcttccaccccagcggggacaagctggccaccagcagcggggacaccaccgtgaagctgtgggacctgtgcaagggggactgcatcctgacctttgagggccacagcagagctgtgtggagctgcacctggcacagctgtggcaactttgtggccagcagcagcctggacaagaccagcaagatctgggatgtgaacagcgagcgctgccgctgcaccctgtatggccacacagacagcgtgaacagcattgagttcttccccttcagcaacaccctgctgaccagcagcgctgacaagaccctgagcatctgggatgccaggacaggcatctgtgagcagagcctgtatggccacatgcacagcatcaatgatgccatctttgacccccggggccacatgattgccagctgtgatgcctgtggggtgaccaagctgtgggacttcaggaagctgctgcccatcgtgtccattgacatcggccccagccctggaaatgaggtgaactttgacagcagcggccgggtgctggcccaggccagcggaaatggagtcatccacctgctggacctgaagtctggagagatccacaagctgatgggccatgaaaatgaggcccacacagtggtgttcagccatgatggagagatcctcttcagcggcggcagtgatggcaccgtgaggacctggagctag

SEQ ID NO: 300730 - DNA, 1614 bp, Artificial Sequence
  derived and/or modified sequence
atgaccatgaacatgaagcggtaccagatgaccatcctggccagccagaaggtgaagaaaatctggcagaaacagtttagatggccaaagaataggctccagatcctgaagttctggtatgaactgatacaaaaaggggtgacagaactgcgcactgttggcaatgtacctgatgtttacactcagattatgctgttggaaaacgagaacaaaaatctgaaaaaagacctcaagcattataaacaggcagctgataaagcacgagaggacctgctgaaaatccagaaggaacgagacttccacaggatgcaccataaacgcatcgtgcaggagaagaataagttaatcaacgacctgaaaggcctcaaactgcactatgccagctacgagcccaccattcgggtgctccatgagaaacaccatacgctgctgaaggaaaaaatgttgacttctttagagagagataaggtcgtaggccagatcagtggcctccaagagacactgaaaaagctgcagcgcgggcattcatatcacggtccgcagataaaagttgaccactcgagggaaaaagaaaatgcgcctgagggcccaacccaaaagggactcagagaggctcgagaacagaacaagtgcaaaaccaagatgaaagggaacactaaggatagcgagtttccaatagacatgcagcctaaccctaatctgaacgtttcaaaagagtctctgtccccggcaaaatttgattacaagctgaagaacatctttcgcctgcacgaactgcccgtcagttgtgttagtatgcaacctcacaaggatattctggtatcgtgtggagaagaccgcttgtggaaggtgttgggcctacctaagtgtaatgttcttctcaccggcttcgggcataccgattggttgagcgactgttgcttccatccgtcgggcgataagttggcaacctcgtcaggcgatactactgttaagctgtgggatttatgcaagggcgactgcattctgacgtttgagggccacagtagagccgtttggtcctgcacctggcacagttgtggcaactttgtggccagttccagcttggacaaaacaagcaaaatttgggatgtgaacagtgaacggtgtagatgcaccctgtacggccatacagacagtgtgaattcaatagagttcttccccttttctaacacactcctcacaagttctgccgataaaacgttgagcatctgggacgccagaaccggtatttgtgaacagtcactgtacggtcacatgcattcaattaatgatgccattttcgaccctagagggcatatgatagcctcttgtgatgcctgtggcgtcactaagctgtgggattttaggaaactgttgccaattgtgtccattgatattgggccgagtccgggcaacgaggttaattttgattccagcggccgagttcttgcccaggcctccggcaacggggtaattcaccttctggacttgaaatcaggcgagatccacaagctcatggggcacgagaacgaggcccatacggtggtgttcagtcacgatggggagatactattttcaggcggaagtgacggcacggtgcgcacctggagctag

SEQ ID NO: 300731 - DNA, 1614 bp, Artificial Sequence
  derived and/or modified sequence
atgacaatgaatatgaagcgataccagatgactatattagctagccagaaggtgaagaaaatctggcagaagcagtttagatggcccaaaaacagactgcaaatcctcaagttttggtatgagttaatccagaagggggtcaccgagctgcgcacagtgggaaacgttccagatgtgtatacacagattatgctgctcgaaaacgaaaataaaaatctcaaaaaagacctgaagcactacaagcaagctgctgacaaggcaagagaagacctgctcaagatccagaaagaaagggacttccatcgcatgcaccacaaaagaatcgttcaggagaaaaataaactgataaacgatctcaagggtctcaaattgcattacgcctcgtacgagccaacaataagggttctgcacgagaaacaccacaccttgcttaaggagaaaatgctgacttcccttgaacgagataaagtagtgggacagatctccgggttacaagaaacattaaagaagctgcagcgcggtcactcctaccatggacctcagataaaggtagatcattcccgggagaaggaaaatgcaccagaaggacctacacaaaagggtctgcgggaggctcgggaacagaacaagtgtaaaacaaagatgaagggtaacacaaaggattctgagtttcccattgacatgcagcccaacccgaacctgaatgtgagcaaagaatcactgtctcctgccaaatttgactacaagcttaaaaacattttcaggctgcatgaactgcccgtgtcttgtgtctccatgcagccccataaggatatacttgtcagctgtggagaggatcggctttggaaggtgttggggcttcccaaatgcaacgtgctgcttacaggattcggtcatactgattggctcagcgattgttgcttccaccctagcggagacaagttggcgacgtcgagtggggacacaacagtcaagctctgggacttgtgtaaaggagactgtatactcacctttgaaggtcacagcagagcagtttggtcatgtacatggcattcgtgtggcaattttgtggccagttcctctcttgacaagacatcaaagatctgggacgtgaatagcgagaggtgtcgttgcactctgtatgggcatacagactctgttaatagtatcgaattcttcccgtttagcaacacactgctcacgtctagcgctgataaaaccctgagcatttgggatgcacggacaggtatctgtgaacagtcactctatgggcacatgcactcaatcaatgatgcaatctttgatcctcgaggccacatgattgcctcctgcgacgcgtgcggtgtgacaaagctgtgggatttcaggaagctactccccatcgtttctatcgacatagggccttcccccggaaacgaagtgaatttcgactccagcggcagggttctcgctcaggcctctggcaacggggtgatccatctattggacctcaagtcgggcgaaatccacaaacttatgggacacgagaatgaggcccacactgtggttttttcccatgatggagaaatcctgttttctggaggctccgacggcaccgtgagaacctggagttag

SEQ ID NO: 300732 - DNA, 1614 bp, Artificial Sequence
  derived and/or modified sequence
atgactatgaatatgaagagataccagatgacaattttagcatcccagaaggtgaagaagatctggcaaaagcaattcagatggcccaagaacaggctacagatactgaaattttggtatgagttaatacagaaaggagtgactgaacttagaactgttgggaatgttccagatgtctacacccagattatgcttttggaaaatgagaacaaaaatttaaagaaagatttgaagcactacaaacaagcagctgacaaagctagagaagatttgctgaaaattcagaaagaacgtgattttcatcgaatgcatcataagcgaatagtccaggaaaaaaacaaattaattaatgacctcaaagggttgaagttacattatgcatcttatgaaccgactataagggtgttacatgagaaacaccacactttactgaaggagaaaatgctgacctccttggaaagagacaaagtagttgggcagatttctggacttcaagaaacattgaagaaactgcaaagaggacatagttaccatggtcctcaaattaaagttgatcatagtcgtgaaaaagaaaatgcaccagaaggtcctactcagaaaggtcttcgtgaagccagggaacaaaacaaatgtaaaacaaagatgaaaggcaatacaaaggattcagaatttcccatagatatgcaaccaaatccaaacctgaatgtttctaaagaaagtctttctccagcaaaatttgactacaagctgaaaaacatttttagactccatgaacttccagtgagctgtgtctccatgcaaccccacaaagacatcctagtctcctgtggcgaggaccgactctggaaggtgttgggccttccaaaatgcaatgtgcttctcacgggatttggccacactgactggctttcagactgctgcttccatcccagtggcgacaaattggctacttcaagtggtgacactacagttaaattatgggatctatgtaaaggcgattgcattttgacctttgaaggacacagccgcgcagtgtggtcctgcacatggcactcctgcggcaattttgtggcttcctcctcactggataaaactagcaaaatttgggatgttaatagtgaaagatgcagatgtactttgtatggacatacagattctgtgaacagcattgagttttttcctttctccaatactcttctcacaagctctgcagacaagaccctgtctatatgggatgcaagaacaggtatatgtgagcagtcactttatggtcacatgcattctatcaatgatgccatttttgatcccaggggtcacatgatagcatcctgtgatgcctgtggggttacaaagctgtgggactttcggaagctgttaccaattgtgtccatcgatataggtccaagtcctggcaatgaggtgaattttgattcatcaggtcgagttttagctcaggcaagtggcaatggtgttatccatttgctagatcttaaatctggggagattcacaaattgatgggccacgaaaacgaggcacacacggttgtgttttctcacgacggggagattctcttttctggaggctctgacggcacagttcgaacgtggtcttga

SEQ ID NO: 300733 - protein, 347 aa, Artificial Sequence
  derived and/or modified sequence
MAAQRGMPSSAVRVLEEALGMGLTAAGDARDTADAVAAEGAYYLEQVTITEASEDDYEYEEIPDDNFSIPEGEEDLAKAIQMAQEQATDTEILERKTVLPSKHAVPEVIEDFLCNFLIKMGMTRTLDCFQSEWYELIQKGVTELRTVGNVPDVYTQIMLLENENKNLKKDLKHYKQAADKAREDLLKIQKERDFHRMHHKRIVQEKNKLINDLKGLKLHYASYEPTIRVLHEKHHTLLKEKMLTSLERDKVVGQISGLQETLKKLQRGHSYHGPQIKVDHSREKENAPEGPTQKGLREAREQNKCKTKMKGNTKQWTGNSQTWNKTVPLQDTIGRRQENNSAHQHID

SEQ ID NO: 300734 - DNA, 1044 bp, Artificial Sequence
  derived and/or modified sequence
atggccgcccagagaggcatgcccagcagcgccgtgagagtgctggaggaggccctgggcatgggcctgaccgccgccggcgacgccagagacaccgccgacgccgtggccgccgagggcgcctactacctggagcaggtgaccatcaccgaggccagcgaggacgactacgagtacgaggagatccccgacgacaacttcagcatccccgagggcgaggaggacctggccaaggccatccagatggcccaggagcaggccaccgacaccgagatcctggagagaaagaccgtgctgcccagcaagcacgccgtgcccgaggtgatcgaggacttcctgtgcaacttcctgatcaagatgggcatgaccagaaccctggactgcttccagagcgagtggtacgagctgatccagaagggcgtgaccgagctgagaaccgtgggcaacgtgcccgacgtgtacacccagatcatgctgctggagaacgagaacaagaacctgaagaaggacctgaagcactacaagcaggccgccgacaaggccagagaggacctgctgaagatccagaaggagagagacttccacagaatgcaccacaagagaatcgtgcaggagaagaacaagctgatcaacgacctgaagggcctgaagctgcactacgccagctacgagcccaccatcagagtgctgcacgagaagcaccacaccctgctgaaggagaagatgctgaccagcctggagagagacaaggtggtgggccagatcagcggcctgcaggagaccctgaagaagctgcagagaggccacagctaccacggcccccagatcaaggtggaccacagcagagagaaggagaacgcccccgagggccccacccagaagggcctgagagaggccagagagcagaacaagtgcaagaccaagatgaagggcaacaccaagcagtggaccggcaacagccagacctggaacaagaccgtgcccctgcaggacaccatcggcagaagacaggagaacaacagcgcccaccagcacatcgactag

SEQ ID NO: 300735 - DNA, 1044 bp, Artificial Sequence
  derived and/or modified sequence
atggcggcgcagaggggaatgccctcctctgccgtgagggtcctcgaagaggctctaggtatgggcctcacagcagcgggcgatgcccgcgatactgcagacgctgtggcagccgaaggagcctattatcttgaacaagtgacaattacagaagctagcgaagacgattacgaatatgaagagatccccgacgacaacttctccattcctgaaggtgaggaagatctggctaaggcgatccagatggcacaggaacaagctacagatactgagatactagagcgcaagacggtcctaccaagcaaacatgccgtgccagaggtgattgaagacttcttgtgcaacttcctgattaagatggggatgacgcgcaccctcgattgcttccagagcgagtggtatgaattgattcagaaaggggtgacggaattgcgaaccgtgggcaacgtcccagatgtgtatacccaaataatgctcctcgagaacgaaaataaaaatctgaagaaagatctcaagcactacaagcaagctgccgataaggcccgggaggacctcctcaagatccaaaaggagagagattttcataggatgcaccacaaaagaatcgtccaggaaaagaacaaactgattaatgatctgaaaggcctgaaactccactacgcaagttatgagccaacgatcagagtgctccatgaaaaacatcacactctcctcaaagagaaaatgctgacctccctggagcgggacaaagtcgtcgggcaaatttctggcttgcaggagactctgaagaaacttcaacgagggcacagctatcacggtcctcaaattaaggtggatcatagccgggagaaggagaacgctccagagggccccacgcaaaagggcctacgggaggcgcgggaacaaaacaaatgtaagaccaagatgaagggtaataccaagcagtggaccgggaactctcaaacttggaataagactgtgccgctacaagataccatcggaagaagacaggagaataatagcgcccaccagcacatcgactag

SEQ ID NO: 300736 - DNA, 1044 bp, Artificial Sequence
  derived and/or modified sequence
atggccgcccagaggggcatgcccagcagcgctgtgcgggtgctggaggaggccctgggcatgggcctgacagctgctggagatgcccgggacacagcagatgctgtggccgctgagggcgcctactacctggagcaggtgaccatcacagaggcctctgaagatgattatgaatatgaggagatcccagatgacaacttcagcatccctgagggggaggaggacctggccaaggccatccagatggcccaggagcaggccacagacacagagatcctggagaggaagacagtgctgcccagcaagcatgctgtgcctgaggtgattgaggacttcctgtgcaacttcctgatcaagatgggcatgaccaggaccctggactgcttccagagcgagtggtatgagctgatccagaagggcgtgacagagctgaggacagtgggcaatgtgcctgatgtgtacacccagatcatgctgctggagaatgaaaacaagaacctgaagaaggacctgaagcactacaagcaggccgctgacaaggcccgggaggacctgctgaagatccagaaggagcgggacttccacaggatgcaccacaagagaattgtgcaggagaagaacaagctgatcaatgacctgaagggcctgaagctgcactacgccagctatgagcccaccatccgggtgctgcacgagaagcaccacaccctgctgaaggagaagatgctgaccagcctggagcgggacaaggtggtgggccagatcagcggcctgcaggagaccctgaagaagctgcagaggggccacagctaccacggcccccagatcaaggtggaccacagccgggagaaggaaaatgcccctgagggccccacccagaagggcctgcgggaggcccgggagcagaacaagtgcaagaccaagatgaagggcaacaccaagcagtggacaggcaacagccagacctggaacaagacagtgcccctgcaggacaccatcggccggcggcaggagaacaacagcgcccaccagcacatcgactag

SEQ ID NO: 300737 - DNA, 1044 bp, Artificial Sequence
  derived and/or modified sequence
atggccgcccagcggggcatgcccagcagcgccgtgcgggtgctggaagaagcccttggtatgggcctcaccgcggcaggagatgcccgggacacagcggacgcagtcgctgcggagggtgcctattatctcgagcaagtaacaatcactgaagccagcgaggatgactacgagtacgaggaaattccggacgacaatttctcaatcccagagggagaagaagacttggctaaagccattcagatggctcaagagcaggccaccgacacggaaattctggagcgtaagaccgttttgccaagcaaacacgccgtgccggaagttatcgaagatttcctctgcaactttctgatcaaaatggggatgacccggacactagactgcttccaatccgaatggtatgaactgattcaaaagggagtgacggagcttcgtacagtgggcaatgtgcccgacgtttacacacaaattatgctgctagagaacgagaataaaaacctcaagaaagacctcaagcactacaagcaggcggctgacaaggcgagagaggacctgctgaaaatccagaaagagagggacttccacagaatgcaccacaaacgcattgtgcaggaaaagaacaagcttataaatgatctgaaaggcttgaaacttcactacgcaagctacgagcccaccatccgcgtcttacacgagaagcaccacacactccttaaggagaaaatgctcacaagcctggagagagacaaggtggtgggccagataagcggactgcaggagaccttgaaaaagcttcaacgcggccattcctaccatgggccccagatcaaggtcgatcacagcagggagaaggaaaacgcgcccgagggccctacgcaaaaagggctgcgcgaggccagagagcaaaataagtgtaaaacaaaaatgaaggggaatactaagcaatggactggcaactctcagacctggaacaaaactgtgccgctgcaagataccatcggtagaaggcaggagaacaacagcgcacaccagcacatcgattag

SEQ ID NO: 300738 - DNA, 1044 bp, Artificial Sequence
  derived and/or modified sequence
atggctgctcaaagggggatgccatcttccgctgtaagggtgctggaagaggcccttggaatggggcttaccgcagccggagacgcacgcgacaccgcagacgctgtcgcagcagagggagcgtactatctcgaacaggtgacaattaccgaggcatctgaggatgattatgaatatgaggagatccccgacgacaattttagcataccagagggcgaggaggacctggccaaagcaatccagatggcacaggaacaggctactgacacagaaatcctggagagaaagaccgttctccctagtaaacatgcagtcccagaagtcatcgaagatttcctctgcaacttccttatcaaaatgggtatgacacggacactagactgctttcagtccgagtggtacgaacttattcaaaaaggcgtcactgagctgcgtactgtgggtaacgtcccagatgtgtatacccagatcatgcttctcgagaacgagaacaaaaatctcaaaaaggatctgaagcattacaaacaagccgctgataaagctagagaggacctgctcaaaatccaaaaagagagggatttccatagaatgcatcacaagagaatagtccaggagaaaaacaagcttatcaatgatctgaaaggattaaagctccactacgcatcctacgagcctaccatccgggtcctccacgaaaagcaccatactctacttaaggagaaaatgttgacttccctcgagcgcgacaaagtcgtcggccagatctctggcctacaggaaacgctgaagaaactccagcgaggccattcctaccacggccctcaaattaaggtggaccacagccgtgagaaagagaacgcgcctgagggtccaacacaaaaggggctacgcgaagctcgggagcagaataaatgtaaaactaagatgaagggaaacaccaaacagtggacggggaacagccagacgtggaataagacagtgccactgcaagatactattgggagacggcaggaaaataattctgcacaccagcacatcgactag

SEQ ID NO: 300739 - DNA, 1048 bp, Artificial Sequence
  derived and/or modified sequence
agagatggctgctcagcgagggatgcccagctccgccgtgagggtcctggaagaggcgttgggcatgggtttgacggcagccggggacgcgagggacacggcggacgcggtggcggctgagggcgcctactacctggaacaggtcaccataactgaagcatctgaagatgactatgaatatgaagagataccagatgacaattttagcatcccagaaggtgaagaagatctggcaaaagcaattcagatggcccaagaacaggctacagatactgaaattttggaacggaaaacagttcttccttcaaagcatgcagtacctgaagtaatagaagactttctctgcaatttcttgatcaaaatgggaatgaccagaactcttgattgctttcagtctgaatggtatgagttaatacagaaaggagtgactgaacttagaactgttgggaatgttccagatgtctacacccagattatgcttttggaaaatgagaacaaaaatttaaagaaagatttgaagcactacaaacaagcagctgacaaagctagagaagatttgctgaaaattcagaaagaacgtgattttcatcgaatgcatcataagcgaatagtccaggaaaaaaacaaattaattaatgacctcaaagggttgaagttacattatgcatcttatgaaccgactataagggtgttacatgagaaacaccacactttactgaaggagaaaatgctgacctccttggaaagagacaaagtagttgggcagatttctggacttcaagaaacattgaagaaactgcaaagaggacatagttaccatggtcctcaaattaaagttgatcatagtcgtgaaaaagaaaatgcaccagaaggtcctactcagaaaggtcttcgtgaagccagggaacaaaacaaatgtaaaacaaagatgaaaggcaatacaaagcagtggacagggaactctcaaacttggaataagaccgtacctctgcaggacactattggcaggagacaagagaacaacagtgcacaccagcacatcgactaa

SEQ ID NO: 300740 - protein, 254 aa, Artificial Sequence
  derived and/or modified sequence
MIEICLNPDNETVGGEVFENLDGDLGNSTEKQESVQLAVRTAEKLLKELKPQTVQGHVQLRIMENYCLMATKQKSNVEQALNTFTEIAASEKEHIPALLGMATAYMILKQTPRARNQLKRIAKMNWNAIDAEEFEKSWLLLADIYIQSAKYDMAEDLLKRCLRHNRSCCKAYEYMGYIMEKEQAYTDAALNYEMAWKYSNRTNPAVGYKLAFNYLKAKRYVDSIDICHQVLEAHPTYPKIRKDILDKARASLRP

SEQ ID NO: 300741 - DNA, 765 bp, Artificial Sequence
  derived and/or modified sequence
atgatcgagatctgcctgaaccccgacaacgagaccgtgggcggcgaggtgttcgagaacctggacggcgacctgggcaacagcaccgagaagcaggagagcgtgcagctggccgtgagaaccgccgagaagctgctgaaggagctgaagccccagaccgtgcagggccacgtgcagctgagaatcatggagaactactgcctgatggccaccaagcagaagagcaacgtggagcaggccctgaacaccttcaccgagatcgccgccagcgagaaggagcacatccccgccctgctgggcatggccaccgcctacatgatcctgaagcagacccccagagccagaaaccagctgaagagaatcgccaagatgaactggaacgccatcgacgccgaggagttcgagaagagctggctgctgctggccgacatctacatccagagcgccaagtacgacatggccgaggacctgctgaagagatgcctgagacacaacagaagctgctgcaaggcctacgagtacatgggctacatcatggagaaggagcaggcctacaccgacgccgccctgaactacgagatggcctggaagtacagcaacagaaccaaccccgccgtgggctacaagctggccttcaactacctgaaggccaagagatacgtggacagcatcgacatctgccaccaggtgctggaggcccaccccacctaccccaagatcagaaaggacatcctggacaaggccagagccagcctgagaccctag

SEQ ID NO: 300742 - DNA, 765 bp, Artificial Sequence
  derived and/or modified sequence
atgattgagatatgtctgaatcccgacaacgagacagtgggtggagaagtgttcgagaacttggatggcgatctggggaactcaaccgaaaaacaggagtctgtgcagcttgctgtcagaacagccgaaaagcttctcaaagaactgaagccccagacagtgcaggggcacgtgcagctcaggattatggaaaactattgcctaatggccactaagcagaagtccaacgtcgagcaggccctcaacactttcaccgagatcgccgcgagcgaaaaggagcacatcccggctttgctaggaatggccacagcttacatgatcttaaaacagacccccagggccagaaaccaactcaaaagaatcgctaaaatgaactggaatgccattgacgccgaggagttcgagaagtcttggttgctgctggccgatatctacatccagagcgctaagtatgatatggccgaggatcttttgaagaggtgcctccgtcataaccgaagttgctgcaaggcctacgaatacatgggttacatcatggaaaaggaacaagcatacaccgatgccgccctcaattatgagatggcctggaagtattccaaccgaactaatccagcagtgggctataaactagcattcaactacttgaaggcaaaacggtatgtcgacagcatcgatatctgccatcaggtcttagaggcgcatccaacctaccccaagatccgtaaggatattctcgataaggccagggcgagtctgagaccttag

SEQ ID NO: 300743 - DNA, 765 bp, Artificial Sequence
  derived and/or modified sequence
atgattgagatctgcctgaacccagacaatgagaccgtgggcggggaggtgtttgagaacctggatggagacctgggcaacagcacagagaagcaggagagcgtgcagctggccgtgaggacagctgagaagctgctgaaggagctgaagccccagacagtgcagggccacgtgcagctgcgcatcatggagaactactgcctgatggccaccaagcagaagagcaatgtggagcaggccctgaacaccttcacagaaattgctgccagcgagaaggagcacatcccagccctgctgggcatggccacagcctacatgatcctgaagcagaccccccgggccaggaaccagctgaagagaattgccaagatgaactggaatgccattgatgctgaggagtttgagaagtcctggctgctgctggccgacatctacatccagagcgccaagtatgacatggccgaggacctgctgaagcgctgcctgcggcacaacagaagctgctgcaaggcctatgagtacatgggctacatcatggagaaggagcaggcctacacagatgctgccctgaactatgagatggcctggaagtacagcaacagaaccaacccagctgtgggctacaagctggccttcaactacctgaaggccaagcgctacgtggacagcattgacatctgccaccaggtgctggaggcccaccccacctaccccaagatcaggaaggacatcctggacaaggcccgggccagcctgcggccctag

SEQ ID NO: 300744 - DNA, 765 bp, Artificial Sequence
  derived and/or modified sequence
atgatcgagatctgcctgaaccccgacaacgagaccgtgggcggcgaggtttttgaaaacctcgacggcgacttaggcaactctacagagaagcaggaatctgtccagctggcagtccgtacagccgaaaagttgctcaaggaattaaagcctcagacagtgcaggggcacgtgcagttaagaatcatggagaattattgccttatggcgactaagcagaagagcaatgtggagcaagctctgaacacgtttactgagatagcagcgtcagaaaaagaacatatccccgccctgctcggtatggcaaccgcctatatgattcttaaacaaacacctcgggcaaggaaccagttaaaaaggatcgccaaaatgaattggaatgccatagatgctgaggagtttgaaaagagttggttgcttctggccgatatctacatccagtccgcaaagtacgatatggccgaagacctactgaagcgatgtttgcgccataacagaagttgctgtaaagcttacgaatatatgggttacatcatggaaaaggagcaagcctacaccgatgccgcactcaactacgagatggcctggaagtattctaaccgaaccaatccagctgtgggctataagctggccttcaactacctcaaagccaaaagatatgtcgactccatagatatttgccaccaggtgctcgaggcccatcctacgtacccgaagattcgcaaggatatactggataaggctcgcgcaagtctgagaccgtag

SEQ ID NO: 300745 - DNA, 765 bp, Artificial Sequence
  derived and/or modified sequence
atgatcgagatctgcctcaacccagataacgaaaccgtgggcggtgaagttttcgaaaacttagacggcgacctgggcaacagcaccgaaaagcaggagagcgtccaactggccgtgaggactgcagaaaagctcctgaaagaacttaagccacagacagtgcaaggacacgtgcagcttcgcattatggaaaattactgtctgatggctaccaaacagaaatcaaatgtagagcaagctcttaataccttcaccgagatagcagctagtgaaaaagagcatattcccgctctgttaggtatggctacagcctatatgatcctcaaacagaccccccgagccaggaatcaactcaaacgtattgccaaaatgaactggaatgcaatcgatgccgaggagttcgagaaatcgtggctactgctagctgacatttatatccagtccgcaaaatatgacatggccgaggacctcctgaaacggtgtctgcggcacaaccggtcctgttgtaaggcttatgaatatatgggatacataatggaaaaggaacaggcctataccgatgcagcgctgaactacgaaatggcttggaagtacagtaatcgcaccaaccccgcagtgggttataaactggccttcaattatctgaaggccaagcggtatgtggacagcattgatatctgccaccaggttttggaagcccaccccacctacccgaagatccgcaaagatatcttagataaagctagagcaagtttaaggccatag

SEQ ID NO: 300746 - DNA, 1589 bp, Artificial Sequence
  derived and/or modified sequence
taaaggactgtatctttggtacactggagaaccaaatgatgcccttcgacattttaataaagctcggaaagatcgtgactggggccaaaatgccctttataatatgatagagatctgtttgaatccagataatgaaactgttggaggtgaagtatttgaaaacctggatggagacctgggtaattcaactgagaagcaagaatctgtgcaactggcagtaagaacagcagaaaaacttcttaaggaactaaaacctcagactgttcagggtcacgtacagcttcgcataatggaaaactattgcttaatggctaccaaacagaaatctaatgttgaacaagcattaaataccttcactgaaatagcagcatctgagaaggagcatatcccagcgctcttgggaatggcaacggcttatatgatcttgaaacagactccacgagccagaaaccagctgaagcgtattgcgaaaatgaattggaatgctattgatgctgaagagtttgagaagagttggctgctacttgctgatatttacattcaatcagcaaaatatgacatggcagaagacctgttaaaacggtgcctgcgtcataatagatcttgctgcaaagcttatgaatatatgggatacattatggaaaaagagcaagcatatacagatgctgccttgaactatgagatggcatggaaatatagcaatcggacaaatccggcagtaggatacaaactggcatttaattacttaaaagcaaaaagatatgtggattcaattgacatatgtcaccaggttcttgaagcacatccaacttatccaaaaatcagaaaggatatacttgataaggcccgtgcgtctttaagaccttgaaaataattttaacttaggtgttggtttaacaggaaatgaaagaaatctaactttcagttcttcctgttcaaaacaggatttgattgccttatgtgacaagcccaagatctgtgacagttggagctcaaactaggcagtcttgattccagactgctctgaactagtatttgaaggaactaatgaacatgacatgttaaatgaaagtttggggacgtacactcaggatggaagcagggggacacaacagaaatgaaagaattttctgtagatctgggatctggacacctgccccccgtcatgaataaatgccatcccttcccacgccaaccatatcgatgatatagtggcaggaaggagagtaagggactctggagcttaaacagaccatcacatgggaaggcagtaaacaagatgctaactgatggagtgaaatccccaggagatgcagaaggcaagtgcagctaactgaggcctcaggggcaggagatgcccatcaggatgagagctatgtctttctccagtgatgactctgcttctatgaggtcaccagcagtagaaccatatcttgctggcatacacttgggatggccccgcctcctggacttccatctgtcatcaggagaacataaccatctggagtcagtacagatcatcaatccttccacatatacaagttcattttaaatttttaaaaatataatacaactgagaagtcttcatt

SEQ ID NO: 300747 - protein, 430 aa, Artificial Sequence
  derived and/or modified sequence
MFLHSVNLWNLAFYVFMVFLATLGLWDVFFGFEENKCSMSYMFEYPEYQSSAVPKTWVSTDHLSIVWCKQLQLTTVRAFFDLIDADTKQITQNSKKKLSVLYHHFIRHPSKHFEENPAIISDLTGTSMWVLVKVSKWTYVAYNESEKIYFTFPLENHRKIYTHVYCQSTMLDTNSWIFACINSTSMCLQGVDLSWKAELLPTIKYLTLRLQDYPSLSHLVVYVPSVRGSKFVVDCEFFKKEKRYIQLPVTHLFSFGLSSRKVVLNTNGLYYNLELLNFGQIYQAFKINVVSKCSAVKEEITSIYRLHIPWSYEDSLTIAQAPSSTEISLKLHIAQPENNTHVALFKMYTSSDCRYEVTVKTSFSQILGQVVRFHGGALPAYVVSNILLAYRGQLYSLFSTGCCLEYATMLDKEAKPYKVDPFVIIIKFLL

SEQ ID NO: 300748 - DNA, 1293 bp, Artificial Sequence
  derived and/or modified sequence
atgttcctccattccgtgaacctgtggaacctggctttttacgtgtttatggtgtttctggccactcttggcttatgggacgtgttcttcggtttcgaagagaacaaatgttctatgtcctacatgttcgagtatcctgagtaccagtcctcggccgttcctaaaacatgggtctcaaccgatcacttgtctatcgtgtggtgcaaacagctgcaactcactaccgtccgcgcattttttgacctgatcgacgcggacactaagcagatcacgcaaaacagtaaaaagaaactgtcggtgctctaccatcatttcatcagacatcccagcaagcatttcgaggagaatccggcgataatttcagatctgacaggcacctctatgtgggtactcgtgaaagtgagtaagtggacgtacgtggcttacaatgagagcgagaaaatttacttcacgttcccacttgaaaaccatagaaaaatttacactcatgtgtattgtcaatcaacgatgctggacacaaatagttggatttttgcctgtatcaactccacctcaatgtgtctgcagggagtggacctgtcctggaaagcagagctcctacctactatcaagtatttaactctccgtctgcaggactaccccagcctgagtcatcttgtcgtctacgttccatctgtgcgggggagcaaattcgtggtggattgtgagttctttaaaaaggagaagaggtatatccagctgcccgtgacccaccttttctcttttgggctttctagccgcaaggtggttctgaacaccaatggcctgtactataacctggaacttctcaactttggacagatatatcaggctttcaagatcaacgtggtgtcaaaatgttcagccgtaaaggaagaaataacaagcatctaccgtctacatataccatggtcatatgaagattcattgaccatagcccaagcaccatcatcaacagaaataagtctcaaactgcatatcgcacagcccgagaacaacacacatgtcgcactcttcaaaatgtacacttcctccgactgccgctatgaagtgacggttaagacctccttcagccagatattaggacaagttgtgcgcttccatggcggtgccctgccagcctatgttgtgtctaatattctcctggcttatcggggccagctttattccctctttagcaccggatgttgtttagagtacgctacaatgcttgataaggaggctaaaccttataaagtggatccgttcgtcatcattataaaattcttactgtag

SEQ ID NO: 300749 - DNA, 1293 bp, Artificial Sequence
  derived and/or modified sequence
atgttcctgcacagcgtgaacctgtggaacctggccttctacgtgttcatggtgttcctggccaccctgggcctgtgggatgtgttcttcggctttgaggagaacaagtgcagcatgagctacatgtttgagtacccagagtaccagagcagcgctgtgcccaagacctgggtgtccacagaccacctgagcatcgtgtggtgcaagcagctgcagctgaccaccgtgcgggccttctttgacctgattgatgctgacaccaagcagatcacccagaacagcaagaagaagctgtctgtgctgtaccaccacttcatccgccaccccagcaagcactttgaagaaaatcctgccatcatcagtgacctgaccggcacctccatgtgggtgctggtgaaggtgtccaagtggacctacgtggcctacaatgaaagtgagaagatctacttcaccttccccctggagaaccacaggaagatctacacccacgtgtactgccagagcaccatgctggacaccaacagctggatctttgcctgcatcaacagcacctccatgtgcctgcagggcgtggacctgtcctggaaggccgagctgctgcccaccatcaagtacctgaccctgcggctgcaggactaccccagcctgagccacctggtggtgtatgtgcccagcgtgcggggcagcaagtttgtggtggactgtgagttcttcaagaaggagaagcgctacatccagctgcctgtgacccacctgttctcctttggcctgagcagcaggaaggtggtgctgaacaccaacggcctgtactacaacctggagctgctgaactttggccagatctaccaggccttcaagatcaacgtggtgtccaagtgcagcgctgtgaaggaggagatcaccagcatctaccgcctgcacatcccctggagctatgaggacagcctgaccatcgcccaggcccccagcagcacagagatcagcctgaagctgcacatcgcccagcctgagaacaacacccacgtggccctcttcaagatgtacaccagcagtgactgccgctatgaggtgacagtgaagaccagcttcagccagatcctgggccaggtggtgcgcttccacggcggggccctgcctgcctacgtggtgagcaacatcctgctggcctaccggggccagctgtacagcctcttcagcacaggctgctgcctggagtatgccaccatgctggacaaggaggccaagccctacaaggtggaccccttcgtcatcatcatcaagttcctgctgtag

SEQ ID NO: 300750 - DNA, 1293 bp, Artificial Sequence
  derived and/or modified sequence
atgttcctgcacagcgtgaacctgtggaacctggccttctacgtgttcatggttttcctggccacgttgggactgtgggacgtgttctttggcttcgaagaaaacaagtgttccatgtcttacatgttcgagtatccagagtaccaaagcagtgcggtacccaagacttgggtgagcactgatcatctgagtatcgtatggtgtaaacagttacagctgactacagtgcgagcattcttcgacttgatcgacgcggataccaagcagattacccagaactcaaaaaagaaactatccgtattgtaccaccactttattcgtcatcctagtaaacacttcgaggagaaccctgcaatcatatccgacctcaccggtacatctatgtgggtactggtcaaagtcagcaagtggacttatgtagcctataatgaatcagaaaagatctattttacattcccgctggagaatcataggaagatatatactcatgtgtactgccaatctaccatgcttgatacaaacagctggatcttcgcctgtattaactctactagcatgtgcttgcagggcgtggacctttcctggaaggccgagctgcttccaacgatcaagtaccttacccttcggctgcaggactatccctctctgtctcatcttgtcgtctatgtcccatcagtaaggggttctaaatttgtggtggactgtgagttctttaaaaaagagaaacgatatatacaactccctgtgacgcatttgttcagctttggactgagctcccggaaagtggtcctgaatacaaacgggctgtattacaatttagagttgctgaacttcggtcaaatttaccaggctttcaagataaatgttgtcagtaaatgttcagccgttaaggaggagataacctccatatatcgcttgcacattccttggagctatgaagatagtctcacaatcgctcaggctccttccagcaccgagataagtctaaaactacatattgcccaacccgagaacaacactcatgttgcgctgtttaaaatgtacacttcctcagactgcagatacgaagtcaccgtgaaaacttctttctcacagattctgggtcaggtagtcagattccatggcggagctctgcccgcttatgtggtctcaaatatcctgcttgcatatagaggtcagctatatagcttgttcagcacagggtgctgcctcgagtacgccacgatgttggacaaggaagccaagccctacaaggtcgaccccttcgttatcattatcaaattcctactgtag

SEQ ID NO: 300751 - DNA, 1293 bp, Artificial Sequence
  derived and/or modified sequence
atgtttcttcactctgtgaatctgtggaacctggccttctacgtattcatggtctttctcgctaccctgggcttgtgggacgtgttctttggctttgaggagaacaagtgctcaatgagctacatgtttgaataccctgaataccagtctagcgcagtgccgaagacatgggtctcaactgaccatctatctattgtgtggtgtaagcagctgcagttgaccacagtgcgcgctttcttcgacctgattgacgccgacactaagcagatcacgcagaacagtaagaagaagcttagcgtactatatcaccattttattcgccatcccagcaaacacttcgaagaaaatcctgcaattatctcggatctcaccggcaccagtatgtgggtgctcgtaaaggtgtctaagtggacctacgtggcctacaacgaatctgagaagatctatttcacatttcctttagagaaccacaggaaaatttacactcatgtgtattgtcagtctacaatgctggataccaatagctggatttttgcatgtattaacagcacttccatgtgcttacagggggtggacctctcttggaaggcagagctactccctacaattaaatacctcaccctcaggctacaggactacccatctctgtcgcatcttgttgtgtacgttccgagcgttagaggatcaaagttcgtcgtagattgcgagttctttaagaaagagaagcgttacatccagctcccggtcacacatctttttagctttgggttaagcagccggaaagtggtgcttaatacgaacggcctgtactacaatctagagcttcttaattttggacagatttaccaggcttttaagattaacgtagttagcaaatgctcagccgttaaggaggaaatcacctctatataccgattgcatatcccttggtcttatgaggatagtctgaccattgcacaggcaccttcatccacggaaatcagcctcaagctgcacatcgctcagcctgagaacaacacacatgtggctctgtttaaaatgtacacctcaagtgactgccggtacgaagtgacggtgaagacttcgttttcccagatattggggcaggtggtgagattccatggaggcgctcttcctgcttacgtagtctccaacattctactcgcatacagaggacagctgtacagcctgttttctacagggtgttgtctggaatacgccaccatgcttgacaaagaggcaaagccttacaaggtcgatccctttgtcatcattattaaatttttactgtag

SEQ ID NO: 300752 - DNA, 1293 bp, Artificial Sequence
  derived and/or modified sequence
atgttcctgcacagcgtgaacctgtggaacctggccttctacgtgttcatggtgttcctggccaccctgggcctgtgggacgtgttcttcggcttcgaggagaacaagtgcagcatgagctacatgttcgagtaccccgagtaccagagcagcgccgtgcccaagacctgggtgagcaccgaccacctgagcatcgtgtggtgcaagcagctgcagctgaccaccgtgagagccttcttcgacctgatcgacgccgacaccaagcagatcacccagaacagcaagaagaagctgagcgtgctgtaccaccacttcatcagacaccccagcaagcacttcgaggagaaccccgccatcatcagcgacctgaccggcaccagcatgtgggtgctggtgaaggtgagcaagtggacctacgtggcctacaacgagagcgagaagatctacttcaccttccccctggagaaccacagaaagatctacacccacgtgtactgccagagcaccatgctggacaccaacagctggatcttcgcctgcatcaacagcaccagcatgtgcctgcagggcgtggacctgagctggaaggccgagctgctgcccaccatcaagtacctgaccctgagactgcaggactaccccagcctgagccacctggtggtgtacgtgcccagcgtgagaggcagcaagttcgtggtggactgcgagttcttcaagaaggagaagagatacatccagctgcccgtgacccacctgttcagcttcggcctgagcagcagaaaggtggtgctgaacaccaacggcctgtactacaacctggagctgctgaacttcggccagatctaccaggccttcaagatcaacgtggtgagcaagtgcagcgccgtgaaggaggagatcaccagcatctacagactgcacatcccctggagctacgaggacagcctgaccatcgcccaggcccccagcagcaccgagatcagcctgaagctgcacatcgcccagcccgagaacaacacccacgtggccctgttcaagatgtacaccagcagcgactgcagatacgaggtgaccgtgaagaccagcttcagccagatcctgggccaggtggtgagattccacggcggcgccctgcccgcctacgtggtgagcaacatcctgctggcctacagaggccagctgtacagcctgttcagcaccggctgctgcctggagtacgccaccatgctggacaaggaggccaagccctacaaggtggaccccttcgtgatcatcatcaagttcctgctgtag

SEQ ID NO: 300753 - protein, 304 aa, Artificial Sequence
  derived and/or modified sequence
MEVLESKKIELPKKLAKRYPAYELYLYGEGSYAEEHKILPLTGIPVLFLPGNAGSYKQVRSIGSIALRKAEDIDFKYHFDFFSVNFNEELVALYGGSLQKQTKFVHECIKTILKLYKGQEFAPKSVAIIGHSMGGLVARALLTLKNFKHDLINLLITQATPHVAPVMPLDRFITDFYTTVNNYWILNARHINLTTLSVAGGFRDYQVRSGLTFLPKLSHHTSALSVVSSAVPKTWVSTDHLSIVWCKQLQLTTVRAFFDLIDADTKQITQNSKKKLSVLYHHFIRHPSKHFEENPAIISDLTGI

SEQ ID NO: 300754 - protein, 592 aa, Artificial Sequence
  derived and/or modified sequence
MFLHSVNLWNLAFYVFMVFLATLGLWDVFFGFEENKCSMSYMFEYPEYQKIELPKKLAKRYPAYELYLYGEGSYAEEHKILPLTGIPVLFLPGNAGSYKQVRSIGSIALRKAEDIDFKYHFDFFSVNFNEELVALYGGSLQKQTKFVHECIKTILKLYKGQEFAPKSVAIIGHSMGGLVARALLTLKNFKHDLINLLITQATPHVAPVMPLDRFITDFYTTVNNYWILNARHINLTTLSVAGGFRDYQVRSGLTFLPKLSHHTSALSVVSSAVPKTWVSTDHLSIVWCKQLQLTTVRAFFDLIDADTKQITQNSKKKLSVLYHHFIRHPSKHFEENPAIISDLTGTSMWVLVKVSKWTYVAYNESEKIYFTFPLENHRKIYTHVYCQSTMLDTNSWIFACINSTSMCLQGVDLSWKAELLPTIKYLTLRLQDYPSLSHLVVYVPSVRGSKFVVDCEFFKKEKRYIQLPVTHLFSFGLSSRKVVLNTNGLYYNLELLNFGQIYQAFKINVVSKCSAVKEEITSIYRLHIPWSYEDSLTIAQAPSSTEISLKLHIAQPENNTHVALFKMYTSSDCRYEVTVKTSFSQILGQVVA

SEQ ID NO: 300755 - DNA, 915 bp, Artificial Sequence
  derived and/or modified sequence
atggaagtactcgagtcaaagaagattgagcttcccaagaagctggctaagcggtacccggcctatgagttatacctctatggggaaggctcatacgccgaggaacacaaaattcttcctctcaccggtatccccgtcctcttccttccaggcaacgccggcagctacaaacaggtgcggtcaatcgggtctatcgcactccgaaaggccgaggacatagacttcaagtatcattttgacttcttctcagtgaattttaacgaggaattggtcgcactatacggtggttccctccagaaacagacaaagtttgtgcatgagtgcattaagaccattctgaaattatacaaggggcaggagttcgctccaaagagtgttgctatcatcggccactcaatgggcggcctggttgctcgcgccttgcttaccttaaagaacttcaaacacgatctgatcaacttattaatcacccaagctacaccccacgtggcgcccgtgatgcctttggaccgattcatcaccgatttctacaccactgttaacaactactggatcctgaacgccagacatattaatctcacaactctgagcgtcgcagggggcttccgcgactaccaggtgcggtccggcctcaccttcctcccaaaactgtcacaccatacatctgctttaagtgtcgtgtctagcgccgtgcctaaaacatgggtctccactgaccacctttccatagtgtggtgcaagcagctgcaactgacaacggtgagagccttctttgatttgattgacgctgacactaagcaaatcactcaaaattccaagaagaaactatctgtgctataccaccatttcatccgtcaccccagcaagcacttcgaagagaaccctgctattatctccgatttgaccggcatctag

SEQ ID NO: 300756 - DNA, 1779 bp, Artificial Sequence
  derived and/or modified sequence
atgtttcttcacagtgtcaatttatggaacttggcgttctacgtgtttatggttttcctcgcaacactcggcctgtgggatgtattctttgggtttgaggagaacaagtgttccatgtcttacatgttcgagtatccagagtaccaaaagatcgaacttcccaagaaactggctaaacggtacccagcatatgaactgtacctctacggtgaaggttcatatgccgaggaacataagatcctcccactcacaggcatcccagttctctttctgccaggaaatgcagggagctacaagcaggtcaggagtatcgggtctatcgccctgaggaaagcggaagacatcgactttaaataccatttcgactttttctccgtgaacttcaacgaagaacttgtggccttgtacgggggatccctccagaaacagaccaagttcgtccacgaatgcattaagaccatactgaagctttacaaaggccaggagtttgctcccaaaagtgtggccatcattggccattctatgggcgggctcgtagcccgcgctttgttaaccctcaagaactttaagcatgacttgattaacctactcataacacaggccaccccgcacgtcgctcctgttatgccgctggaccggtttatcactgacttctataccacagtgaataattattggattctgaatgcccgacacatcaacttgactactcttagcgtagccggcgggtttagagactatcaggtgagatcagggttaacattccttcccaaattatcacatcacactagcgcactgtcggtggtgagctccgcggtcccaaaaacatgggtgagtactgaccacctttccattgtttggtgtaagcagctccagctcaccaccgtgcgcgctttcttcgacctgatagatgctgataccaaacagattactcagaactcgaaaaaaaagcttagcgtgttgtaccatcatttcatacgccatccatccaagcatttcgaggagaacccagccataattagcgaccttactggtactagcatgtgggttcttgttaaagtgtcaaaatggacctacgtagcctacaatgagagtgagaaaatctatttcaccttcccactggagaaccatagaaaaatctacacgcacgtgtactgtcaatccactatgctagacaccaacagttggattttcgcttgtattaattcgacaagtatgtgtctgcagggggtcgatctgagttggaaagcggagttgctgcccaccattaaatatcttactctgaggctgcaggattatccaagcctttcccatctggttgtttatgttcctagtgtgaggggaagcaaattcgtggtggattgcgagttttttaagaaggagaagcggtacatccagctgcccgtaacccacttgttctcctttgggctttcatccaggaaggtggtgctgaacaccaacgggctgtactacaatctggagctgctgaacttcggacagatttaccaggcattcaagatcaacgttgtttcaaagtgttcagcagtaaaggaagaaattaccagtatttatcggctccacatcccttggtcttatgaagatagcttaactatcgcccaggctccgtcatcaaccgagattagcctgaagctgcacattgcgcagccagagaacaatacccatgtggccctttttaaaatgtatacctcgtctgattgtcggtacgaagtgactgtcaagacgagtttctcccagattctcggacaggtcgtcgcatag

SEQ ID NO: 300757 - DNA, 915 bp, Artificial Sequence
  derived and/or modified sequence
atggaggtgctggagagcaagaagattgagctgcccaagaagctggccaagcgctacccagcctatgagctgtacctgtatggagagggcagctatgcagaggagcacaagatcctgcccctgaccggcatccctgtgctcttcctgcctggaaatgccggcagctacaagcaggtgcgcagcatcggcagcatcgccctgaggaaggcagaagatattgacttcaagtaccactttgacttcttctctgtgaacttcaatgaggagctggtggccctgtatggaggcagcctgcagaagcagaccaagtttgtgcatgagtgcatcaagaccatcctgaagctgtacaagggccaggagtttgcccccaagtctgtggccatcatcggccacagcatgggcggcctggtggcccgggccctgctgaccctgaagaacttcaagcatgacctgatcaacctgctgatcacccaggccaccccccacgtggcccctgtgatgcccctggaccgcttcatcacagacttctacaccaccgtgaacaactactggatcctgaatgcccggcacatcaacctgaccaccctgtctgtggccggcggcttccgggactaccaggtgcgcagcggcctgaccttcctgcccaagctgagccaccacaccagcgccctgtctgtggtgtcctctgctgtgcccaagacctgggtgtccacagaccacctgagcatcgtgtggtgcaagcagctgcagctgaccaccgtgcgggccttctttgacctgattgatgctgacaccaagcagatcacccagaacagcaagaagaagctgtctgtgctgtaccaccacttcatccgccaccccagcaagcactttgaagaaaatcctgccatcatcagtgacctgaccggcatctag

SEQ ID NO: 300758 - DNA, 1779 bp, Artificial Sequence
  derived and/or modified sequence
atgttcctgcacagcgtgaacctgtggaacctggccttctacgtgttcatggtgttcctggccaccctgggcctgtgggatgtgttcttcggctttgaggagaacaagtgcagcatgagctacatgtttgagtacccagagtaccagaagattgagctgcccaagaagctggccaagcgctacccagcctatgagctgtacctgtatggagagggcagctatgcagaggagcacaagatcctgcccctgaccggcatccctgtgctcttcctgcctggaaatgccggcagctacaagcaggtgcgcagcatcggcagcatcgccctgaggaaggcagaagatattgacttcaagtaccactttgacttcttctctgtgaacttcaatgaggagctggtggccctgtatggaggcagcctgcagaagcagaccaagtttgtgcatgagtgcatcaagaccatcctgaagctgtacaagggccaggagtttgcccccaagtctgtggccatcatcggccacagcatgggcggcctggtggcccgggccctgctgaccctgaagaacttcaagcatgacctgatcaacctgctgatcacccaggccaccccccacgtggcccctgtgatgcccctggaccgcttcatcacagacttctacaccaccgtgaacaactactggatcctgaatgcccggcacatcaacctgaccaccctgtctgtggccggcggcttccgggactaccaggtgcgcagcggcctgaccttcctgcccaagctgagccaccacaccagcgccctgtctgtggtgtcctctgctgtgcccaagacctgggtgtccacagaccacctgagcatcgtgtggtgcaagcagctgcagctgaccaccgtgcgggccttctttgacctgattgatgctgacaccaagcagatcacccagaacagcaagaagaagctgtctgtgctgtaccaccacttcatccgccaccccagcaagcactttgaagaaaatcctgccatcatcagtgacctgaccggcacctccatgtgggtgctggtgaaggtgtccaagtggacctacgtggcctacaatgaaagtgagaagatctacttcaccttccccctggagaaccacaggaagatctacacccacgtgtactgccagagcaccatgctggacaccaacagctggatctttgcctgcatcaacagcacctccatgtgcctgcagggcgtggacctgtcctggaaggccgagctgctgcccaccatcaagtacctgaccctgcggctgcaggactaccccagcctgagccacctggtggtgtatgtgcccagcgtgcggggcagcaagtttgtggtggactgtgagttcttcaagaaggagaagcgctacatccagctgcctgtgacccacctgttctcctttggcctgagcagcaggaaggtggtgctgaacaccaacggcctgtactacaacctggagctgctgaactttggccagatctaccaggccttcaagatcaacgtggtgtccaagtgcagcgctgtgaaggaggagatcaccagcatctaccgcctgcacatcccctggagctatgaggacagcctgaccatcgcccaggcccccagcagcacagagatcagcctgaagctgcacatcgcccagcctgagaacaacacccacgtggccctcttcaagatgtacaccagcagtgactgccgctatgaggtgacagtgaagaccagcttcagccagatcctgggccaggtggtggcctag

SEQ ID NO: 300759 - DNA, 915 bp, Artificial Sequence
  derived and/or modified sequence
atggaggtgctggagagcaagaagatcgagctgcccaagaagctggcaaaacggtatccagcttacgagctgtatctttacggcgaaggctcctatgctgaagaacacaaaatcttgcccctcaccgggatccccgtactgttcttgccaggaaatgcaggaagctataagcaagtcaggtcaattgggagcattgcccttagaaaggctgaagacatcgactttaaataccatttcgattttttctctgtcaacttcaatgaggaactcgtcgcactatatgggggttctctgcagaaacagacaaaattcgtccacgagtgtataaagacaatactgaagttatataagggccaggaattcgctcctaagtccgtggccattatcgggcattcgatggggggtctggtggcacgcgcgttgctcacactaaagaactttaagcacgacctgatcaatttgcttatcacacaggcaacgccccacgtggctcctgttatgccactagacagatttatcactgatttttacaccacagttaacaattattggattctcaatgctagacacataaacctgactactctgtctgtggccggcggttttagggattatcaggtgaggtcggggctaacatttttgccgaagctcagtcaccatactagcgcactttcagtggtgagtagtgcggtgccaaaaacttgggtgtctactgaccatctaagcattgtttggtgcaagcagttacaactgacaacagtgcgcgcttttttcgacttgattgatgcggacactaaacagatcactcagaacagcaagaagaagctctcagtattgtatcatcattttattagacatccatccaagcactttgaagagaaccctgccattattagtgatctgactgggatctag

SEQ ID NO: 300760 - DNA, 1779 bp, Artificial Sequence
  derived and/or modified sequence
atgttcctgcacagcgtgaacctgtggaacctggccttctacgtgttcatggtgtttctcgccacattggggctttgggacgtgttctttggctttgaagaaaataaatgcagcatgtcttatatgttcgaatatccggagtatcaaaaaatcgagctccctaagaagcttgcgaagcggtaccctgcgtacgagttgtacctctacggcgagggatcttatgctgaggagcataagattctccccctgacggggatccctgtgctatttctcccaggtaatgccgggagttacaagcaggtaaggagcattggttcaattgccctaagaaaggcggaggatatcgactttaaatatcattttgacttcttctcagtcaatttcaacgaggaactggttgcgctatatggtggctcattgcagaaacaaaccaagtttgtgcacgagtgcataaagacaatactgaaactctacaagggccaggagttcgcccctaaatccgttgcaataattgggcattctatgggcggattggtagcccgagctcttttaactttaaaaaacttcaagcacgacctgattaacctcctcataactcaagccacccctcatgttgcccctgtaatgccgctggacagattcatcaccgatttctacacgacggtgaataattattggatcctgaatgcccggcacataaacctgactacgctgtctgtcgcaggcggatttagagattatcaggtgcggagcggcctgacattccttcctaagttgagtcatcacacctcggcattgtcggtggtttccagcgcagtccctaagacatgggtatctacggaccacctgtccatagtgtggtgtaaacaactgcagctgacaactgtccgggccttctttgatcttattgacgccgataccaaacagatcactcagaactctaagaagaaactttcggtgctctatcaccactttataagacatccaagcaagcactttgaagaaaatcctgccatcatctctgacctcacgggaacctctatgtgggtccttgtcaaggtttcaaaatggacatatgtagcttacaatgaatcggagaagatctacttcacatttcctctggagaatcatcgaaagatctacacacacgtatactgccagagcactatgttggataccaactcatggatctttgcctgtattaattccacatcgatgtgccttcagggagttgacctgagctggaaagccgagttgctaccaaccataaagtaccttacactccgcttacaggactacccatccctctctcacctcgttgtctacgtgccctcggtccgtgggagcaagtttgtggtggactgcgagttcttcaaaaaagagaaaaggtatattcagctgcccgttactcatctgttttcctttggcctgagcagccggaaggtagtattaaacaccaacggtttgtactacaatctggagctcctcaatttcggccaaatataccaggcattcaagattaatgtggtgagtaagtgctccgccgtaaaggaagagattacaagtatttaccgtctccacatcccatggagctatgaagatagtctgactattgcccaggcgccctccagtacagaaatttcacttaaattgcatatagctcaaccggagaacaatacacatgtggcgctcttcaagatgtataccagcagtgattgtcgttatgaggtcactgtgaagacctcctttagtcaaatccttggtcaggtggtcgcatag

SEQ ID NO: 300761 - DNA, 1246 bp, Artificial Sequence
  derived and/or modified sequence
tttttcctaacattctagtgttttgaagctgctacaagtgattgatttcgagctttttttaaaaactcctcctttgtacaaaacagaaccgaaattcttcaaaacgaattaagtcatttgcgagtttgaatggaagctggacgaaattgcctcctccagttaacgtggaacccattccccaagagatggaggttctggagagcaagaaaatagaacttccaaagaaactggcaaaacgctatcccgcatatgagttgtatctttatggagagggatcctatgctgaagaacacaaaattctccctttgacgggtattccagttctctttcttcctggtaatgctggaagttataagcaagttcgttctattggctccattgcacttagaaaagcagaggacattgacttcaagtaccactttgacttctttagtgtgaacttcaatgaagaactggtggctttgtatggtggaagtcttcagaagcagaccaagtttgtacatgaatgtattaaaacaattctcaaactctataagggtcaagaatttgctccaaaaagtgtggcaataattggtcattctatgggtggccttgttgcaagagcattgcttacactgaaaaattttaagcatgatctgataaatcttcttattacacaagccacacctcatgttgctcctgtgatgccattagatcgtttcattacagatttttatacgactgtaaacaactattggattctaaatgctcgacacataaatttaaccacactttctgtagctggaggattccgggattaccaagttcgttcaggattgacttttctaccaaaattaagccatcataccagtgccttatctgttgtgagttcagcagtgcctaagacctgggtctcaacagaccacctctccattgtgtggtgtaaacaattgcagttgactacagttcgagcattctttgatcttattgatgctgatactaaacaaataactcaaaattccaagaagaaactgtcagttttgtatcaccactttataagacacccatcaaaacattttgaggaaaatccagctataatttctgacttaacaggaatctgagaagatatattttacatttcctcttgaaaatcatagaaaaatctacactcatgtctattgtcagagcactatgctggatacaaatagttggatttttgcttgcataaacagcacttctatgtgcctgcaaggggttgatttatcat

SEQ ID NO: 300762 - DNA, 2443 bp, Artificial Sequence
  derived and/or modified sequence
ggctccgggggtggcggtcggacagtgtctagcacgctcagtccgggcttggggccccgcggcggagaaggaggtagagggggcggcggcggcggcggcggtggtggcggcaccatgtttcttcactcagttaatctctggaacctggcgttttatgtcttcatggtctttctggcaaccctggggctgtgggatgtcttcttcggcttcgaggagaataagtgcagtatgagctacatgtttgagtacccggagtatcagaaaatagaacttccaaagaaactggcaaaacgctatcccgcatatgagttgtatctttatggagagggatcctatgctgaagaacacaaaattctccctttgacgggtattccagttctctttcttcctggtaatgctggaagttataagcaagttcgttctattggctccattgcacttagaaaagcagaggacattgacttcaagtaccactttgacttctttagtgtgaacttcaatgaagaactggtggctttgtatggtggaagtcttcagaagcagaccaagtttgtacatgaatgtattaaaacaattctcaaactctataagggtcaagaatttgctccaaaaagtgtggcaataattggtcattctatgggtggccttgttgcaagagcattgcttacactgaaaaattttaagcatgatctgataaatcttcttattacacaagccacacctcatgttgctcctgtgatgccattagatcgtttcattacagatttttatacgactgtaaacaactattggattctaaatgctcgacacataaatttaaccacactttctgtagctggaggattccgggattaccaagttcgttcaggattgacttttctaccaaaattaagccatcataccagtgccttatctgttgtgagttcagcagtgcctaagacctgggtctcaacagaccacctctccattgtgtggtgtaaacaattgcagttgactacagttcgagcattctttgatcttattgatgctgatactaaacaaataactcaaaattccaagaagaaactgtcagttttgtatcaccactttataagacacccatcaaaacattttgaggaaaatccagctataatttctgacttaacagggacatctatgtgggttctagtaaaagtgtccaaatggacctatgtagcttacaacgaatctgagaagatatattttacatttcctcttgaaaatcatagaaaaatctacactcatgtctattgtcagagcactatgctggatacaaatagttggatttttgcttgcataaacagcacttctatgtgcctgcaaggggttgatttatcatggaaagctgaactgctgccaacaattaagtatctgacattaagacttcaagactatccatctttgtctcatcttgttgtttatgtaccatctgttcgtggaagtaagtttgttgtagattgtgaattctttaaaaaagagaaaagatacatacagcttcctgtaactcatcttttttcctttggattgtcttcaaggaaagtggtgttaaatacaaatggcctatactacaatctagagcttctgaactttggacagatataccaagcttttaaaatcaacgtggtaagcaagtgctcagcagtcaaagaagaaataaccagtatctatagacttcatattccttggtcttatgaagattcactaaccattgcacaggctccatcttccacagaaatttctctgaaactccatattgctcaaccagaaaacaatacccatgtggcattatttaaaatgtacacgtcatcagactgtcggtacgaggtgacagttaagacttccttttcacaaatacttggacaggttgttgcttagaatatgctaccatgttggataaagaagccaaaccatacaaagttgatccttttgtaattatcattaagtttctgttggggtaagttttattatctgtgataatgattttaattgtgttttacatgtaacattatatttggttccataatgcaatataaattttcatacagatttggcagttgacttgtttcattaaatgaggttttttttttctcttaggcaaaggtctaataagtatatcaatgtctacttcaatagtatcatttcaaaagtaattattcactttatgtatatcagtctaaacttagactgcctttaatgtttgtaaataggtgtatatggtccatgatctgtgagtatcctagattcaaacgcaaatcattacagggtattgatgaaacagtgcctctctgatcacttttaaaagtatattttagacctctctaccctagttaacattccattcttaatttagtcacattttcagatttttggttaagcatcaatatgtagatctttttttccatcattacaactaacttggctttct

SEQ ID NO: 300763 - DNA, 915 bp, Artificial Sequence
  derived and/or modified sequence
atggaggtcctggagagcaaaaaaattgagctccctaaaaaactggccaaaaggtatcccgcttacgagctctatctttatggcgagggttcctacgccgaggaacacaaaatcctgccactcaccggtatccccgtcttgttcctcccaggcaacgcaggttcttacaaacaggtgcgcagcattggctcaatcgcccttaggaaggctgaagacatcgactttaaataccactttgactttttctcagtcaatttcaacgaggaactggtggcactgtatgggggttcactccagaaacagacgaagttcgtgcacgagtgcatcaaaaccattctgaaactgtacaaaggtcaggagttcgccccaaagtccgtagccatcattggccactctatgggaggccttgtggctagggcgcttctgacgctgaaaaacttcaagcacgatctgatcaatttactgattacccaagctacaccccacgtggctccagtgatgcccctcgaccgctttatcacagatttctacactacagtgaacaactattggattctcaatgccagacacattaacctgacgacgttatccgttgctggaggattccgggattaccaggtccgttccgggctgaccttccttcctaagctctcacatcacacaagtgccttgtcagtggtgagctctgctgttccaaagacgtgggtgtcgacagaccacctgtcgatcgtctggtgcaagcagctgcagcttacaacagtgagggctttcttcgacttaattgacgctgatacgaaacagataacacagaattcaaagaagaagcttagtgttctgtaccaccattttatcaggcaccccagtaaacattttgaagagaatccagccatcatctctgatctgacagggatctag

SEQ ID NO: 300764 - DNA, 1779 bp, Artificial Sequence
  derived and/or modified sequence
atgttcctgcatagcgtcaacctgtggaatttagcattctacgttttcatggtgttccttgctaccctggggctgtgggatgtgtttttcggcttcgaggagaataaatgctctatgtcatatatgttcgaatatcctgaataccagaaaatcgagctgcccaaaaagctggcgaaaagataccccgcttatgaactttacctttatggcgagggctcttatgctgaggagcataagatcctcccgctgacgggcattccagtcttgttcttaccgggtaacgccggaagctacaagcaggtacggtccatcggaagcatcgccctgcggaaggcggaggatatcgatttcaagtatcatttcgactttttttccgtgaacttcaacgaggaattggtggcactgtacggcggatctctgcaaaagcagaccaaatttgtacatgaatgcatcaaaactattctgaaactctacaaaggccaagaattcgcaccaaagtcagtggcaattatcggccactcaatggggggactggtggctagggccttgctgacacttaagaactttaagcacgacttaatcaatttgctgattacacaggccactccacacgtggcacctgtgatgccactggatcggttcatcactgacttttacactacggtaaacaactattggatactgaacgcacgacacatcaacctgaccaccctctctgtggcgggaggattccgagactaccaggtgcgttccggcctgaccttccttcccaaactgtcccatcacacttcggccttatccgtggtttcatctgcagtcccaaaaacgtgggtttcaactgatcatctttccattgtgtggtgcaaacaactgcagctgacaaccgtcagggcatttttcgacctgatcgacgcagatacaaagcaaatcacccagaattcaaagaagaagttgtcagtgctgtatcaccatttcatccgccatcccagtaaacattttgaggagaacccagcaattatctccgacctgactggaacaagcatgtgggtgctggtcaaagtgagtaagtggacctacgtcgcgtacaacgagtctgaaaaaatttacttcactttcccactggagaaccacaggaagatctatacccatgtgtattgccagtctaccatgctcgacacgaactcatggatctttgcatgcatcaactctacttcaatgtgtctgcaaggggtggatctatcttggaaggcagagctgctccccacaatcaagtacttgacactccgtctgcaggactatccatccctgtcccacctagttgtgtacgttccatccgtccggggtagtaagttcgtcgtggattgtgagtttttcaagaaggaaaaaagatacattcaacttcctgtgactcatctctttagcttcggtctgtcctcacgcaaggtggtcctaaataccaatggcctgtactataatctggagctgctgaattttggccagatctaccaagcctttaagataaatgtggtgtcgaagtgtagcgccgttaaggaggagatcacatctatttacaggcttcacatcccatggagttacgaggacagcctcacgatcgcccaggccccatcttctaccgagataagcctgaagctgcacattgcccagcctgagaacaacacacatgtcgccctgttcaagatgtacacctccagcgattgcaggtacgaggtcactgtcaagacttcttttagtcaaatcttaggccaagtggtagcttag

SEQ ID NO: 300765 - DNA, 915 bp, Artificial Sequence
  derived and/or modified sequence
atggaggtgctggagagcaagaagatcgagctgcccaagaagctggccaagagataccccgcctacgagctgtacctgtacggcgagggcagctacgccgaggagcacaagatcctgcccctgaccggcatccccgtgctgttcctgcccggcaacgccggcagctacaagcaggtgagaagcatcggcagcatcgccctgagaaaggccgaggacatcgacttcaagtaccacttcgacttcttcagcgtgaacttcaacgaggagctggtggccctgtacggcggcagcctgcagaagcagaccaagttcgtgcacgagtgcatcaagaccatcctgaagctgtacaagggccaggagttcgcccccaagagcgtggccatcatcggccacagcatgggcggcctggtggccagagccctgctgaccctgaagaacttcaagcacgacctgatcaacctgctgatcacccaggccaccccccacgtggcccccgtgatgcccctggacagattcatcaccgacttctacaccaccgtgaacaactactggatcctgaacgccagacacatcaacctgaccaccctgagcgtggccggcggcttcagagactaccaggtgagaagcggcctgaccttcctgcccaagctgagccaccacaccagcgccctgagcgtggtgagcagcgccgtgcccaagacctgggtgagcaccgaccacctgagcatcgtgtggtgcaagcagctgcagctgaccaccgtgagagccttcttcgacctgatcgacgccgacaccaagcagatcacccagaacagcaagaagaagctgagcgtgctgtaccaccacttcatcagacaccccagcaagcacttcgaggagaaccccgccatcatcagcgacctgaccggcatctag

SEQ ID NO: 300766 - DNA, 1779 bp, Artificial Sequence
  derived and/or modified sequence
atgttcctgcacagcgtgaacctgtggaacctggccttctacgtgttcatggtgttcctggccaccctgggcctgtgggacgtgttcttcggcttcgaggagaacaagtgcagcatgagctacatgttcgagtaccccgagtaccagaagatcgagctgcccaagaagctggccaagagataccccgcctacgagctgtacctgtacggcgagggcagctacgccgaggagcacaagatcctgcccctgaccggcatccccgtgctgttcctgcccggcaacgccggcagctacaagcaggtgagaagcatcggcagcatcgccctgagaaaggccgaggacatcgacttcaagtaccacttcgacttcttcagcgtgaacttcaacgaggagctggtggccctgtacggcggcagcctgcagaagcagaccaagttcgtgcacgagtgcatcaagaccatcctgaagctgtacaagggccaggagttcgcccccaagagcgtggccatcatcggccacagcatgggcggcctggtggccagagccctgctgaccctgaagaacttcaagcacgacctgatcaacctgctgatcacccaggccaccccccacgtggcccccgtgatgcccctggacagattcatcaccgacttctacaccaccgtgaacaactactggatcctgaacgccagacacatcaacctgaccaccctgagcgtggccggcggcttcagagactaccaggtgagaagcggcctgaccttcctgcccaagctgagccaccacaccagcgccctgagcgtggtgagcagcgccgtgcccaagacctgggtgagcaccgaccacctgagcatcgtgtggtgcaagcagctgcagctgaccaccgtgagagccttcttcgacctgatcgacgccgacaccaagcagatcacccagaacagcaagaagaagctgagcgtgctgtaccaccacttcatcagacaccccagcaagcacttcgaggagaaccccgccatcatcagcgacctgaccggcaccagcatgtgggtgctggtgaaggtgagcaagtggacctacgtggcctacaacgagagcgagaagatctacttcaccttccccctggagaaccacagaaagatctacacccacgtgtactgccagagcaccatgctggacaccaacagctggatcttcgcctgcatcaacagcaccagcatgtgcctgcagggcgtggacctgagctggaaggccgagctgctgcccaccatcaagtacctgaccctgagactgcaggactaccccagcctgagccacctggtggtgtacgtgcccagcgtgagaggcagcaagttcgtggtggactgcgagttcttcaagaaggagaagagatacatccagctgcccgtgacccacctgttcagcttcggcctgagcagcagaaaggtggtgctgaacaccaacggcctgtactacaacctggagctgctgaacttcggccagatctaccaggccttcaagatcaacgtggtgagcaagtgcagcgccgtgaaggaggagatcaccagcatctacagactgcacatcccctggagctacgaggacagcctgaccatcgcccaggcccccagcagcaccgagatcagcctgaagctgcacatcgcccagcccgagaacaacacccacgtggccctgttcaagatgtacaccagcagcgactgcagatacgaggtgaccgtgaagaccagcttcagccagatcctgggccaggtggtggcctag

SEQ ID NO: 300767 - protein, 697 aa, Artificial Sequence
  derived and/or modified sequence
KQSFPCICKNPGTQKSCVPLSVQPTEPRLNYLDLKYSDMFKEINSTANGPGIYEMFGTPVYCHVRETERDENTYYREICSAPSGRRITNKCRSSHSERKSNIRTRLSQKKTHMKCPKTSFGIKQEHKVLISKEKSSKAVHSNLHDIENGDGISEPDWQIKSSGNEFLSSKDEIHPMNLAQTPEQSMKQNEFPPVSDLSIVEEVSMEESTGDRDISNNQILTTSLRDLQELEELHHQIPFIPSEDSWAVPSEKNSNKYVQQEKQNTASLSKVNASRILTNDLEFDSVSDHSKTLTNFSFQAKQESASSQTYQYWVHYLDHDSLANKSITYQMFGKTLSGTNSISQEIMDSVNNEELTDELLGCLAAELLALDEKDNNSCQKMANETDPENLNLVLRWRGSTPKEMGRETTKVKIQRHSSGLRIYDREEKFLISNEKKIFSENSLKSEEPILWTKGEILGKGAYGTVYCGLTSQGQLIAVKQVALDTSNKLAAEKEYRKLQEEVDLLKALKHVNIVAYLGTCLQENTVSIFMEFVPGGSISSIINRFGPLPEMVFCKYTKQILQGVAYLHENCVVHRDIKGNNVMLMPTGIIKLIDFGCARRLAWAGLNGTHSDMLKSMHGTPYWMAPEVINESGYGRKSDIWSIGCTVFEMATGKPPLASMDRMAAMFYIGAHRGLMPPLPDHFSENAADFVRMCLTR

SEQ ID NO: 300768 - protein, 168 aa, Artificial Sequence
  derived and/or modified sequence
MEFVPGGSISSIINRFGPLPEMVFCKYTKQILQGVAYLHENCVVHRDIKGNNVMLMPTGIIKLIDFGCARRLAWAGLNGTHSDMLKSMHGTPYWMAPEVINESGYGRKSDIWSIGCTVFEMATGKPPLASMDRMAAMFYIGAHRGLMPPLPDHFSENAADFVRMCLTR

SEQ ID NO: 300769 - protein, 1328 aa, Artificial Sequence
  derived and/or modified sequence
MSSMPKPERHAESLLDICHDTNSSPTDLMTVTKNQNIILQSISRSEEFDQDGDCSHSTLVNEEEDPSGGRQDWQPRTEGVEITVTFPRDVSPPQEMSQEDLKEKNLINSSLQEWAQAHAVSHPNEIETVELRKKKLTMRPLVLQKEESSRELCNVNLGFLLPRSCLELNISKSVTREDAPHFLKEQQRKSEEFSTSHMKYSGRSIKFLLPPLSLLPTRSGVLTIPQNHKFPKEKERNIPSLTSFVPKLSVSVRQSDELSPSNEPPGALVKSLMDPTLRSSDGFIWSRNMCSFPKTNHHRQCLEKEENWKSKEIEECNKIEITHFEKGQSLVSFENLKEGNIPAVREEDIDCHGSKTRKPEEENSQYLSSRKNESSVAKNYEQDPEIVCTIPSKFQETQHSEITPSQDEEMRNNKAASKRVSLHKNEAMEPNNILEECTVLKSLSSVVFDDPIDKLPEGCSSMETNIKISIAERAKPEMSRMVPLIHITFPVDGSPKEPVIAKPSLQTRKGTIHNNHSVNIPVHQENDKHKMNSHRSKLDSKTKTSKKTPQNFVISTEGPIKPTMHKTSIKTQIFPALGLVDPRPWQLPRFQKKMPQIAKKQSTHRTQKPKKQSFPCICKNPGTQKSCVPLSVQPTEPRLNYLDLKYSDMFKEINSTANGPGIYEMFGTPVYCHVRETERDENTYYREICSAPSGRRITNKCRSSHSERKSNIRTRLSQKKTHMKCPKTSFGIKQEHKVLISKEKSSKAVHSNLHDIENGDGISEPDWQIKSSGNEFLSSKDEIHPMNLAQTPEQSMKQNEFPPVSDLSIVEEVSMEESTGDRDISNNQILTTSLRDLQELEELHHQIPFIPSEDSWAVPSEKNSNKYVQQEKQNTASLSKVNASRILTNDLEFDSVSDHSKTLTNFSFQAKQESASSQTYQYWVHYLDHDSLANKSITYQMFGKTLSGTNSISQEIMDSVNNEELTDELLGCLAAELLALDEKDNNSCQKMANETDPENLNLVLRWRGSTPKEMGRETTKVKIQRHSSGLRIYDREEKFLISNEKKIFSENSLKSEEPILWTKGEILGKGAYGTVYCGLTSQGQLIAVKQVALDTSNKLAAEKEYRKLQEEVDLLKALKHVNIVAYLGTCLQENTVSIFMEFVPGGSISSIINRFGPLPEMVFCKYTKQILQGVAYLHENCVVHRDIKGNNVMLMPTGIIKLIDFGCARRLAWAGLNGTHSDMLKSMHGTPYWMAPEVINESGYGRKSDIWSIGCTVFEMATGKPPLASMDRMAAMFYIGAHRGLMPPLPDHFSENAADFVRMCLTRDQHERPSALQLLKHSFLERSH

SEQ ID NO: 300770 - DNA, 3987 bp, Artificial Sequence
  derived and/or modified sequence
atgagcagcatgcccaagcccgagagacacgccgagagcctgctggacatctgccacgacaccaacagcagccccaccgacctgatgaccgtgaccaagaaccagaacatcatcctgcagagcatcagcagaagcgaggagttcgaccaggacggcgactgcagccacagcaccctggtgaacgaggaggaggaccccagcggcggcagacaggactggcagcccagaaccgagggcgtggagatcaccgtgaccttccccagagacgtgagccccccccaggagatgagccaggaggacctgaaggagaagaacctgatcaacagcagcctgcaggagtgggcccaggcccacgccgtgagccaccccaacgagatcgagaccgtggagctgagaaagaagaagctgaccatgagacccctggtgctgcagaaggaggagagcagcagagagctgtgcaacgtgaacctgggcttcctgctgcccagaagctgcctggagctgaacatcagcaagagcgtgaccagagaggacgccccccacttcctgaaggagcagcagagaaagagcgaggagttcagcaccagccacatgaagtacagcggcagaagcatcaagttcctgctgccccccctgagcctgctgcccaccagaagcggcgtgctgaccatcccccagaaccacaagttccccaaggagaaggagagaaacatccccagcctgaccagcttcgtgcccaagctgagcgtgagcgtgagacagagcgacgagctgagccccagcaacgagccccccggcgccctggtgaagagcctgatggaccccaccctgagaagcagcgacggcttcatctggagcagaaacatgtgcagcttccccaagaccaaccaccacagacagtgcctggagaaggaggagaactggaagagcaaggagatcgaggagtgcaacaagatcgagatcacccacttcgagaagggccagagcctggtgagcttcgagaacctgaaggagggcaacatccccgccgtgagagaggaggacatcgactgccacggcagcaagaccagaaagcccgaggaggagaacagccagtacctgagcagcagaaagaacgagagcagcgtggccaagaactacgagcaggaccccgagatcgtgtgcaccatccccagcaagttccaggagacccagcacagcgagatcacccccagccaggacgaggagatgagaaacaacaaggccgccagcaagagagtgagcctgcacaagaacgaggccatggagcccaacaacatcctggaggagtgcaccgtgctgaagagcctgagcagcgtggtgttcgacgaccccatcgacaagctgcccgagggctgcagcagcatggagaccaacatcaagatcagcatcgccgagagagccaagcccgagatgagcagaatggtgcccctgatccacatcaccttccccgtggacggcagccccaaggagcccgtgatcgccaagcccagcctgcagaccagaaagggcaccatccacaacaaccacagcgtgaacatccccgtgcaccaggagaacgacaagcacaagatgaacagccacagaagcaagctggacagcaagaccaagaccagcaagaagaccccccagaacttcgtgatcagcaccgagggccccatcaagcccaccatgcacaagaccagcatcaagacccagatcttccccgccctgggcctggtggaccccagaccctggcagctgcccagattccagaagaagatgccccagatcgccaagaagcagagcacccacagaacccagaagcccaagaagcagagcttcccctgcatctgcaagaaccccggcacccagaagagctgcgtgcccctgagcgtgcagcccaccgagcccagactgaactacctggacctgaagtacagcgacatgttcaaggagatcaacagcaccgccaacggccccggcatctacgagatgttcggcacccccgtgtactgccacgtgagagagaccgagagagacgagaacacctactacagagagatctgcagcgcccccagcggcagaagaatcaccaacaagtgcagaagcagccacagcgagagaaagagcaacatcagaaccagactgagccagaagaagacccacatgaagtgccccaagaccagcttcggcatcaagcaggagcacaaggtgctgatcagcaaggagaagagcagcaaggccgtgcacagcaacctgcacgacatcgagaacggcgacggcatcagcgagcccgactggcagatcaagagcagcggcaacgagttcctgagcagcaaggacgagatccaccccatgaacctggcccagacccccgagcagagcatgaagcagaacgagttcccccccgtgagcgacctgagcatcgtggaggaggtgagcatggaggagagcaccggcgacagagacatcagcaacaaccagatcctgaccaccagcctgagagacctgcaggagctggaggagctgcaccaccagatccccttcatccccagcgaggacagctgggccgtgcccagcgagaagaacagcaacaagtacgtgcagcaggagaagcagaacaccgccagcctgagcaaggtgaacgccagcagaatcctgaccaacgacctggagttcgacagcgtgagcgaccacagcaagaccctgaccaacttcagcttccaggccaagcaggagagcgccagcagccagacctaccagtactgggtgcactacctggaccacgacagcctggccaacaagagcatcacctaccagatgttcggcaagaccctgagcggcaccaacagcatcagccaggagatcatggacagcgtgaacaacgaggagctgaccgacgagctgctgggctgcctggccgccgagctgctggccctggacgagaaggacaacaacagctgccagaagatggccaacgagaccgaccccgagaacctgaacctggtgctgagatggagaggcagcacccccaaggagatgggcagagagaccaccaaggtgaagatccagagacacagcagcggcctgagaatctacgacagagaggagaagttcctgatcagcaacgagaagaagatcttcagcgagaacagcctgaagagcgaggagcccatcctgtggaccaagggcgagatcctgggcaagggcgcctacggcaccgtgtactgcggcctgaccagccagggccagctgatcgccgtgaagcaggtggccctggacaccagcaacaagctggccgccgagaaggagtacagaaagctgcaggaggaggtggacctgctgaaggccctgaagcacgtgaacatcgtggcctacctgggcacctgcctgcaggagaacaccgtgagcatcttcatggagttcgtgcccggcggcagcatcagcagcatcatcaacagattcggccccctgcccgagatggtgttctgcaagtacaccaagcagatcctgcagggcgtggcctacctgcacgagaactgcgtggtgcacagagacatcaagggcaacaacgtgatgctgatgcccaccggcatcatcaagctgatcgacttcggctgcgccagaagactggcctgggccggcctgaacggcacccacagcgacatgctgaagagcatgcacggcaccccctactggatggcccccgaggtgatcaacgagagcggctacggcagaaagagcgacatctggagcatcggctgcaccgtgttcgagatggccaccggcaagccccccctggccagcatggacagaatggccgccatgttctacatcggcgcccacagaggcctgatgccccccctgcccgaccacttcagcgagaacgccgccgacttcgtgagaatgtgcctgaccagagaccagcacgagagacccagcgccctgcagctgctgaagcacagcttcctggagagaagccactag

SEQ ID NO: 300771 - DNA, 2094 bp, Artificial Sequence
  derived and/or modified sequence
aagcagagcttcccctgcatctgcaagaaccccggcacccagaagagctgcgtgcccctgagcgtgcagcccaccgagcccagactgaactacctggacctgaagtacagcgacatgttcaaggagatcaacagcaccgccaacggccccggcatctacgagatgttcggcacccccgtgtactgccacgtgagagagaccgagagagacgagaacacctactacagagagatctgcagcgcccccagcggcagaagaatcaccaacaagtgcagaagcagccacagcgagagaaagagcaacatcagaaccagactgagccagaagaagacccacatgaagtgccccaagaccagcttcggcatcaagcaggagcacaaggtgctgatcagcaaggagaagagcagcaaggccgtgcacagcaacctgcacgacatcgagaacggcgacggcatcagcgagcccgactggcagatcaagagcagcggcaacgagttcctgagcagcaaggacgagatccaccccatgaacctggcccagacccccgagcagagcatgaagcagaacgagttcccccccgtgagcgacctgagcatcgtggaggaggtgagcatggaggagagcaccggcgacagagacatcagcaacaaccagatcctgaccaccagcctgagagacctgcaggagctggaggagctgcaccaccagatccccttcatccccagcgaggacagctgggccgtgcccagcgagaagaacagcaacaagtacgtgcagcaggagaagcagaacaccgccagcctgagcaaggtgaacgccagcagaatcctgaccaacgacctggagttcgacagcgtgagcgaccacagcaagaccctgaccaacttcagcttccaggccaagcaggagagcgccagcagccagacctaccagtactgggtgcactacctggaccacgacagcctggccaacaagagcatcacctaccagatgttcggcaagaccctgagcggcaccaacagcatcagccaggagatcatggacagcgtgaacaacgaggagctgaccgacgagctgctgggctgcctggccgccgagctgctggccctggacgagaaggacaacaacagctgccagaagatggccaacgagaccgaccccgagaacctgaacctggtgctgagatggagaggcagcacccccaaggagatgggcagagagaccaccaaggtgaagatccagagacacagcagcggcctgagaatctacgacagagaggagaagttcctgatcagcaacgagaagaagatcttcagcgagaacagcctgaagagcgaggagcccatcctgtggaccaagggcgagatcctgggcaagggcgcctacggcaccgtgtactgcggcctgaccagccagggccagctgatcgccgtgaagcaggtggccctggacaccagcaacaagctggccgccgagaaggagtacagaaagctgcaggaggaggtggacctgctgaaggccctgaagcacgtgaacatcgtggcctacctgggcacctgcctgcaggagaacaccgtgagcatcttcatggagttcgtgcccggcggcagcatcagcagcatcatcaacagattcggccccctgcccgagatggtgttctgcaagtacaccaagcagatcctgcagggcgtggcctacctgcacgagaactgcgtggtgcacagagacatcaagggcaacaacgtgatgctgatgcccaccggcatcatcaagctgatcgacttcggctgcgccagaagactggcctgggccggcctgaacggcacccacagcgacatgctgaagagcatgcacggcaccccctactggatggcccccgaggtgatcaacgagagcggctacggcagaaagagcgacatctggagcatcggctgcaccgtgttcgagatggccaccggcaagccccccctggccagcatggacagaatggccgccatgttctacatcggcgcccacagaggcctgatgccccccctgcccgaccacttcagcgagaacgccgccgacttcgtgagaatgtgcctgaccagatag

SEQ ID NO: 300772 - DNA, 3987 bp, Artificial Sequence
  derived and/or modified sequence
atgtccagtatgcccaagccggagcgacacgcggaaagtctgcttgacatatgccacgataccaattcaagccccacagatctgatgactgtgaccaagaaccaaaatataattcttcaatctattagcagaagtgaggaattcgatcaggacggggactgctcccatagcactctggtcaacgaggaagaagatccaagcgggggaagacaagattggcagcctaggacagagggcgtggaaattaccgtaaccttcccccgcgacgtctccccaccccaggagatgtcccaggaggaccttaaagaaaagaacctgattaactctagtctgcaggagtgggctcaggctcacgccgtttcacatccaaacgagatagaaaccgtggagctcaggaagaagaagttgacaatgagacctttagtgctgcaaaaagaggagtcaagtcgagagctatgtaatgttaatctgggatttctgcttccaaggtcatgtcttgaactgaacattagcaaatccgtgactagagaagatgctccacatttcctgaaggaacagcagcgcaagtcagaagaattctcaacaagccacatgaaatacagcggtcgctcaataaagttcttgctccctcctttaagcctcctgcctacccgctctggcgtgctgacgataccacaaaaccataagttccccaaagagaaagagcggaacattccctcattgacgtcctttgtgcccaaactgagcgtcagcgtgaggcagtcagacgagctctcccccagtaacgaaccaccaggggcacttgtcaaatctcttatggaccccacattgaggtcctcagatgggttcatctggagtagaaacatgtgcagcttccccaagactaaccaccaccgtcagtgtttggagaaagaggaaaactggaaatccaaggaaattgaggagtgtaacaaaatcgaaatcactcatttcgagaagggccaatcactcgtgtcgtttgaaaacttaaaggaaggaaatatccccgcagtcagggaggaggacatagattgtcatgggtcgaagacccgcaagccagaagaagagaacagccagtacctgtctagtagaaagaacgagtcaagcgtcgcaaagaattatgaacaggaccctgaaatcgtttgcacgattccgagtaagtttcaggaaacgcagcattctgaaatcacaccaagccaagatgaagagatgagaaacaacaaagcggcctccaaaagagtttccttacacaaaaatgaagcaatggaaccgaacaacatcctcgaagaatgtactgtgctcaagagcctcagcagtgtagtgttcgacgatcccatcgataaactacctgagggttgtagctccatggagactaacattaagatctctatcgcggaaagggctaagcctgaaatgtctcggatggtgcctctgatccatatcaccttcccagtagacggaagtccgaaggaaccagtgattgccaaaccctcgctgcaaactaggaaaggaactatccacaataatcactctgtcaacatacccgtgcatcaggaaaatgataagcacaaaatgaatagccatcggagtaaactcgacagcaagacaaaaacttctaagaaaacccctcaaaattttgtgatctcaaccgaaggcccaatcaagccaactatgcacaagacttccatcaaaactcagattttccctgccctgggcctcgtcgacccgcggccatggcagttgcccagatttcagaagaagatgccacaaatcgcaaagaaacagagcacccaccgcacccagaagcccaagaaacaaagctttccctgcatttgcaaaaatcctggcactcaaaagagctgtgtccctctgtccgtccagcctacagagcctagactgaattatttggacctgaaatacagcgacatgtttaaggagattaattcaactgcgaatggaccaggaatctatgaaatgtttgggactcccgtgtactgccacgtgagagaaacggagagggatgagaacacatactaccgggagatctgcagtgctcccagcggcagaaggataactaacaagtgcagatcatcgcatagcgaaagaaagtctaatatccgaacaaggctgagccagaagaagactcacatgaagtgccccaagacctcattcgggatcaagcaagaacacaaggttctcattagcaaagaaaagagcagtaaggccgtgcacagtaaccttcacgacatcgagaacggagatggtatctcagagcctgactggcagataaagtcaagtggcaatgagttcctgagctctaaggacgagatacatccaatgaatttggcacagacgcctgagcagtccatgaaacaaaacgaatttcctccagtgagcgacctttctattgtggaggaggtgagtatggaggagtcaacaggcgaccgagacatttccaacaaccaaatcctgacaaccagcttgagagatctgcaagagctagaagaactgcaccaccagattccattcattcctagtgaggacagctgggcagtgccctcggaaaagaattcaaacaagtatgtacagcaggaaaaacagaacaccgcctctctcagcaaagtgaatgcaagtcggatattgaccaatgatctggagttcgatagcgtgtctgaccactctaaaaccctgacgaacttttcgtttcaagccaagcaggaatcagcttcttcgcagacctatcagtactgggtccattacttggatcacgacagtctggcaaacaaatcaatcacctaccagatgtttggcaaaaccttatcaggcactaattccatttcccaggaaattatggactcagttaacaatgaagaactcactgacgaactgctgggctgtctggcagctgagctgctggccctggatgaaaaagataataatagttgccagaaaatggcgaatgagacggaccccgaaaatctaaatctggtcctcagatggcgcggcagcaccccgaaggaaatgggtagagaaactacaaaagtaaagatccagaggcactcgtccggtcttcgaatttatgaccgcgaagagaagtttctcatttccaacgaaaagaagattttcagcgagaactctttgaaatcagaagagcccatcctgtggactaaaggtgaaattctgggtaaaggagcatatggaaccgtgtattgtggcctgacgtcccaaggacaattgatcgcagttaagcaggtcgccctcgacacctccaacaaactcgcagcagagaaggagtataggaagttgcaggaggaagtggatctgctgaaagctctgaagcatgtgaacattgttgcctatttggggacatgtctccaggaaaacaccgtctccattttcatggagtttgtgcccggcggaagcatatcctccatcatcaataggttcggtcctttacccgaaatggttttttgcaaatatacaaagcagattctccaaggtgtcgcatacctgcatgagaattgcgtggtgcatcgcgacatcaagggtaacaacgtcatgcttatgcctacgggcattattaagttgatcgatttcggttgtgcacggaggctggcatgggctgggctgaatggcactcattccgatatgctgaagtctatgcatgggaccccttactggatggccccagaggtgattaatgaatccggctacggacgtaaaagtgacatctggtcaatcggctgtacggtctttgaaatggccactgggaagccaccactggctagcatggacaggatggctgctatgttttatatcggcgcacacaggggcctgatgcccccccttccagatcatttcagcgaaaatgctgcagactttgtgcgcatgtgtctgaccagagaccaacatgagagaccgagtgcactgcagctgttgaagcacagcttcctggagaggtctcactag

SEQ ID NO: 300773 - DNA, 2094 bp, Artificial Sequence
  derived and/or modified sequence
aaacagagttttccctgcatctgcaaaaacccaggaacccagaagagctgcgtcccactgagcgtccagccgaccgagcccagactgaattacctagacctgaagtactccgacatgttcaaggaaatcaatagcacagcgaatggacctgggatctatgagatgtttggcacaccggtgtactgccatgtgcgggaaaccgagcgcgatgagaacacctattatcgcgagatatgcagtgccccgagtggtagacggattactaataaatgccgtagttcccactctgaacggaaaagtaatatcaggacacggctgagtcagaagaagacacacatgaagtgcccgaaaaccagttttgggatcaaacaagagcataaagtactgattagcaaagagaaatcttctaaagccgtacatagtaacttgcacgatatcgagaatggcgatgggattagcgaaccagattggcagattaagagctccggtaatgaattcctctcatccaaagacgaaattcacccaatgaatttagctcagaccccggagcagtcaatgaaacagaatgagttcccccccgtctcagatctgtctatagttgaagaggtgtctatggaagagagtactggggaccgagacatctccaacaatcagatcctgacaacgtccctcagggacctccaggaactggaggaactccatcaccagattccctttatcccatccgaagatagctgggccgtgcctagcgaaaaaaattcaaataaatatgtgcagcaagagaaacaaaacacagcctctctttcaaaagtgaacgctagcaggatcctcaccaacgacctggaatttgacagcgtgagcgaccactctaagaccctgacgaacttcagcttccaagcaaagcaggagagcgcttcttcccaaacatatcagtattgggtccactatctggatcacgattccttagccaacaagtccattacttaccagatgttcgggaaaaccttgtctgggacgaactcaatttcccaggagatcatggattcagtcaacaacgaggagctaacagacgaacttctaggctgtctggcagcagaattattagccttggacgaaaaagacaacaacagctgtcagaaaatggccaacgagacagacccagagaatctgaatttagtactccgatggagaggcagcacacccaaggaaatgggccgtgaaactacgaaggtgaaaattcagcggcatagctctggtcttcgcatctacgatagagaggaaaagtttctcatatccaatgagaaaaagattttttctgagaattcgctgaagtccgaggagcctatcctatggacaaagggtgagatcctgggcaagggtgcgtacggcactgtctattgcggccttactagccagggccagctgatcgcggtgaaacaggtcgcccttgacacctctaacaaactggccgctgagaaggaatacaggaaactgcaggaagaggtcgatctgctgaaggcactgaagcacgttaatatcgtggcatacctcggtacgtgtctgcaagaaaatacagtcagcattttcatggagttcgtccccggtggctccatcagcagtattattaaccgttttggtcctctcccagaaatggtcttctgcaagtatacgaagcagatcctgcagggggtggcctacttgcacgagaattgtgtggttcatcgggacatcaaagggaacaatgtcatgctgatgccgactggaatcattaaactgatcgactttggctgtgccagacggcttgcgtgggctggacttaacggcacccactctgacatgctcaagagcatgcatggaacgccttattggatggctcccgaagtaataaatgaaagcgggtatgggcgcaagtcagacatctggtcaatcggatgcactgtcttcgaaatggcaacaggtaagcctcctctggcctcaatggaccggatggccgccatgttctatatcggagcgcatcgaggactaatgccccctctcccagatcactttagtgagaacgctgcggacttcgttcgcatgtgtctgacaagatag

SEQ ID NO: 300774 - DNA, 3987 bp, Artificial Sequence
  derived and/or modified sequence
atgagctccatgcccaagccagagagacatgctgagagcctgctggacatctgccacgacaccaacagcagccccacagacctgatgacagtgaccaagaaccagaacatcatcctgcagagcatcagccgctctgaggagtttgaccaggatggagactgcagccacagcaccctggtgaatgaggaggaggaccccagcggcggccggcaggactggcagcccaggacagaaggagtggagatcaccgtgaccttccccagagatgtgagccccccccaggagatgagccaggaggacctgaaggagaagaacctgatcaacagcagcctgcaggagtgggcccaggcccatgctgtgagccaccccaatgaaattgagaccgtggagctgaggaagaagaagctgaccatgaggcccctggtgctgcagaaggaggagagcagccgggagctgtgcaatgtgaacctgggcttcctgctgcccaggagctgcctggagctgaacatcagcaagtctgtgaccagagaagatgccccccacttcctgaaggagcagcagaggaagtctgaggagttcagcaccagccacatgaagtacagcggccgcagcatcaagttcctgctgccccccctgagcctgctgcccaccaggtctggagtgctgaccatcccccagaaccacaagttccccaaggagaaggagaggaacatccccagcctgaccagctttgtgcccaagctgtctgtgtctgtgcggcagagtgatgagctgagccccagcaatgagcccccaggggccctggtgaagagcctgatggaccccaccctgcggagcagtgatggcttcatctggagcaggaacatgtgcagcttccccaagaccaaccaccaccggcagtgcctggagaaggaggagaactggaagagcaaggagattgaggagtgcaacaagattgagatcacccactttgagaagggccagagcctggtgtcctttgagaacctgaaggagggcaacatcccagctgtgcgggaggaggacatcgactgccacggcagcaagaccaggaagccagaggaggagaacagccagtacctgagcagcaggaagaatgaatcttctgtggccaagaactatgagcaggaccctgagatcgtgtgcaccatccccagcaagttccaggagacccagcacagcgagatcacccccagccaggatgaggagatgaggaacaacaaggccgccagcaagagggtgtccctgcacaagaatgaggccatggagcccaacaacatcctggaggagtgcaccgtgctgaagagcctgagctctgtggtgtttgatgaccccatcgacaagctgcctgagggctgcagctccatggagaccaacatcaagatcagcattgctgagcgggccaagccagagatgagcaggatggtgcccctcatccacatcaccttccctgtggatggcagccccaaggagcccgtcatcgccaagcccagcctgcagaccaggaagggcaccatccacaacaaccacagcgtgaacatccctgtgcaccaggagaatgacaagcacaagatgaacagccacaggagcaagctggacagcaagaccaagaccagcaagaagaccccccagaacttcgtcatcagcacagagggccccatcaagcccaccatgcacaagaccagcatcaagacccagatcttccctgccctgggcctggtggacccccggccctggcagctgccccgcttccagaagaagatgccccagatcgccaagaagcagagcacccacaggacccagaagcccaagaagcagagcttcccctgcatctgcaagaaccctggcacccagaagagctgtgtgcccctgtctgtgcagcccacagagccccggctgaactacctggacctgaagtacagcgacatgttcaaggagatcaacagcacagccaacggccctggcatctatgagatgtttggcacccctgtgtactgccacgtgcgggagacagaaagagatgagaacacctactaccgggagatctgcagcgcccccagcggccgccgcatcaccaacaagtgccgcagcagccacagcgagaggaagagcaacatccgcacccggctgagccagaagaagacccacatgaagtgccccaagaccagctttggcatcaagcaggagcacaaggtgctgatcagcaaggagaagagcagcaaggctgtgcacagcaacctgcatgacattgaaaatggagatggcatcagcgagccagactggcagatcaagagcagtggaaatgagttcctgagcagcaaggatgagatccaccccatgaacctggcccagaccccagagcagagcatgaagcagaatgagttcccccctgtgtctgacctgagcatcgtggaggaggtgtccatggaggagagcactggagaccgggacatcagcaacaaccagatcctgaccaccagcctgcgggacctgcaggagctggaggagctgcaccaccagatccccttcatccccagtgaagattcctgggccgtgcccagcgagaagaacagcaacaagtatgtgcagcaggagaagcagaacacagccagcctgagcaaggtgaatgccagccgcatcctgaccaatgacctggagtttgattctgtgtctgaccacagcaagaccctgaccaacttctccttccaggccaagcaggagagcgccagcagccagacctaccagtactgggtgcactacctggaccatgacagcctggccaacaagagcatcacctaccagatgtttgggaagaccctgagcggcaccaacagcatcagccaggagatcatggattctgtgaacaatgaggagctgacagatgagctgctgggctgcctggccgctgagctgctggccctggatgagaaggacaacaacagctgccagaagatggccaatgaaacagatcctgagaacctgaacctggtgctgcgctggaggggcagcacccccaaggagatgggccgggagaccaccaaggtgaagatccagaggcacagcagcggcctgcgcatctatgaccgggaggagaagttcctgatcagcaatgagaagaagatcttcagcgagaacagcctgaagtctgaggagcccatcctgtggaccaagggggagatcctgggcaaaggagcctacggcaccgtgtactgcggcctgaccagccagggccagctgattgctgtgaagcaggtggccctggacaccagcaacaagctggccgctgagaaggagtacaggaagctgcaggaggaggtggacctgctgaaggccctgaagcacgtgaacatcgtggcctacctgggcacctgcctgcaggagaacacagtgtccatcttcatggagtttgtgcctgggggcagcatcagcagcatcatcaacagatttggccccctgcctgagatggtgttctgcaagtacaccaagcagatcctgcagggcgtggcctacctgcacgagaactgtgtggtgcaccgggacatcaagggcaacaacgtgatgctgatgcccaccggcatcatcaagctgattgactttggctgtgcccggcggctggcctgggccggcctgaatggcacccacagcgacatgctgaagtccatgcacggcaccccctactggatggcccctgaggtgatcaatgaaagtggctacggcaggaagagtgacatctggagcatcggctgcaccgtgtttgagatggccaccgggaagccacccctggcctccatggacaggatggccgccatgttctacatcggggcccaccggggcctgatgccacccctgcctgaccacttctctgaaaatgctgctgactttgtgaggatgtgcctgacccgggaccagcacgagcggcccagcgccctgcagctgctgaagcacagcttcctggagaggagccactag

SEQ ID NO: 300775 - DNA, 2094 bp, Artificial Sequence
  derived and/or modified sequence
aagcagagcttcccctgcatctgcaagaaccctggcacccagaagagctgtgtgcccctgtctgtgcagcccacagagccccggctgaactacctggacctgaagtacagcgacatgttcaaggagatcaacagcacagccaacggccctggcatctatgagatgtttggcacccctgtgtactgccacgtgcgggagacagaaagagatgagaacacctactaccgggagatctgcagcgcccccagcggccgccgcatcaccaacaagtgccgcagcagccacagcgagaggaagagcaacatccgcacccggctgagccagaagaagacccacatgaagtgccccaagaccagctttggcatcaagcaggagcacaaggtgctgatcagcaaggagaagagcagcaaggctgtgcacagcaacctgcatgacattgaaaatggagatggcatcagcgagccagactggcagatcaagagcagtggaaatgagttcctgagcagcaaggatgagatccaccccatgaacctggcccagaccccagagcagagcatgaagcagaatgagttcccccctgtgtctgacctgagcatcgtggaggaggtgtccatggaggagagcactggagaccgggacatcagcaacaaccagatcctgaccaccagcctgcgggacctgcaggagctggaggagctgcaccaccagatccccttcatccccagtgaagattcctgggccgtgcccagcgagaagaacagcaacaagtatgtgcagcaggagaagcagaacacagccagcctgagcaaggtgaatgccagccgcatcctgaccaatgacctggagtttgattctgtgtctgaccacagcaagaccctgaccaacttctccttccaggccaagcaggagagcgccagcagccagacctaccagtactgggtgcactacctggaccatgacagcctggccaacaagagcatcacctaccagatgtttgggaagaccctgagcggcaccaacagcatcagccaggagatcatggattctgtgaacaatgaggagctgacagatgagctgctgggctgcctggccgctgagctgctggccctggatgagaaggacaacaacagctgccagaagatggccaatgaaacagatcctgagaacctgaacctggtgctgcgctggaggggcagcacccccaaggagatgggccgggagaccaccaaggtgaagatccagaggcacagcagcggcctgcgcatctatgaccgggaggagaagttcctgatcagcaatgagaagaagatcttcagcgagaacagcctgaagtctgaggagcccatcctgtggaccaagggggagatcctgggcaaaggagcctacggcaccgtgtactgcggcctgaccagccagggccagctgattgctgtgaagcaggtggccctggacaccagcaacaagctggccgctgagaaggagtacaggaagctgcaggaggaggtggacctgctgaaggccctgaagcacgtgaacatcgtggcctacctgggcacctgcctgcaggagaacacagtgtccatcttcatggagtttgtgcctgggggcagcatcagcagcatcatcaacagatttggccccctgcctgagatggtgttctgcaagtacaccaagcagatcctgcagggcgtggcctacctgcacgagaactgtgtggtgcaccgggacatcaagggcaacaacgtgatgctgatgcccaccggcatcatcaagctgattgactttggctgtgcccggcggctggcctgggccggcctgaatggcacccacagcgacatgctgaagtccatgcacggcaccccctactggatggcccctgaggtgatcaatgaaagtggctacggcaggaagagtgacatctggagcatcggctgcaccgtgtttgagatggccaccgggaagccacccctggcctccatggacaggatggccgccatgttctacatcggggcccaccggggcctgatgccacccctgcctgaccacttctctgaaaatgctgctgactttgtgaggatgtgcctgaccaggtag

SEQ ID NO: 300776 - DNA, 3987 bp, Artificial Sequence
  derived and/or modified sequence
atgagcagcatgcccaagcccgagcggcacgccgagagcctgctggacatctgccacgacactaactcatctccaactgatctcatgaccgtgactaagaatcagaacatcattcttcagtctatcagccgcagtgaggagttcgaccaggatggcgattgttcccacagcacactggtgaacgaagaggaagaccctagcggggggagacaagactggcagccacgaaccgagggggtcgagataacagtgacttttccgcgggatgtgagcccgcctcaggagatgtcgcaggaggatctcaaggagaagaacctgatcaacagctctttgcaggagtgggcccaagcacacgccgtgtcgcatcctaatgaaatcgaaaccgtggagttacgcaagaagaagctgacaatgagacctctcgtgctccaaaaggaggaaagcagcagggaactctgcaacgtcaatcttgggttcctcttgccccgctcttgtcttgaattaaatatcagtaagtcagtgaccagggaggatgcccctcatttcttaaaagagcagcagaggaagtccgaggaatttagtacctctcatatgaaatatagcggccgcagcataaagttcctccttcctccattgagtctattgccaacacgttcaggtgtgctgacaattccgcagaatcacaagttccccaaggaaaaggaacggaacatcccatcactcacgagtttcgtcccgaagctctccgtgagcgtcaggcagtcagatgagcttagtccaagtaatgagccccctggagcgctagtgaaaagcctgatggaccctacccttcggtctagtgatggatttatctggtccaggaatatgtgttcctttcctaagaccaatcatcatcggcagtgtttggaaaaggaagagaattggaaaagcaaggagattgaagaatgcaataagattgaaatcacgcactttgagaaggggcagtctcttgtgagctttgaaaacttgaaggaagggaacattcccgctgttagagaggaagatatagattgccatggttcaaaaacaaggaaacctgaagaggagaacagtcagtacctgagctcacggaagaatgagtcatctgtcgcaaaaaattacgagcaagatcccgaaatcgtgtgcacaatcccctctaagtttcaagaaactcagcactcggagattacaccatcccaggacgaggagatgcgtaataataaggcagctagcaaacgcgtctccctgcacaagaatgaggcgatggagccaaacaacatcctggaggaatgcaccgtgctcaaatcccttagctcagtggtctttgacgatcccatcgacaaattgccagagggttgcagctccatggagacaaacataaagatcagcatagccgagcgtgctaagccagaaatgtcgaggatggtccctctgatccacataacgttccccgtcgatggaagccctaaagaacctgtcattgctaaaccgagcctgcagactaggaaaggaactattcataataatcacagcgtgaatatccccgtgcaccaagagaatgataagcacaagatgaactcacatagatcaaagctcgactcaaagaccaaaacttccaagaaaacccctcaaaacttcgtgatctcgactgagggacctataaagccgactatgcacaagacaagtatcaaaactcagattttccctgcactgggcctggtggacccccgcccatggcaactcccaaggtttcagaaaaagatgccccagatcgctaagaagcagagcacccacagaacccagaagcccaaaaagcagtcattcccttgcatttgcaaaaacccaggcacgcaaaagagctgtgttccgttgtctgtacagcccactgaacctcgcttgaactacctggacctgaaatactctgatatgttcaaggaaattaattctacagcaaatggtccaggcatctatgagatgttcggcacccctgtgtattgccacgtccgcgaaacagaacgggacgaaaatacatactaccgagagatttgtagcgccccttcagggaggagaattacgaataagtgtcgcagttctcactccgagcgcaagtctaacatccgcactcgtctgagtcagaagaaaactcacatgaaatgtcccaagacgagcttcggtatcaagcaagaacacaaggtgcttatctccaaggaaaaatcaagcaaagctgtgcacagtaatctgcacgacatcgaaaatggggacgggatatcggagcctgattggcagattaaaagctccggaaatgagttcctctccagcaaagacgaaatacatcctatgaatttagcccagaccccagaacagagcatgaagcagaacgagtttccccccgtttcagatctgtccattgttgaggaagtctccatggaggagagcaccggtgatcgggatatttcaaataaccaaatattgacgacgtcactgagggatttacaggaactggaagagctgcatcaccagattcctttcattccgtccgaagacagctgggccgtaccaagcgagaagaacagcaataagtacgtacagcaggaaaaacaaaacacggcatccttgtccaaggtaaatgcctctcgcattctgactaacgaccttgagtttgactcagtgtcagatcactccaaaactctcaccaattttagcttccaggccaaacaagaatccgcctccagtcaaacttatcagtattgggtgcattatctggaccatgattctctcgccaacaagagcattacctatcagatgttcgggaaaaccctgtcaggaaccaatagcatctcgcaggagatcatggactctgtaaacaacgaagagttgaccgatgagctcctaggctgcctggcggctgagttgctggcactggacgagaaggataataactcctgccagaaaatggcgaatgagaccgaccctgagaatctgaacctcgttttgagatggagggggtctacccccaaggaaatgggtcgtgaaaccactaaggtgaaaatacaaaggcattctagcggtttgcggatctacgatcgcgaagagaagtttctcatctccaacgagaagaagatcttttctgaaaactcgctcaaaagtgaggaaccgatcctgtggactaagggcgaaatcctcgggaaaggcgcatacggcacagtgtattgcgggctgacctcacaagggcaactaatcgccgtgaaacaggtcgcccttgatacgagcaacaagctggccgccgagaaagaatatcgcaagctgcaggaagaggtagacctgctgaaagctctcaaacacgtgaatatagtggcctatctggggacgtgtctgcaggagaatacagtatctatattcatggagtttgttcccggcggctcaatttcctctataattaaccgcttcgggccactgcctgagatggtgttctgcaagtatacaaagcagatcctgcagggcgtggcttaccttcacgagaactgtgtggtccaccgagacattaaggggaataacgtcatgctgatgccgacaggaattattaaactgattgattttggatgtgcccggcggctcgcgtgggcagggttaaacggcactcactccgatatgctgaagagcatgcatggcactccctattggatggcacctgaagttatcaacgaaagcgggtacggcaggaagtctgacatctggtctattggttgcaccgtcttcgagatggccacaggtaaaccacccttagcttctatggaccgaatggctgccatgttctatataggagcccatcggggcttaatgccgcctctccctgaccatttctccgagaacgccgctgatttcgtgaggatgtgtcttacgcgggatcagcacgagaggcccagcgcactgcagctgctcaagcacagctttctcgagcgatcccactag

SEQ ID NO: 300777 - DNA, 2094 bp, Artificial Sequence
  derived and/or modified sequence
aagcagagcttcccctgcatctgcaagaaccccggcacccagaagtcttgcgtgcctctgtcagtacagccaactgagcccagactgaactatctcgacctgaaatattccgacatgttcaaggagataaatagcaccgcaaatggccccggcatctacgagatgttcggtacacccgtgtattgtcatgttagagaaactgagcgcgatgaaaacacatactatcgcgaaatttgcagcgccccctctggaagaaggatcactaataagtgccggtcttctcacagcgagcgaaagtctaatatccgcacccgattgagtcagaaaaagacgcacatgaaatgtccaaaaacatcgttcggaatcaaacaagagcataaggtgctcatttcaaaggaaaagtcttctaaagccgtccacagtaatttgcatgacatcgaaaatggggacggcatttccgaaccagactggcagattaagagttcaggcaacgaatttctgagcagtaaagacgagattcacccaatgaacctcgcacagacaccagagcagtctatgaagcagaacgaatttccccctgttagcgacctctccatcgtggaggaggtgtccatggaggaaagcaccggcgatcgagacatcagcaacaatcagatcctgaccacaagcctgcgtgacctgcaggaactcgaggaactgcaccatcagattccattcatcccctctgaagattcctgggctgtgccaagtgagaaaaactcaaataaatacgtgcagcaagagaagcagaacaccgcctctttgtctaaagttaacgcaagccgaatactcactaacgatcttgagttcgactctgtttctgatcacagcaagactctaactaactttagtttccaggccaagcaggagtcagcctcttcacagacctaccagtattgggtgcactatctggaccatgactctcttgctaataaaagcatcacttatcagatgtttggcaagaccctttcaggcactaacagcatttcccaggagattatggatagcgtgaacaatgaagaactcactgacgaactgttgggttgtctcgccgcagagctactcgctctggatgagaaggataataactcctgccagaaaatggctaatgagacagaccccgagaacctgaacctggtgctccggtggagaggaagtacgcctaaggaaatgggtcgtgaaacaacaaaggtgaagattcagcgccactctagcggactgaggatctatgatcgagaggaaaaattcctcatctctaacgagaagaagatcttctccgaaaactccctgaagagcgaagagccgatcctatggaccaaaggcgagatactggggaagggcgcatatggaacagtgtactgcggactgacaagtcagggccaactcatcgctgtgaagcaagtcgctttggatacatctaacaaacttgctgcggaaaaggagtatcgcaaactccaggaagaggttgatctgctcaaggcactgaaacatgtcaacatcgtcgcctatctgggaacttgcctccaagagaatactgtttccatattcatggaattcgtgccggggggttctatctcaagtatcataaataggttcggaccactgcccgagatggtcttctgcaagtataccaaacagattctacagggcgtggcttatctccatgagaattgcgttgtgcaccgagacatcaaagggaataatgtaatgctgatgccgaccgggatcataaaactgatcgattttggatgcgccagacgcctggcttgggctgggttgaatggcacacacagtgatatgttgaaatctatgcatggaactccatactggatggccccagaggtgattaacgagagcggttacggaaggaaaagcgatatttggtcaattgggtgtactgtatttgagatggctacaggaaaaccccctctcgcaagcatggaccgcatggcagcaatgttttacatcggggcccatagaggactgatgcctcctctgcctgatcatttcagtgaaaacgccgccgacttcgtccgtatgtgtttgacaagatag

SEQ ID NO: 300778 - DNA, 3987 bp, Artificial Sequence
  derived and/or modified sequence
atgagctctatgccaaaacccgaaaggcatgccgagtctctgctggatatatgccacgatactaatagcagtccaactgatttaatgactgtgacgaaaaatcagaacatcatcctgcagtctatctctcgctcagaggaatttgaccaagacggcgattgcagtcactccacactggtgaatgaggaagaagacccctcggggggaaggcaggactggcagcctcggactgaaggggttgagattaccgtgactttcccacgcgatgtatcgccgcctcaagagatgtcccaggaagacctcaaagagaaaaacctgattaactcaagcttgcaggagtgggcacaggctcatgctgtcagtcacccaaacgaaattgaaacagttgaactacgcaaaaagaagctgacaatgaggccactggtacttcagaaagaggagtctagtcgcgaactgtgtaatgtaaacctgggcttcttacttccacgcagctgcctggaattgaatatcagcaaaagtgtgaccagagaagacgccccacattttcttaaagaacagcagaggaagagtgaagaatttagcacttcacacatgaaatattctggtcggtccatcaagttcttactgcccccactcagtctgctgccaactaggagcggggttctgactattccccagaatcacaaattcccgaaagaaaaagagagaaacatcccctccctcaccagctttgtacctaagctgagcgtgtctgttcgccaatcagacgagctgtcaccgagcaatgagccacccggtgccctcgtgaagagcctgatggaccctactctgcgtagcagtgacgggtttatttggagtcggaacatgtgttcatttccgaaaacaaatcatcaccggcagtgtctggagaaagaggaaaattggaaaagtaaagagatagaagagtgtaataagattgaaatcacacattttgaaaaggggcagagtctagtgtcattcgagaacctgaaggaggggaatattcctgcagttcgggaggaggacatcgactgtcacggatcaaagacccgtaagccggaggaagaaaacagtcaatatttgagcagtagaaaaaatgagtctagtgtggccaaaaattacgaacaggaccccgaaattgtatgcactatccccagtaagtttcaggagactcagcactcggaaatcaccccctctcaggatgaagagatgcgcaacaacaaagcagccagcaagagggtatcactgcataaaaacgaggccatggagcccaataacattctggaggagtgtacagtactgaagtcactctcatccgtcgttttcgatgatccaatcgacaaactgccagaagggtgttcctccatggagaccaatattaaaatatctattgctgaacgagccaagccggagatgtctcgcatggtcccattgatccatatcacctttccggtggacgggtcccccaaggagcctgttatcgcgaagcctagcttgcagacccgcaaaggcaccatccacaacaaccacagcgtcaacattccggtccatcaggaaaacgataaacacaaaatgaatagtcaccgttcgaaactggattcaaaaaccaaaacctcaaaaaaaactccccaaaactttgtgatttcaaccgaggggcctataaaacccaccatgcacaagacttctatcaaaacacagatttttccagctttgggattggtggatcctcgaccctggcagttacccaggttccagaaaaaaatgccacagattgccaaaaagcagtcgacacatcgcacacagaaacctaaaaagcagtctttcccatgcatttgcaagaatccaggtacacagaaaagctgtgttccgctgtcagtgcagcccactgaaccgcgtttaaattatttggatctgaaatattcagatatgtttaaggagatcaactccaccgccaacgggcctggcatttatgagatgtttggaactccagtgtactgtcatgtgcgcgaaaccgagagggacgaaaacacttactaccgcgagatctgcagcgccccaagcggcaggcgcattacaaacaagtgtaggtcatcccactctgaaaggaaatctaatatccgaactcggctgtcacagaagaaaactcacatgaagtgtccgaagacaagctttgggatcaagcaggagcacaaggttctaatcagcaaagaaaagagctcaaaagctgtccactcaaatctgcatgacatcgagaatggggatgggatatcagagccggattggcagatcaagagttccggcaacgagttcctaagttccaaggatgagattcatcctatgaatctggctcaaacacccgaacagtctatgaagcagaacgagttccctcctgtgtccgatctgtcaattgtggaggaggtgtcgatggaggaaagtaccggtgaccgcgacatttctaacaatcaaatactgacaacctcccttagagacctccaggaactcgaggagttacaccaccagatcccctttatcccatctgaggattcatgggccgtcccaagtgagaaaaactcaaacaagtatgttcaacaggaaaagcagaatactgcatcactctccaaggtaaatgcatcaagaattctaacgaatgacttggaattcgattcagtctccgatcacagtaaaaccctcacaaacttctcctttcaggccaagcaagagtctgccagctcacaaacgtaccagtactgggtccattatttggatcatgatagcctggcaaataagagcatcacttaccagatgttcggcaaaacactttcgggtacaaattccatatcccaggagatcatggattccgtgaataatgaagaactgactgacgaactcctcggctgcttggccgcagagctactggccctcgacgagaaggacaataactcttgccagaaaatggctaacgaaaccgatcctgaaaacctaaatctcgtgctccggtggcggggatccacccccaaagaaatgggacgcgagaccaccaaggtcaaaatccagcggcactctagcggccttcggatctacgaccgtgaggaaaagtttctgatatcaaatgaaaaaaagatttttagcgagaactcgttgaaatccgaggagcccatcttatggactaaaggggagatcctcggcaagggcgcttacggtaccgtatattgtggcctgacctcccagggccagctgattgctgtgaagcaggtggctctggatacctctaataaacttgccgctgaaaaggagtacaggaaactccaggaggaggtcgatctactgaaggctctcaaacatgtcaatattgtagcatatctaggaacatgcttacaggaaaacactgtaagtatattcatggaatttgtgccaggaggcagcatctcttcaattatcaaccgatttgggccactgcctgaaatggtattctgtaaatacacaaaacaaattctgcagggcgtagcctacctgcacgagaactgcgtcgtgcacagagatataaagggcaacaatgtgatgcttatgcctacaggcatcataaagctaatcgattttggttgtgctaggcgccttgcttgggcaggcttaaacggaacccattccgatatgctgaaaagcatgcacggtacgccctactggatggctcctgaggtaatcaatgaatctggatacggccgaaagtcagacatctggtccattggctgcacagtgtttgaaatggcaaccggcaaacctccgctggcgtctatggatcggatggccgcaatgttctatattggggctcaccgtggattgatgccccctctgcctgaccattttagtgagaatgccgcagatttcgtccggatgtgcctgactcgggatcagcatgagcgcccttccgcgctgcagcttttgaaacacagtttcctggagcggagccattag

SEQ ID NO: 300779 - DNA, 2094 bp, Artificial Sequence
  derived and/or modified sequence
aaacaaagcttcccctgcatctgcaaaaaccctggcacacagaaatcatgtgtccccctgagcgtgcagcccaccgagcctcggctgaattaccttgacctcaaatattcggatatgttcaaggagattaacagcacggcaaacggccctggcatatatgaaatgtttggtactcccgtgtattgccacgtgcgggaaaccgagcgggatgaaaatacttactatcgcgaaatttgttctgcaccctctggtcggcgaataacaaataagtgcaggtcctcccacagcgaacgtaaatcgaatatccggactagattgagccagaagaagactcatatgaaatgcccgaaaacgtcattcggcatcaaacaggagcataaggtcctgattagcaaggagaaatcatcgaaagctgtccactccaatctgcatgacattgaaaacggtgacgggatcagcgagcctgattggcaaatcaagtcctcaggtaacgagttcctttcgtcaaaagacgaaattcacccaatgaatctagctcagacccctgagcaatcaatgaaacagaatgaattcccacccgtaagtgatctgagtatcgtggaagaagtgtccatggaagaatctaccggcgatcgggatatttcgaacaatcagatcctcacaactagtctgagagatctgcaggagttggaggagctccatcatcagataccctttatcccaagtgaagactcctgggctgtcccttctgagaagaacagtaataaatatgttcagcaagagaagcaaaacactgcatccctttccaaggtgaatgccagcaggatactgactaacgacttggagtttgactcagtctcagaccattcgaaaactttgactaatttttcctttcaggccaaacaagaaagcgcctcctcgcagacttatcagtactgggtccactacttggaccacgacagtctggccaataagtcaataacataccagatgttcggtaagacactgagcggtaccaactcaatttcccaggagataatggactcggttaacaacgaagaactaactgacgagcttctcgggtgtctggccgctgagcttctggccctcgatgagaaagacaataatagctgtcagaagatggcaaatgaaacagacccagaaaatttgaaccttgtgctgagatggcgaggatccacacctaaagagatgggcagagaaaccaccaaagtgaagatacagcgacattcatccggtctgcggatctacgaccgggaggagaaattcctgatatcgaacgagaagaagatcttctccgaaaacagtttgaaaagtgaagagccaattctgtggacgaaaggggagattttagggaagggcgcatatgggaccgtttactgcggcttaaccagtcagggtcaactgatcgccgtgaaacaggttgccctggacacttctaacaagttggccgcagagaaggaataccggaagctacaagaggaagttgatctcttgaaagctctgaagcatgtaaacatcgtcgcctaccttggaacatgtctgcaggaaaacaccgtgtcaatattcatggagtttgtgcctggaggctctatctcttcaatcattaatagattcggacccctgcccgagatggtgttttgtaaatacacgaaacagatcttacagggcgtcgcttatctgcatgagaattgtgtggtgcaccgagatatcaagggcaataatgttatgttaatgccaaccggtatcattaagctgattgatttcggatgtgcccgtcgcttagcttgggccggtttgaatggcacacattctgatatgcttaaaagcatgcatgggacaccttattggatggcacccgaagtcatcaatgagtctgggtacgggagaaagtctgacatctggtctatagggtgcacagtgtttgagatggctaccggcaagccccctctcgcctcaatggataggatggcagccatgttttatatcggtgcacaccgtgggctcatgcccccactccctgaccactttagtgagaatgccgcagacttcgtgaggatgtgcctcactcgctag

SEQ ID NO: 300780 - DNA, 4377 bp, Artificial Sequence
  derived and/or modified sequence
ttcaaagaaacagcagcttttggacattttaatgagttctatgccaaaaccagaaagacatgctgagtcattgcttgacatttgtcatgatacaaactcttctccaactgatttgatgacagttaccaaaaatcaaaacatcatcttgcaaagcatcagcagaagtgaggagttcgaccaagatggtgactgcagtcattccacactggttaatgaagaagaagatcccagtggtggtagacaggactggcaacccaggacagaaggtgttgagatcactgtaacttttccaagagatgtcagtcctccccaagaaatgagccaagaagacttaaaagaaaagaatctgataaactcatcgcttcaagaatgggcacaagcacatgcagtttctcatccaaatgaaatagaaacggtggagctcaggaaaaagaagctgaccatgcggcccttagttttgcaaaaagaggaaagttccagggagctctgcaatgtgaacttgggctttttgctaccaagatcttgtttagaactgaacatttccaagtctgtaaccagagaagatgctcctcattttctgaaggagcagcaaagaaaatctgaagagttttcgacctctcatatgaagtacagtggccgaagcatcaagttccttctgccaccactgtcactcttgcccacgcgatctggtgtccttactatcccccaaaatcacaagtttccaaaagaaaaagaaagaaacattccaagtctcacatcttttgtgcctaagctctcagtgtctgttcgtcaatctgatgagctcagcccatcaaacgagcctccgggagccctagttaagtcgttgatggatccgactctcaggtcttctgatggcttcatttggtcaagaaacatgtgctcttttcctaagactaaccatcacaggcaatgcctggagaaggaggaaaactggaaatccaaggaaatagaagaatgtaacaaaattgaaatcactcactttgaaaaagggcagtctttggtgtcttttgagaatttgaaggaaggcaatattcctgcagttagggaagaggatattgactgccatggtagtaaaacgcgaaaacctgaagaagagaactctcaatatctttcatcaagaaagaatgagagttcagtagccaaaaactatgaacaagatccagaaatagtatgtaccattccaagcaagttccaagaaacccagcattcagaaataactccaagccaggatgaagagatgagaaataataaagctgcttcaaaaagagtttcattacataaaaatgaagcaatggaaccaaacaatattttagaagagtgtactgtacttaaaagcttatccagtgtagtctttgatgaccccattgataaactcccagaaggttgtagcagcatggagacaaacataaaaatatcaatagcagaaagagccaaaccagaaatgagtaggatggtgcctcttatccacatcaccttccctgtggatggaagccccaaggaaccagtgatagccaaaccaagcctccaaacaagaaagggaaccattcataacaaccatagtgtcaacatacctgtacaccaagaaaatgacaagcataagatgaattcccataggagtaagttggattcaaagaccaagacaagtaagaagacacctcagaattttgtgatttctactgaaggtcccattaagcctaccatgcataaaaccagcataaaaacacaaattttcccggctttgggacttgtggaccccaggccttggcaattgcccaggtttcaaaagaaaatgccacagatagcaaagaagcaatcaactcaccggactcagaaacctaaaaagcaatcatttccttgcatctgtaaaaatccaggaacacagaagtcatgtgttcctctctctgttcaaccgacagagccaagactaaattacctagatcttaagtatagtgatatgttcaaagaaatcaattcaactgctaatggacctggaatctatgaaatgtttgggacccctgtttattgtcatgtgcgagagactgaaagggatgaaaacacgtattaccgtgagatatgttcggctccatcaggcagacgtatcaccaataaatgtcgatcttcacacagtgagaggaagagcaatatcagaacaagactttctcagaaaaaaacacatatgaaatgcccaaagacttcatttggcattaaacaagagcacaaagtcttaatttctaaagaaaagagttccaaggctgtacatagcaacctacatgacattgaaaatggtgatggtatttcagaaccagactggcagataaagtcttcaggaaatgagtttctatcttccaaagatgaaattcatcccatgaacttggctcagacacctgagcagtccatgaaacagaatgaattccctcctgtctcagatttatccattgttgaagaagtttctatggaagagtctactggtgatagagacatttctaacaatcaaatactcaccacaagcctcagagatctgcaagaacttgaagagctacatcaccagatcccatttatcccttcagaagacagctgggcagtgcccagtgagaagaattctaacaagtatgtacagcaagaaaagcagaatacagcatctcttagtaaagtaaatgccagccgaattttaactaatgatctagagtttgatagtgtttcagatcactctaaaacacttacaaatttctctttccaagcaaaacaagaaagtgcatcttcccagacatatcaatattgggtacattatttggatcatgatagtttagcaaataagtcaatcacatatcaaatgtttggaaaaaccttaagtggcacaaattcaatttcccaagaaattatggactctgtaaataatgaagaattgacagatgaactattaggttgtctagctgcagaattattagctcttgatgagaaagataacaactcttgccaaaaaatggcaaatgaaacagatcctgaaaacctaaatcttgtcctcagatggagaggaagtaccccaaaagaaatgggcagagagacaacaaaagtcaaaatacagaggcatagtagtgggctcaggatatatgacagggaggagaaatttctcatctcaaatgaaaagaagatattttctgaaaatagtttaaagtctgaagaacctatcctatggaccaagggtgagattcttggaaagggagcctacggcacagtatactgtggtctcactagtcaaggacagctaatagctgtaaaacaggtggctttggatacctctaataaattagctgctgaaaaggaataccggaaactacaggaagaagtagatttgctcaaagcactgaaacatgtcaacattgtggcctatttggggacatgcttgcaagagaacactgtgagcattttcatggagtttgttcctggtggctcaatctctagtattataaaccgttttgggccattgcctgagatggtgttctgtaaatatacgaaacaaatacttcaaggtgttgcttatctccatgagaactgtgtggtacatcgcgatatcaaaggaaataatgttatgctcatgccaactggaataataaagctgattgactttggctgtgccaggcgtttggcctgggcaggtttaaatggcacccacagtgacatgcttaagtccatgcatgggactccatattggatggccccagaagtcatcaatgagtctggctatggacggaaatcagatatctggagcattggttgtactgtgtttgagatggctacagggaagcctccactggcttccatggacaggatggccgccatgttttacatcggagcacaccgagggctgatgcctcctttaccagaccacttctcagaaaatgcagcagactttgtgcgcatgtgcctgaccagggaccagcatgagcgaccttctgctctccagctcctgaagcactccttcttggagagaagtcactgaatatacatcaagactttcttcccagttccactgcagatgctcccttgcttaattgtggggaatgatggctaagggatctttgtttccccactgaaaattcagtctaacccagtttaagcagatcctatggagtcattaactgaaagttgcagttacatattagcctcctcaagtgtcagacattattactcatagtatcagaaaacatgttcttaataacaacaaaaaactatttcagtgtttacagttttgattgtccaggaactacattctctattgttttatatgacatttctttttatttttggcctgtcctgtcaattttaatgttgttagtttaaaataaattgtaaaaacaa

SEQ ID NO: 300781 - DNA, 2195 bp, Artificial Sequence
  derived and/or modified sequence
aagcaatcatttccttgcatctgtaaaaatccaggaacacagaagtcatgtgttcctctctctgttcaaccgacagagccaagactaaattacctagatcttaagtatagtgatatgttcaaagaaatcaattcaactgctaatggacctggaatctatgaaatgtttgggacccctgtttattgtcatgtgcgagagactgaaagggatgaaaacacgtattaccgtgagatatgttcggctccatcaggcagacgtatcaccaataaatgtcgatcttcacacagtgagaggaagagcaatatcagaacaagactttctcagaaaaaaacacatatgaaatgcccaaagacttcatttggcattaaacaagagcacaaagtcttaatttctaaagaaaagagttccaaggctgtacatagcaacctacatgacattgaaaatggtgatggtatttcagaaccagactggcagataaagtcttcaggaaatgagtttctatcttccaaagatgaaattcatcccatgaacttggctcagacacctgagcagtccatgaaacagaatgaattccctcctgtctcagatttatccattgttgaagaagtttctatggaagagtctactggtgatagagacatttctaacaatcaaatactcaccacaagcctcagagatctgcaagaacttgaagagctacatcaccagatcccatttatcccttcagaagacagctgggcagtgcccagtgagaagaattctaacaagtatgtacagcaagaaaagcagaatacagcatctcttagtaaagtaaatgccagccgaattttaactaatgatctagagtttgatagtgtttcagatcactctaaaacacttacaaatttctctttccaagcaaaacaagaaagtgcatcttcccagacatatcaatattgggtacattatttggatcatgatagtttagcaaataagtcaatcacatatcaaatgtttggaaaaaccttaagtggcacaaattcaatttcccaagaaattatggactctgtaaataatgaagaattgacagatgaactattaggttgtctagctgcagaattattagctcttgatgagaaagataacaactcttgccaaaaaatggcaaatgaaacagatcctgaaaacctaaatcttgtcctcagatggagaggaagtaccccaaaagaaatgggcagagagacaacaaaagtcaaaatacagaggcatagtagtgggctcaggatatatgacagggaggagaaatttctcatctcaaatgaaaagaagatattttctgaaaatagtttaaagtctgaagaacctatcctatggaccaagggtgagattcttggaaagggagcctacggcacagtatactgtggtctcactagtcaaggacagctaatagctgtaaaacaggtggctttggatacctctaataaattagctgctgaaaaggaataccggaaactacaggaagaagtagatttgctcaaagcactgaaacatgtcaacattgtggcctatttggggacatgcttgcaagagaacactgtgagcattttcatggagtttgttcctggtggctcaatctctagtattataaaccgttttgggccattgcctgagatggtgttctgtaaatatacgaaacaaatacttcaaggtgttgcttatctccatgagaactgtgtggtacatcgcgatatcaaaggaaataatgttatgctcatgccaactggaataataaagctgattgactttggctgtgccaggcgtttggcctgggcaggtttaaatggcacccacagtgacatgcttaagtccatgcatgggactccatattggatggccccagaagtcatcaatgagtctggctatggacggaaatcagatatctggagcattggttgtactgtgtttgagatggctacagggaagcctccactggcttccatggacaggatggccgccatgttttacatcggagcacaccgagggctgatgcctcctttaccagaccacttctcagaaaatgcagcagactttgtgcgcatgtgcctgaccaggtaagaaactgaaagcaagaggaggaagataaatgcccggagattccaagtggcagacatttccctttcaatttatggcccattaaaagctctgttttggttatg

SEQ ID NO: 300782 - DNA, 4348 bp, Artificial Sequence
  derived and/or modified sequence
agaactgcgagatgtgatgttgacagcggagacacagagacaaccgctgagaaacttgagtcaaagatgactaaattttaaggcctggaaagtgcaggagatggaaatacaaccaacaaaatgggagcacattggaactttcaagtagcaagtttctgtaggactgggcttgtgggaaaggaccggttgaaagaaagacatgctgagtcattgcttgacatttgtcatgatacaaactcttctccaactgatttgatgacagttaccaaaaatcaaaacatcatcttgcaaagcatcagcagaagtgaggagttcgaccaagatggtgactgcagtcattccacactggttaatgaagaagaagatcccagtggtggtagacaggactggcaacccaggacagaaggtgttgagatcactgtaacttttccaagagatgtcagtcctccccaagaaatgagccaagaagacttaaaagaaaagaatctgataaactcatcgcttcaagaatgggcacaagcacatgcagtttctcatccaaatgaaatagaaacggtggagctcaggaaaaagaagctgaccatgcggcccttagttttgcaaaaagaggaaagttccagggagctctgcaatgtgaacttgggctttttgctaccaagatcttgtttagaactgaacatttccaagtctgtaaccagagaagatgctcctcattttctgaaggagcagcaaagaaaatctgaagagttttcgacctctcatatgaagtacagtggccgaagcatcaagttccttctgccaccactgtcactcttgcccacgcgatctggtgtccttactatcccccaaaatcacaagtttccaaaagaaaaagaaagaaacattccaagtctcacatcttttgtgcctaagctctcagtgtctgttcgtcaatctgatgagctcagcccatcaaacgagcctccgggagccctagttaagtcgttgatggatccgactctcaggtcttctgatggcttcatttggtcaagaaacatgtgctcttttcctaagactaaccatcacaggcaatgcctggagaaggaggaaaactggaaatccaaggaaatagaagaatgtaacaaaattgaaatcactcactttgaaaaagggcagtctttggtgtcttttgagaatttgaaggaaggcaatattcctgcagttagggaagaggatattgactgccatggtagtaaaacgcgaaaacctgaagaagagaactctcaatatctttcatcaagaaagaatgagagttcagtagccaaaaactatgaacaagatccagaaatagtatgtaccattccaagcaagttccaagaaacccagcattcagaaataactccaagccaggatgaagagatgagaaataataaagctgcttcaaaaagagtttcattacataaaaatgaagcaatggaaccaaacaatattttagaagagtgtactgtacttaaaagcttatccagtgtagtctttgatgaccccattgataaactcccagaaggttgtagcagcatggagacaaacataaaaatatcaatagcagaaagagccaaaccagaaatgagtaggatggtgcctcttatccacatcaccttccctgtggatggaagccccaaggaaccagtgatagccaaaccaagcctccaaacaagaaagggaaccattcataacaaccatagtgtcaacatacctgtacaccaagaaaatgacaagcataagatgaattcccataggagtaagttggattcaaagaccaagacaagtaagaagacacctcagaattttgtgatttctactgaaggtcccattaagcctaccatgcataaaaccagcataaaaacacaaattttcccggctttgggacttgtggaccccaggccttggcaattgcccaggtttcaaaagaaaatgccacagatagcaaagaagcaatcaactcaccggactcagaaacctaaaaagcaatcatttccttgcatctgtaaaaatccaggaacacagaagtcatgtgttcctctctctgttcaaccgacagagccaagactaaattacctagatcttaagtatagtgatatgttcaaagaaatcaattcaactgctaatggacctggaatctatgaaatgtttgggacccctgtttattgtcatgtgcgagagactgaaagggatgaaaacacgtattaccgtgagatatgttcggctccatcaggcagacgtatcaccaataaatgtcgatcttcacacagtgagaggaagagcaatatcagaacaagactttctcagaaaaaaacacatatgaaatgcccaaagacttcatttggcattaaacaagagcacaaagtcttaatttctaaagaaaagagttccaaggctgtacatagcaacctacatgacattgaaaatggtgatggtatttcagaaccagactggcagataaagtcttcaggaaatgagtttctatcttccaaagatgaaattcatcccatgaacttggctcagacacctgagcagtccatgaaacagaatgaattccctcctgtctcagatttatccattgttgaagaagtttctatggaagagtctactggtgatagagacatttctaacaatcaaatactcaccacaagcctcagagatctgcaagaacttgaagagctacatcaccagatcccatttatcccttcagaagacagctgggcagtgcccagtgagaagaattctaacaagtatgtacagcaagaaaagcagaatacagcatctcttagtaaagtaaatgccagccgaattttaactaatgatctagagtttgatagtgtttcagatcactctaaaacacttacaaatttctctttccaagcaaaacaagaaagtgcatcttcccagacatatcaatattgggtacattatttggatcatgatagtttagcaaataagtcaatcacatatcaaatgtttggaaaaaccttaagtggcacaaattcaatttcccaagaaattatggactctgtaaataatgaagaattgacagatgaactattaggttgtctagctgcagaattattagctcttgatgagaaagataacaactcttgccaaaaaatggcaaatgaaacagatcctgaaaacctaaatcttgtcctcagatggagaggaagtaccccaaaagaaatgggcagagagacaacaaaagtcaaaatacagaggcatagtagtgggctcaggatatatgacagggaggagaaatttctcatctcaaatgaaaagaagatattttctgaaaatagtttaaagtctgaagaacctatcctatggaccaagggtgagattcttggaaagggagcctacggcacagttcaagtccaatgggaaagaaatatcttccttcaacagctgaatatgttactggaagtttggagaatcattactagatggcaaaaacaaaagatgttccttccattttgtgaactgcataagagatcttggggggtgggcgatgaagagaggtatactgtggtctcactagtcaaggacagctaatagctgtaaaacaggtggctttggatacctctaataaattagctgctgaaaaggaataccggaaactacaggaagaagtagatttgctcaaagcactgaaacatgtcaacattgtggcctatttggggacatgcttgcaagagaacactgtgagcattttcatggagtttgttcctggtggctcaatctctagtattataaaccgttttgggccattgcctgagatggtgttctgtaaatatacgaaacaaatacttcaaggtgttgcttatctccatgagaactgtgtggtacatcgcgatatcaaaggaaataatgttatgctcatgccaactggaataataaagctgattgactttggctgtgccaggcgtttggcctgggcaggtttaaatggcacccacagtgacatgcttaagtccatgcatgggactccatattggatggccccagaagtcatcaatgagtctggctatggacggaaatcagatatctggagcattggttgtactgtgtttgagatggctacagggaagcctccactggcttccatggacaggatggccgccatgttttacatcggagcacaccgagggctgatgcctcctttaccagaccacttctcagaaaatgcagcagactttgtgcgcatgtgcctgaccaggtaagaaactgaaagcaagaggaggaagataaatgcccggagattccaagtggcagacatttccctttcaatttatggcccattaaaagctctgttttggttatg

SEQ ID NO: 300783 - DNA, 1092 bp, Artificial Sequence
  derived and/or modified sequence
atggtggagcccctgagagagaagatcagagacctggagaagagcttcacccagaagtacccccccgtgaagttcctgagcgagaaggacagaaagagaatcctgatcaccggcggcgccggcttcgtgggcagccacctgaccgacaagctgatgatggacggccacgaggtgaccgtggtggacaacttcttcaccggcagaaagagaaacgtggagcactggatcggccacgagaacttcgagctgatcaaccacgacgtggtggagcccctgtacatcgaggtggaccagatctaccacctggccagccccgccagcccccccaactacatgtacaaccccatcaagaccctgaagaccaacaccatcggcaccctgaacatgctgggcctggccaagagagtgggcgccagactgctgctggccagcaccagcgaggtgtacggcgaccccgaggtgcacccccagagcgaggactactggggccacgtgaaccccatcggccccagagcctgctacgacgagggcaagagagtggccgagaccatgtgctacgcctacatgaagcaggagggcgtggaggtgagagtggccagaatcttcaacaccttcggccccagaatgcacatgaacgacggcagagtggtgagcaacttcatcctgcaggccctgcagggcgagcccctgaccgtgtacggcagcggcagccagaccagagccttccagtacgtgagcgacctggtgaacggcctggtggccctgatgaacagcaacgtgagcagccccgtgaacctgggcaaccccgaggagcacaccatcctggagttcgcccagctgatcaagaacctggtgggcagcggcagcgagatccagttcctgagcgaggcccaggacgacccccagaagagaaagcccgacatcaagaaggccaagctgatgctgggctgggagcccgtggtgcccctggaggagggcctgaacaaggccatccactacttcagaaaggagctggagtaccaggccaacaaccagtacatccccaagcccaagcccgccagaatcaagaagggcagaaccagacacagctag

SEQ ID NO: 300784 - DNA, 1092 bp, Artificial Sequence
  derived and/or modified sequence
atggttgaaccgctgcgggagaagatccgggacctcgagaagagctttacccagaagtaccccccagtgaagtttctctcggaaaaggaccggaagaggatattgatcaccgggggagctggctttgttggttcccatcttaccgacaaattaatgatggacggtcacgaagtaacagtggtggataatttctttactgggaggaagaggaacgtagaacactggatcggtcatgaaaactttgagctcattaaccacgatgtcgttgagccactgtatatcgaggtggatcagatctaccacctagccagtcctgccagtcctcccaattatatgtacaacccaattaagacactgaagactaatactatcggaaccctaaatatgcttggtctggcgaagcgggtaggcgcccgtttgctgttagctagcacatcggaggtgtacggcgatcccgaagtccatccgcagtctgaggactactgggggcatgtgaaccccatcggccccagggcgtgttatgacgagggtaaaagggtggccgagaccatgtgttatgcatacatgaagcaggagggtgtggaagtaagagtggccaggattttcaataccttcgggccacgaatgcatatgaacgacgggcgtgtagtgagcaacttcatattgcaggcgctacagggcgaacccttaacggtgtacggatccggatcacagacgcgtgcatttcagtacgtgtcagatctggtgaatgggctggtagcgctgatgaactcaaacgtgtcctctccggttaatctggggaaccctgaggaacatactatactggagttcgcccagctgataaagaatctggtcggttcaggctccgagattcagtttttatcagaggcacaggacgacccccagaaacggaaaccagatatcaaaaaggctaagctcatgcttggttgggagcctgtcgtgcctctcgaagaaggactcaacaaggccatccactatttcaggaaggaactcgaataccaggctaacaaccagtatatccccaagccaaagcccgcaaggattaagaagggccggacaaggcactcttag

SEQ ID NO: 300785 - DNA, 1092 bp, Artificial Sequence
  derived and/or modified sequence
atggtggagcccctgcgggagaagatccgggacctggagaagagcttcacccagaagtacccacctgtgaagttcctgtctgagaaggacaggaagaggatcctgatcactggaggagctggctttgtgggcagccacctgacagacaagctgatgatggatggccacgaggtgacagtggtggacaacttcttcaccggcaggaagagaaatgtggagcactggattggacatgaaaattttgagctgatcaaccatgatgtggtggagcccctgtacatcgaggtggaccagatctaccacctggccagccctgccagcccccccaactacatgtacaaccccatcaagaccctgaagaccaacaccatcggcaccctgaacatgctgggcctggccaagagggtgggcgcccggctgctgctggccagcaccagcgaggtgtatggagaccctgaggtgcacccccagagcgaggactactggggccacgtgaaccccatcggcccccgggcctgctatgatgagggcaagagggtggccgagaccatgtgctacgcctacatgaagcaggagggcgtggaggtgcgggtggcccgcatcttcaacaccttcggccccaggatgcacatgaatgatggccgggtggtgagcaacttcatcctgcaggccctgcagggcgagcccctgactgtgtatggcagcggcagccagacccgggccttccagtatgtgtctgacctggtgaatggcctggtggccctgatgaacagcaatgtgagcagccctgtgaacctgggcaaccctgaggagcacaccatcctggagtttgcccagctgatcaagaacctggtgggcagcggcagcgagatccagttcctgtctgaggcccaggatgacccccagaagaggaagccagacatcaagaaggccaagctgatgctgggctgggagcctgtggtgcccctggaggagggcctgaacaaggccatccactacttcaggaaggagctggagtaccaggccaacaaccagtacatccccaagcccaagccagcccgcatcaagaagggccgcaccaggcacagctag

SEQ ID NO: 300786 - DNA, 1092 bp, Artificial Sequence
  derived and/or modified sequence
atggtggagcccctgcgggagaagatccgggacctggagaagagcttcacacaaaagtatccccccgtaaaattcctctctgaaaaagacaggaaaagaatcctgataaccgggggcgctggctttgtcgggtctcacctaaccgataagctgatgatggatggacatgaagtcactgttgtggacaattttttcacgggtaggaagaggaatgttgaacactggatcgggcacgaaaacttcgagctgatcaaccatgacgtagttgaaccactgtacattgaggtggaccagatttaccacctcgcatccccagcaagtccccctaactacatgtacaatccaatcaaaaccttgaagacgaatactatcggcacactaaatatgttggggctggcaaaaagagtaggagctaggcttcttctcgcctccacttctgaggtttacggcgaccctgaggtccaccctcaaagtgaagactattggggacacgttaacccaatagggccccgagcctgctacgacgaagggaaacgcgttgcagaaactatgtgttacgcctacatgaaacaggaaggtgtggaggtgagagttgctcgcatctttaacacatttggaccacgaatgcatatgaacgacggcagagttgtaagcaactttatcctccaagccctgcaaggtgagcctttaactgtctatggctctgggtctcagactagagcctttcaatatgtatcagatctcgtgaatggtctcgtggcgttaatgaatagcaacgtaagcagcccagtgaatctgggcaaccctgaggaacataccattctggaattcgcccagcttataaagaacctggtgggatcgggtagcgaaatccagtttctcagcgaggctcaggatgacccgcagaagcgaaagcctgatattaaaaaagccaagctgatgcttgggtgggagccagttgtaccgttagaggaaggtctgaataaggcaatccattatttccgcaaggagctggaataccaggccaacaaccagtacataccaaagcccaagcctgcccgaattaagaagggccgcacaagacattcctag

SEQ ID NO: 300787 - DNA, 1092 bp, Artificial Sequence
  derived and/or modified sequence
atggttgagccactgcgggaaaaaattcgtgatctagagaaatcgttcactcagaaataccctcccgtgaagttcttatccgagaaagacaggaaacggatcctgatcaccgggggagcaggcttcgtgggcagccatctcaccgacaagctaatgatggacgggcatgaagtgactgtggtggacaattttttcacgggtcgcaagcgcaacgtggagcattggatcggccacgaaaattttgagttaatcaatcatgacgtggtggagcctctgtacatagaagtggatcaaatatatcacttggcttcacctgcatccccgccaaactacatgtataacccaattaaaacattgaagactaacactataggaacactgaatatgttagggctggcaaaaagagtcggggcacggctccttcttgcatcaacctccgaggtgtacggggatcctgaagtacaccctcagtcagaggactactggggtcacgtgaatccgatcggacctcgggcttgttatgatgaaggcaaaagagttgctgagacaatgtgctacgcttatatgaagcaagagggcgtggaagttcgagtcgcccgaatttttaataccttcgggcctagaatgcatatgaatgacggtcgcgtagtgtcaaatttcatcttacaggctctgcagggggaacctctgaccgtgtacgggagcgggtctcaaacacgggctttccagtacgtgtcggaccttgtaaacggcctggtcgctctcatgaactccaatgtgtcttctcccgtgaacttgggaaaccccgaagaacacactatactagagtttgcccagctcataaaaaatctcgtcggttcaggcagcgaaatacagtttctaagcgaagcccaagacgatccccagaaacgcaagcccgatattaaaaaagccaagctgatgctcggctgggagcccgtggtgccactcgaagagggactaaacaaggctatccattatttcagaaaggaacttgaatatcaggcgaataaccagtatattcccaaaccaaagcccgcacggatcaagaagggacgaactcgtcattcgtag

SEQ ID NO: 300788 - DNA, 1987 bp, Artificial Sequence
  derived and/or modified sequence
gcgcattgtgcagcaggcgggcccccgcgcggtagggccctggacccgcgcggctcccggggatggtgagcaaggcgctgctgcgcctcgtgtctgccgtcaaccgcaggaggatgaagctgctgctgggcatcgccttgctggcctacgtcgcctctgtttggggcaacttcgttaatatgagatggttgaaccactaagagagaaaatcagagatttagaaaaaagctttacccagaaatacccaccagtaaagtttttatcagaaaaggatcggaaaagaattttgataacaggaggcgcagggttcgtgggctcccatctaactgacaaactcatgatggacggccacgaggtgaccgtggtggacaatttcttcacgggcaggaagagaaacgtggagcactggatcggacatgagaacttcgagttgattaaccacgacgtggtggagcccctctacatcgaggttgaccagatataccatctggcatctccagcctcccctccaaactacatgtataatcctatcaagacattaaagaccaatacgattgggacattaaacatgttggggctggcaaaacgagtcggtgcccgtctgctcctggcctccacatcggaggtgtatggagatcctgaagtccaccctcaaagtgaggattactggggccacgtgaatccaataggacctcgggcctgctacgatgaaggcaaacgtgttgcagagaccatgtgctatgcctacatgaagcaggaaggcgtggaagtgcgagtggccagaatcttcaacacctttgggccacgcatgcacatgaacgatgggcgagtagtcagcaacttcatcctgcaggcgctccagggggagccactcacggtatacggatccgggtctcagacaagggcgttccagtacgtcagcgatctagtgaatggcctcgtggctctcatgaacagcaacgtcagcagcccggtcaacctggggaacccagaagaacacacaatcctagaatttgctcagttaattaaaaaccttgttggtagcggaagtgaaattcagtttctctccgaagcccaggatgacccacagaaaagaaaaccagacatcaaaaaagcaaagctgatgctggggtgggagcccgtggtcccgctggaggaaggtttaaacaaagcaattcactacttccgtaaagaactcgagtaccaggcaaataatcagtacatccccaaaccaaagcctgccagaataaagaaaggacggactcgccacagctgaactcctcacttttaggacacaagactaccattgtacacttgatgggatgtatttttggcttttttttgttgtcgtttaaagaaagactttaacaggtgtcatgaagaacaaactggaatttcattctgaagcttgctttaatgaaatggatgtgcctaaaagctcccctcaaaaaactgcagattttgccttgcactttttgaatctctctttttatgtaaaatagcgtagatgcatctctgcgtattttcaagtttttttatcttgctgtgagagcatatgttgtgactgtcgttgacagttttatttactggtttctttgtgaagctgaaaaggaacattaagcgggacaaaaaatgccgattttatttatgaaagtgggtacttaataaatgagtcgttatactatgcataaagaaaaatcctagcagtattgtcaggtggtggtgcgccggcattgattttagggcagataaaagaattctgtgtgagagctttatgtttctcttttaattcagagtttttccaaggtctacttttgagttgcaaacttgactttgaaatattcctgttggtcatgatcaaggatatttgaaatcactactgtgttttgctgcgtatctggggcgggggcaggttggggggcacaaagttaacatattcttggttaaccatggttaaatatgctattttaataaattattgaaactc

SEQ ID NO: 300789 - DNA, 1935 bp, Artificial Sequence
  derived and/or modified sequence
aggataggaactggagttattgttaatgttacaggaagaacacattctcaaaggagaggggggtggtgggaaactttgattttcatagggttttcagtttcctctcaaatgggaggatgcagcagtgccgctacttaactgaacgtctcgacagtctgatggggcggccctcagccttccggagcagcagtgggactgacctgtccagtgaggaagaaacactgaaccagatggaatggcctttggggatggaaaaaccccagtttacgctcatctcttctctcagctaacttttgtggagccctgttcccaaactggcctgggccagagcaccgtggaggggtatttgttgtaaatggaaggtttccaggcccgcctggaaatcctgaagggtgagacctgcagtgggctcaggagtctgcatttgtgggtgaccgagggggcctcccctccctctagagtccacactgtggagagcatcaggaagggaaaggcctgcatcttgtgctcagtgagctcatcgtctagtgaggaaggcatgtgtgaatctctggacaaggcagcgctgagctgttgtggactagtggtgcaggcaagggattatttctgaccaaggatggtgagaaggtttcccatacagactgacgtctggattgagctttgaagaagaaagccaggactggagcagacgacgaggagggaagagtttgaccagatataccatctggcatctccagcctcccctccaaactacatgtataatcctatcaagacattaaagaccaatacgattgggacattaaacatgttggggctggcaaaacgagtcggtgcccgtctgctcctggcctccacatcggaggtgtatggagatcctgaagtccaccctcaaagtgaggattactggggccacgtgaatccaataggacctcgggcctgctacgatgaaggcaaacgtgttgcagagaccatgtgctatgcctacatgaagcaggaaggcgtggaagtgcgagtggccagaatcttcaacacctttgggccacgcatgcacatgaacgatgggcgagtagtcagcaacttcatcctgcaggcgctccagggggagccactcacggtatacggatccgggtctcagacaagggcgttccagtacgtcagcgatctagtgaatggcctcgtggctctcatgaacagcaacgtcagcagcccggtcaacctggggaacccagaagaacacacaatcctagaatttgctcagttaattaaaaaccttgttggtagcggaagtgaaattcagtttctctccgaagcccaggatgacccacagaaaagaaaaccagacatcaaaaaagcaaagctgatgctggggtgggagcccgtggtcccgctggaggaaggtttaaacaaagcaattcactacttccgtaaagaactcgagtaccaggcaaataatcagtacatccccaaaccaaagcctgccagaataaagaaaggacggactcgccacagctgaactcctcacttttaggacacaagactaccattgtacacttgatgggatgtatttttggcttttttttgttgtcgtttaaagaaagactttaacaggtgtcatgaagaacaaactggaatttcattctgaagcttgctttaatgaaatggatgtgcctaaaagctcccctcaaaaaactgcagattttgccttgcactttttgaatctctctttttatgtaaaatagcgtagatgcatctctgcgtattttcaagtttttttatcttgctgtgagagcatatgttgtgactgtcgttgacagttttatttactggtttctttgtgaagctgaaaaggaacattaagcgggacaaaaaatgccgattttatttatgaaagtgggtacttaataaatgagtcgttatactatgcataaagaaaaa

SEQ ID NO: 300790 - protein, 816 aa, Artificial Sequence
  derived and/or modified sequence
MGDILAHESELLGLVKEYLDFAEFEDTLKTFSKECKIKGKPLCKTVGGSFRDSKSLTIQKDLVAAFDNGDQKVFFDLWEEHISSSIRDGDSFAQKLEFYLHIHFAIYLLKYSVGRPDKEELDEKISYFKTYLETKGAALSQTTEFLPFYALPFVPNPMVHPSFKELFQDSWTPELKLKLIKFLALISKASNTPKLLTIYKENGQSNKEILQQLHQQLVEAERRSVTYLKRYNKIQADYHNLIGVTAELVDSLEATVSGKMITPEYLQSVCVRLFSNQMRQSLAHSVDFTRPGTASTMLRASLAPVKLKDVPLLPSLDYEKLKKDLILGSDRLKAFLLQALRWRLTTSHPGEQRETVLQAYISNDLLDCYSHNQRSVLQLLHSTSDVVRQYMARLINAFASLAEGRLYLAQNTKVLQMLEGRLKEEDKDIITRENVLGALQKFSLRRPLQTAMIQDGLIFWLVDVLKDPDCLSDYTLEYSVALLMNLCLRSTGKNMCAKVAGLVLKVLSDLLGHENHEIQPYVNGALYSILSVPSIREEARAMGMEDILRCFIKEGNAEMIRQIEFIIKQLNSEELPDGVLESDDDEDEDDEEDHDIMEADLDKDELIQPQLGELSGEKLLTTEYLGIMTNTGKTRRKGLANVQWSGDEPLQRPVTPGGHRNGYPVVEDQHTPPQTAQHARNGHPQALPAAHEAVYREGKPSTPESCVSSSSAIIAKPGEWLPRGRQEEPRPAPTPRQPREAPQDPGNGVTTRECASAFTCKPRAPCTPEMLDWNPPKAKASVLAPLFSSCGPQQASRPGSTASSTRGLPSKETHPK

SEQ ID NO: 300791 - protein, 665 aa, Artificial Sequence
  derived and/or modified sequence
MGDILAHESELLGLVKEYLDFAEFEDTLKTFSKECKIKGKPLCKTVGGSFRDSKSLTIQKDLVAAFDNGDQKVFFDLWEEHISSSIRDGDSFAQKLEFYLHIHFAIYLLKYSVGRPDKEELDEKISYFKTYLETKGAALSQTTEFLPFYALPFVPNPMVHPSFKELFQDSWTPELKLKLIKFLALISKASNTPKLLTIYKENGQSNKEILQQLHQQLVEAERRSVTYLKRYNKIQADYHNLIGVTAELVDSLEATVSGKMITPEYLQSVCVRLFSNQMRQSLAHSVDFTRPGTASTMLRASLAPVKLKDVPLLPSLDYEKLKKDLILGSDRLKAFLLQALRWRLTTSHPGEQRETVLQAYISNDLLDCYSHNQRSVLQLLHSTSDVVRQYMARLINAFASLAEGRLYLAQNTKVLQMLEGRLKEEDKDIITRENVLGALQKFSLRRPLQTAMIQDGLIFWLVDVLKDPDCLSDYTLEYSVALLMNLCLRSTGKNMCAKVAGLVLKVLSDLLGHENHEIQPYVNGALYSILSVPSIREEARAMGMEDILRCFIKEGNAEMIRQIEFIIKQLNSEELPDGVLESDDDEDEDDEEDHDIMEADLDKDELIQPQLGELSGEKLLTTEYLGIMTNTGKTRRKGLANVQWSGDEPLQRPVTPGGHRNGYPV

SEQ ID NO: 300792 - DNA, 153 bp, Artificial Sequence
  derived and/or modified sequence
aagaccggcctgaccggcagccccagcagcctgtgggacctgctgagagagatgttcgtggtgtgcagcaaggagcagctgcagagcggcggcaagtacagccaccaggtgtgggcccccttcagccccctggccagcggcgccgccttctag

SEQ ID NO: 300793 - protein, 166 aa, Artificial Sequence
  derived and/or modified sequence
MGDILAHESELLGLVKEYLDFAEFEDTLKTFSKECKIKGKPLCKTVGGSFRDSKSLTIQKDLVAAFDNGDQKVFFDLWEEHISSSIRDGDSFAQKLEFYLHIHFAIYLLKYSVGRPDKEELDEKISYFKTYLETKGAALSQTTEFLPFYALPFVPNPMVHPSFKEL

SEQ ID NO: 300794 - DNA, 501 bp, Artificial Sequence
  derived and/or modified sequence
atgggcgacatcctggcccacgagagcgagctgctgggcctggtgaaggagtacctggacttcgccgagttcgaggacaccctgaagaccttcagcaaggagtgcaagatcaagggcaagcccctgtgcaagaccgtgggcggcagcttcagagacagcaagagcctgaccatccagaaggacctggtggccgccttcgacaacggcgaccagaaggtgttcttcgacctgtgggaggagcacatcagcagcagcatcagagacggcgacagcttcgcccagaagctggagttctacctgcacatccacttcgccatctacctgctgaagtacagcgtgggcagacccgacaaggaggagctggacgagaagatcagctacttcaagacctacctggagaccaagggcgccgccctgagccagaccaccgagttcctgcccttctacgccctgcccttcgtgcccaaccccatggtgcaccccagcttcaaggagctgtag

SEQ ID NO: 300795 - DNA, 501 bp, Artificial Sequence
  derived and/or modified sequence
atgggtgacatcctggcccatgaatccgagctcctggggttggttaaggaatatctggattttgcggaattcgaagacactcttaagacattttctaaggaatgcaagataaaagggaagcctctctgtaaaacagtaggagggtctttccgggactctaaaagcctgaccattcagaaggacttggtcgctgcattcgacaacggtgaccagaaagtgtttttcgacctttgggaggagcacatttccagttccatcagggatggcgattccttcgctcagaagctggagttctaccttcatattcactttgctatttacttactcaagtacagcgttgggaggcccgataaggaggagcttgacgagaaaatcagctatttcaaaacctatctcgagacaaagggagccgcgctgagtcaaacgacggagttcttgccattctacgccctgccatttgtgccaaatcccatggtacatccaagttttaaggagctgtag

SEQ ID NO: 300796 - DNA, 501 bp, Artificial Sequence
  derived and/or modified sequence
atgggagacatcctggcccatgaaagtgagctgctgggcctggtgaaggagtacctggactttgctgagtttgaggacaccctgaagaccttcagcaaggagtgcaagatcaagggcaagcccctgtgcaagacagtgggcggcagcttccgggacagcaagagcctgaccatccagaaggacctggtggccgcctttgacaacggggaccagaaggtgttctttgacctgtgggaggagcacatcagcagcagcatcagagatggagacagctttgcccagaagctggagttctacctgcacatccactttgccatctacctgctgaagtacagcgtgggccgcccagacaaggaggagctggatgagaagatctcctacttcaagacctacctggagaccaagggagctgccctgagccagaccacagagttcctgcccttctacgccctgccctttgtgcccaaccccatggtgcaccccagcttcaaggagctgtag

SEQ ID NO: 300797 - DNA, 501 bp, Artificial Sequence
  derived and/or modified sequence
atgggcgacatcctggcccacgagagcgagctgctgggcctggtgaaggagtacttggatttcgccgagttcgaagacaccttgaagacattctcaaaagagtgcaaaatcaaagggaagcccctttgtaaaactgtgggtggcagcttcagggactccaagagcttaacgattcagaaggatctcgtggcagcttttgataacggggatcagaaagtgtttttcgatctgtgggaggagcacataagctcctctatcagggatggggattctttcgcccagaagttggagttttacctacacattcactttgcgatctatctcttgaaatacagcgtgggtaggcctgataaagaagagctagacgagaagatttcttacttcaaaacctatctcgaaacaaagggagccgccctgagccagactacagaatttctgcccttctatgctttaccatttgtgccaaatccgatggtccatccctcttttaaagagctttag

SEQ ID NO: 300798 - DNA, 501 bp, Artificial Sequence
  derived and/or modified sequence
atgggggatattctcgcccacgaaagcgagctgctggggctagtcaaagagtatctggatttcgctgaatttgaggacaccctgaaaaccttttcaaaggagtgcaagattaaaggcaagccactgtgtaagacagtgggtggaagctttcgcgatagtaaatcactaacgatacagaaagatctggtagcagcattcgataatggcgaccaaaaagtgttcttcgacctgtgggaggagcacatttcctcaagcattcgagatggtgattcattcgcccaaaaattagagttctacctgcacatccacttcgctatttatctgctgaaatacagtgtgggtcgaccagataaggaagagctggacgaaaaaattagctactttaagacataccttgagacaaaaggtgccgctctgagccagaccactgagtttctgcctttttacgccctgccattcgtccctaacccaatggtgcatccttccttcaaagaactctag

SEQ ID NO: 300799 - DNA, 729 bp, Artificial Sequence
  derived and/or modified sequence
gggaggagcagcggtgcgtttggagggccgaggctctgcggacctcttgttccgaggaaaaacccgacgcgcccgctccgccgccgccggatgctaccacttctcgcctgcggtccagggatctttcttcggcaagggccgaggcggccgcctggacatcccaagaaaggacaggcccagctgcttcccagatttttgctgtgagaattaattaccagtaacagttcaatatgggggacattctggctcatgaatctgaattacttggactagtgaaagagtatttagattttgctgaatttgaagacaccttgaaaacattttcaaaagaatgcaaaataaaaggaaaaccattgtgtaaaacagtaggcggatctttcagagactccaaatcattgacaattcagaaggatcttgtcgctgcatttgacaacggagaccagaaggtgttcttcgatctgtgggaggagcacatttcaagttccatccgagatggggactcctttgcccagaagctggaattctatctccacatccattttgccatctatcttttgaagtactctgtggggagaccggacaaagaggagctggatgaaaagatttcctacttcaaaacctacctggagaccaaaggggcagccttgagccagaccacagagtttcttcctttctatgcccttccttttgttcccaaccctatggtgcacccctcatttaaagaactct

SEQ ID NO: 300800 - protein, 54 aa, Artificial Sequence
  derived and/or modified sequence
MDCYRTSLSSSWIYPTVILCLFGFFSMMRPSEPFLIPYLSGPDKNLTSAEITNE

SEQ ID NO: 300801 - protein, 64 aa, Artificial Sequence
  derived and/or modified sequence
MDCYRTSLSSSWIYPTVILCLFGFFSMMRPSEPFLIPYLSGPDKNLTSAEITNEIFPVWTYSYL

SEQ ID NO: 300802 - protein, 132 aa, Artificial Sequence
  derived and/or modified sequence
MDCYRTSLSSSWIYPTVILCLFGFFSMMRPSEPFLIPYLSGPDKNLTSAEITNEIFPVWTYSYLVLLLPVFVLTDYVRYKPVIILQGISFIITWLLLLFGQGVKTMQVVEFFYGMVTAAEVAYYAYIYSVVS

SEQ ID NO: 300803 - DNA, 3105 bp, Artificial Sequence
  derived and/or modified sequence
atccgacagccgcgggtgcgtggtcgtgcggcaagtgagcgatttggtgaacagacactcccttctgtagccatggattgttacagaacttcactaagcagttcctggatttaccccactgtgatcctctgcttatttggttttttctccatgatgagaccctcagaaccattccttatcccatatttatctggaccagataaaaacctgaccagtgcagagataacaaatgagatcttccccgtttggacatactcctacctggtgctgctgctgcctgtgtttgtcctcaccgattatgtccgctacaagccagtcatcatcttgcaaggtatcagtttcatcattacctggctgctgctgttgtttggccaaggagtgaagaccatgcaggttgtagagttcttctatgggatggtcaccgccgccgaggtggcctactacgcctacatatacagcgtggtcagccccgagcactaccagagagtgagcggctactgcaggagcgtcacgctggccgcctacacagcagggtcggtgctggctcaactcttggtatccctggcgaacatgtcgtacttttacctcaacgtcatatccttggcctctgtctccgtggctttccttttctcacttttcctaccaatgcccaagaaaagcatgttttttcatgcaaaacccagcagagaaataaagaagtcatcaagcgtgaatccagtattagaggaaactcacgaaggtgaagcaccaggctgtgaagagcagaaacccacatcagaaatactcagcacttcagggaagctgaataagggccagctgaacagcctgaaaccaagcaatgtgactgtggacgtttttgtgcagtggttccaagatttgaaggagtgctactcctcaaaacgtcttttctactggtctctatggtgggctttcgccacagcaggttttaaccaggttttgaactatgttcaaatcctgtgggattacaaggcgccatcccaagattcttccatctataatggggccgtagaagctattgcaacctttggaggggctgtggctgcctttgcagtgggttatgtgaaagtcaactgggaccttctgggagagctggctctggtggtcttctcagttgtcaatgccggttctttatttctcatgcattacacagccaatatctgggcgtgctatgctggctatttgatattcaagtccagctatatgcttcttataaccatagcagtatttcagattgcagttaatctgaatgtggaacgctatgccttggtatttggaatcaacacctttattgccttggtgattcagaccatcatgactgtgattgtagtagatcagagagggctcaacttgccagtcagcattcagtttttagtttatgggagctattttgcagtaattgctggaattttcctaatgagaagcatgtatattacctactcaaccaaatcccagaaggatgtacagagccctgctccaagtgagaatccagatgtgtctcacccagaggaagagagtaatatcatcatgtcaacaaaactctaacctcatcgcaacaaacgcaacagtggctttcaaagttatgcaataataaggaaagattttgagatgggtggcatatgttttgccataacttgacatgctttgcaaatctggattccaatggacctttcaaaaccacaacaaaacctcagttttagatgagttctctatgtgaccaattttactggatgcaattgacaggacccgtcatcataattaaacaacccatattggggaccccctgtgactagtagcagctggaaaattctggtttttatcacttgtaaagacatgcagatggcgtggaaccaaaccatgagaaaactccagccatcctggagttgatattcaccatttgtgaggagaaatactaactggactgaccctattgctaggcttaaatacttatttgatcttaccaaagaagtcaacacatgggacctttgtgtcacatgaaccattttctttcctcttctattaagtgtatttctgtttaagttacagttctctaagagaattacaatgtttgtcccatttctaagggcttctcttcaactctaataacagcattattcacgttatgatttgatagtattattatttaatttttttatgattattttccattttgtgctctgagttttgctgttgaaagtctccctcaagaatagcttcagatcctcttgtgtatttgcagaatacacaaggtcatttcccagtggcctgggagaggcagtgagccttctctccaccaccatagacaggtgttaatgcatctatgggccaggtgcagtggctcactcctgtaatccgagcaatttgggaggccaaggtgggagttttgcttgaggccagaggttcaagaccagcctgggcaacacagtgacacctgactctactaaaaaattaaaaaattagctgggcagcgtggtgtgtgcctgtagtctcagctacttgggaggccatggtgggaggatgggttgagcacaggagtcagaggctacagtgagctatgattgcaccattgcactccagcctgggcaacagagtaagactctcatccccctcctcccaaaaaagagcacctgtgtggtgtctgtctaaaataggaaaacttaaaggaggtttctagaagtattagaaataagaaaacactgatggggggagtggaataaaacacctgattttgttttgttttggtttttgagacagtctcgctctctcacccaggctggaatgcaatggcgtgatcttggctcactgcaaacttcacctcctgagttcaagccattctcctacctcagcctcccaagtagctgggactatgggtgcacaccaccacgcctggctaatttttgtatttttagtggagatggggtttcacaatgttggccaggctggtctcaaactcctgacttcaggtgatctgtctgcctcggcctcccaaagagctgagattacaggcgtgagccaccatgcctggccaaaacacctgatttttaaatggtagcaattgtgctaaataaaatgtgtaaaaattttaaa

SEQ ID NO: 300804 - DNA, 594 bp, Artificial Sequence
  derived and/or modified sequence
gcgggtgcgtggtcgtgcggcaagtgagcgatttggtgaacagacactcccttctgtagtgacaaatgagatcctctattgggctttatgtctaaagcttgcatttcaagcaatttcctcactcgaggtcaggagttcaagaccagcctggccaacatggtgaaaccccatctctactaaaaatacaaaattatccagtcatggtggcaggcacctgtaatcccagctacttgggaggctgaggcaggagaatggcttgagcccgggaggcacaggttgcaatgggctgagatcatgccactgcacttcagcctggacaacagagcgaccctccatctcaaaaaaaaaaaaaaaatcaggttttcatcgcatcaaggatgctaaaaagaataagcatcacttaattttctctttgtttccatttgatcagccatggattgttacagaacttcactaagcagttcctggatttaccccactgtgatcctctgcttatttggttttttctccatgatgagaccctcagaaccattccttatcccatatttatctggaccagataaaaacctgaccagtgcagagataacaaatgag

SEQ ID NO: 300805 - DNA, 852 bp, Artificial Sequence
  derived and/or modified sequence
aaatgatatctgtcttacagttattatgtagatttaaggagatagtatgcagaaaagcatcatacaacaaattagtttccttcctataaatgtatctcagagaacttagccacatgcaggaccatcaaaaatctataaacattacaataaggcaaagcttgagctaaaatgtggaggaattagtgaattttcctgtgcacatgataattcacatgagatagcaagatgttttcaaatatagctgccatacaatgattgttttttgttttttgtttcttctgtgcagtgacaaatgagatcctctattgggctttatgtctaaagcttgcatttcaagcaatttcctcactcgaggtcaggagttcaagaccagcctggccaacatggtgaaaccccatctctactaaaaatacaaaattatccagtcatggtggcaggcacctgtaatcccagctacttgggaggctgaggcaggagaatggcttgagcccgggaggcacaggttgcaatgggctgagatcatgccactgcacttcagcctggacaacagagcgaccctccatctcaaaaaaaaaaaaaaaatcaggttttcatcgcatcaaggatgctaaaaagaataagcatcacttaattttctctttgtttccatttgatcagccatggattgttacagaacttcactaagcagttcctggatttaccccactgtgatcctctgcttatttggttttttctccatgatgagaccctcagaaccattccttatcccatatttatctggaccagataaaaacctgaccagtgcagagataacaaatgagatcttccccgtttggacatactcctacctgg

SEQ ID NO: 300806 - DNA, 3517 bp, Artificial Sequence
  derived and/or modified sequence
ccgacagccgcgggtgcgtggtcgtgcggcaagtgagcgatttggtgaacagacactcccttctgtagccatggattgttacagaacttcactaagcagttcctggatttaccccactgtgatcctctgcttatttggttttttctccatgatgagaccctcagaaccattccttatcccatatttatctggaccagataaaaacctgaccagtgcagagataacaaatgagatcttccccgtttggacatactcctacctggtgctgctgctgcctgtgtttgtcctcaccgattatgtccgctacaagccagtcatcatcttgcaaggtatcagtttcatcattacctggctgctgctgttgtttggccaaggagtgaagaccatgcaggttgtagagttcttctatgggatggtcaccgccgccgaggtggcctactacgcctacatatacagcgtggtcagccccgagcactaccagagagtgagcggctactgcaggagcgtcacgctggccgcctacacagcagggtcggtgctggctcaactcttggtatccctggcgaacatgtcgtacttttacctcaacgtcatatccttggcctctgtctccgtggctttccttttctcacttttcctaccaatgcccaagaaaagcatgttttttcatgcaaaacccagcagagaaataaagaagtcatcaagcgtgaatccagtattagaggaaactcacgaaggtgaagcaccaggctgtgaagagcagaaacccacatcagaaatactcagcacttcagggaagctgaataagggccagctgaacagcctgaaaccaagcaatgtgactgtggacgtttttgtgcagtggttccaagatttgaaggagtgctactcctcaaaacgtcttttctactggtctctatggtgggctttcgccacagcaggttttaaccaggttttgaactatgttcaaatcctgtgggattacaaggcgccatcccaagattcttccatctataatggggccgtagaagctattgcaacctttggaggggctgtggctgcctttgcagtgggttatgtgaaagtcaactgggaccttctgggagagctggctctggtggtcttctcagttgtcaatgccggttctttatttctcatgcattacacagccaatatctgggcgtgctatgctggctatttgatattcaagtccagctatatgcttcttataaccatagcagtatttcagattgcagttaatctgaatgtggaacgctatgccttggtatttggaatcaacacctttattgccttggtgattcagaccatcatgactgtgattgtagtagatcagagagggctcaacttgccagtcagcattcagtttttagtttatgggagctattttgcagtaattgctggaattttcctaatgagaagcatgtatattacctactcaaccaaatcccagaaggatgtacagagccctgctccaagtgagaatccagatgtgtctcacccagaggaagagagtaatatcatcatgtcaacaaaactctaacctcatcgcaacaaacgcaacagtggctttcaaagttatgcaataataaggaaagattttgagatgggtggcatatgttttgccataacttgacatgctttgcaaatctggattccaatggacctttcaaaaccacaacaaaacctcagttttagatgagttctctatgtgaccaattttactggatgcaattgacaggacccgtcatcataattaaacaacccatattggggaccccctgtgactagtagcagctggaaaattctggtttttatcacttgtaaagacatgcagatggcgtggaaccaaaccatgagaaaactccagccatcctggagttgatattcaccatttgtgaggagaaatactaactggactgaccctattgctaggcttaaatacttatttgatcttaccaaagaagtcaacacatgggacctttgtgtcacatgaaccattttctttcctcttctattaagtgtatttctgtttaagttacagttctctaagagaattacaatgtttgtcccatttctaagggcttctcttcaactctaataacagcattattcacgttatgatttgatagtattattatttaatttttttatgattattttccattttgtgctctgagttttgctgttgaaagtctccctcaagaatagcttcagatcctcttgtgtatttgcagaatacacaaggtcatttcccagtggcctgggagaggcagtgagccttctctccaccaccatagacaggtgttaatgcatctatgggccaggtgcagtggctcactcctgtaatccgagcaatttgggaggccaaggtgggagttttgcttgaggccagaggttcaagaccagcctgggcaacacagtgacacctgactctactaaaaaattaaaaaattagctgggcagcgtggtgtgtgcctgtagtctcagctacttgggaggccatggtgggaggatgggttgagcacaggagtcagaggctggaatgcaatggcgtgatcttggctcactgcaaacttcacctcctgagttcaagccattctcctacctcagcctcccaagtagctgggactatgggtgcacaccaccacgcctggctaatttttgtatttttagtggagatggggtttcacaatgttggccaggctggtctcaaactcctgacttcaggtgatctgtctgcctcggcctcccaaagagctgagattacaggcgtgagccaccatgcctggccaaaacacctgatttttaaatggtagcaattgtgctaaataaaatgtgtaaaaattttaaagagttgttaacattttttgatgaattctgctgaaaattatctgaacatacctgtttttcgaaacttcaagaaacttcaataagggatgcattgagcagtctgacagtgagaataaagaatgctgagtcaagatttatattaaggctggaagctgtggctcacacctgtaatcccagcattttgggaggctgaagtgagaggttaatttgagggtaggggtatgagaccatcttggccaatatagcaagaccctgtgtctaaaacaaacaaaaaaatttttaattggattttgatatggtttggatctgtgtccccaccaaatctcacgttgaagtgtaatccccaatgttagaggtggggccggctgggaggcgactggatcatgggtgtgaagccttcatgaatggtttggcaccgtcccctcagtgctggtctcatgacagtgagttatcgtgagatctggtagtttaaaagtgtgtagcacctccccactctctctttctcctgctttggccacgtgaagatgcctgctcccactttgccttctgccatgagtaaaaattccccgaggactccctagaagcagatgttgccacgcttcctatatagcctgtgagctaattaaaccccttttcttacaaacta

SEQ ID NO: 300807 - DNA, 563 bp, Artificial Sequence
  derived and/or modified sequence
attgctcttggcagctctgtctgaaggaggaggacaagagactccagggtatggaaagggattttcatagtggcgggcagcaggaaggagcagaagttggacctgaaggcaggaagccagcttggttctagaaagaaagaaactgggggcacagaaaaaaacagccatggattgttacagaacttcactaagcagttcctggatttaccccactgtgatcctctgcttatttggttttttctccatgatgagaccctcagaaccattccttatcccatatttatctggaccagataaaaacctgaccagtgcagagataacaaatgagatcttccccgtttggacatactcctacctggtgctgctgctgcctgtgtttgtcctcaccgattatgtccgctacaagccagtcatcatcttgcaaggtatcagtttcatcattacctggctgctgctgttgtttggccaaggagtgaagaccatgcaggttgtagagttcttctatgggatggtcaccgccgccgaggtggcctactacgcctacatatacagcgtggtcagcc

SEQ ID NO: 300808 - DNA, 1491 bp, Artificial Sequence
  derived and/or modified sequence
atggactgctatcgcacatctttgtcaagctcctggatttatcctacagttattctgtgcttgtttggcttcttttccatgatgcgcccaagtgaaccgttcctaattccatacctgtcaggccccgataagaacctgacctccgcagagatcacaaacgagatattccccgtgtggacttatagttatctggttctcttgcttcctgtgttcgtacttaccgattacgtacgctacaagcccgtcattatcctacagggaatctcgttcatcatcacgtggctgcttctcttgtttggtcagggagttaaaaccatgcaggtcgtggagtttttttacggaatggttacagccgccgaagtcgcttactacgcctatatctactctgttgtgtcccccgaacattaccaacgtgtgtcgggctactgccgaagtgtcaccctggccgcctatacagccggctcagtgttggctcagctgctagttagcctggctaacatgtcttatttctatttaaatgtcatcagccttgcttccgtctctgtcgcatttcttttcagcttattcctgccaatgcccaaaaagagtatgttctttcacgctaagccctcacgcgaaataaaaaagtcgagtagtgtgaatccagttctcgaagagacacacgaaggcgaagcccctggatgcgaggagcagaagcccaccagtgaaatactgagtacatctggtaaactcaacaaaggccagttaaatagcctgaagccttcaaacgtgaccgtggatgtcttcgtccagtggttccaggacttgaaggaatgctactcctccaagcgtctgttctattggagcctgtggtgggcgttcgccacagccggattcaaccaggttttgaattatgtgcagattctctgggattacaaagccccctcccaggactcctcaatctataacggagccgtcgaggctatcgccacctttggcggtgccgtggctgcattcgcagtgggctacgtcaaggtaaactgggatctgctcggagagcttgccctcgtggtctttagtgttgttaacgcaggctccctgtttctaatgcactacaccgctaacatatgggcgtgctacgccggctacctgattttcaaatcatcgtacatgctattgattaccatcgctgttttccagatagctgtaaatttgaacgtggaacggtacgctttggtgtttggcattaataccttcattgctctggtgattcagactattatgaccgtgatagtagtggatcagcgtggcttaaacctgcccgtgtctatacagtttctggtgtatggctcctatttcgccgtcatagccggcatcttcctcatgaggtccatgtatattacatattccacgaagtcccagaaggacgtccaatccccagcgcccagcgagaacccagacgtaagccacccagaagaagaatccaatatcataatgagtaccaagttatag

SEQ ID NO: 300809 - DNA, 165 bp, Artificial Sequence
  derived and/or modified sequence
atggactgttaccggacatccctgtcttccagctggatttaccccaccgtgattctttgccttttcggatttttttctatgatgaggcccagcgaaccctttcttatcccctacctgtccggacctgataagaatctgacctcagcggagattaccaatgagtag

SEQ ID NO: 300810 - DNA, 195 bp, Artificial Sequence
  derived and/or modified sequence
atggattgctaccgaacttcactgtcctctagttggatttaccctactgttatcctttgtctgtttgggtttttctcaatgatgcgcccatccgaaccatttctcattccctacctcagcggccctgacaaaaatttaacttccgccgagatcacaaacgagatattccccgtctggacgtattcatacctttag

SEQ ID NO: 300811 - DNA, 1491 bp, Artificial Sequence
  derived and/or modified sequence
atggactgctaccggacttctctgagcagttcatggatctaccctactgtaatcctttgtctttttggctttttctccatgatgcggcccagcgagcccttcttgatcccctacctctccggtcccgataaaaatctgactagtgctgaaatcaccaacgagattttccctgtctggacttactcttacctggttttgctcttgcctgtgtttgtcttaaccgactatgttagatacaagccagtgatcattctccaggggatctcttttataattacatggctgctgctgctttttggacagggagtgaaaaccatgcaggtagtggaattcttctacggcatggtgaccgccgcagaggtcgcatactacgcctacatctacagtgtggtatctccagaacactaccagcgggtttcagggtattgccggagtgttacactggctgcctacactgccggaagcgtgcttgcgcagctcctggtgagccttgctaatatgtcttacttttacctgaatgttatcagcctcgcatccgtctcggttgcgtttctattctccctcttcctgcctatgcccaagaagagtatgttcttccacgcgaagccttcgagggagattaagaagtctagctcagtgaaccctgtgttggaggagacccacgagggggaggcgcccggctgcgaggaacaaaagcccactagcgaaattttaagcactagcggcaagctgaacaagggacaactcaactccctcaaaccttccaacgtgactgtggacgtgtttgttcagtggttccaggatctgaaagaatgttattctagtaaaagattattctattggagcctgtggtgggcctttgccactgctggattcaatcaggtcctgaattatgtgcagattctatgggattacaaagctccgtcacaggactcaagtatatacaatggcgccgttgaggccatcgccaccttcggtggagctgttgccgcgtttgcagttgggtacgtgaaagtgaattgggatctcctgggcgaactggccctggtcgttttctccgtagtgaacgctggctctctgtttctcatgcactacaccgctaatatatgggcttgttatgcgggctacctgatatttaaatcatcctacatgctcctgattacaatcgcagtgttccagatcgccgtgaacctcaatgtggaacgatacgcgctggtgttcggaatcaacacttttatcgccctggtgattcaaacaattatgaccgtgattgtcgtggatcagaggggtctcaatctcccagtttccatacagttcctggtctatggtagctatttcgctgttatcgcgggcattttcctcatgcgttcaatgtatataacctactcaactaaatcacagaaagacgtgcagtctcctgccccttccgagaatcccgatgtgtcccatcctgaggaggagtctaacatcatcatgagcaccaaactgtag

SEQ ID NO: 300812 - DNA, 399 bp, Artificial Sequence
  derived and/or modified sequence
atggattgctaccgcacaagcctgagctcgagttggatttacccaaccgtgatcctgtgtttgtttgggttcttctcaatgatgaggccgagcgaaccgttcctgatcccgtacttatccggccctgataaaaacctcacatcggccgaaatcacaaacgaaattttcccagtgtggacctactcttacctagtcttactcttacccgtcttcgtgctgaccgactatgtacgatacaaacccgtgatcatccttcaaggaatttcattcatcatcacatggttgctgctgctcttcggccagggagtgaaaaccatgcaggtcgtggagtttttctacggcatggtaactgcagccgaggtggcatactacgcttatatctactccgtggtgtcatag

SEQ ID NO: 300813 - DNA, 1491 bp, Artificial Sequence
  derived and/or modified sequence
atggactgctaccgcaccagcctgagcagctcctggatctaccccaccgtcatcctgtgcctgtttggcttcttctccatgatgaggccttctgagcccttcctgatcccctacctgagcggccctgacaagaacctgaccagcgctgagatcaccaatgagatcttccctgtgtggacctacagctacctggtgctgctgctgcctgtgtttgtgctgacagattatgtgcgctacaagcctgtgatcatcctgcagggcatctccttcatcatcacctggctgctgctgctgtttggccagggcgtgaagaccatgcaggtggtggagttcttctacggcatggtgacagctgctgaggtggcctactatgcctacatctacagcgtggtgtccccagagcactaccagagggtgtctggctactgccgctctgtgaccctggccgcctacacagctggctctgtgctggcccagctgctggtgtccctggccaacatgagctacttctacctgaatgtcatcagcctggcctctgtgtctgtggccttcctgttcagcctcttcctgcccatgcccaagaagtccatgttcttccacgccaagcccagccgggagatcaagaagagcagctctgtgaaccctgtgctggaggagacccatgaaggagaggcccctggctgtgaggagcagaagcccaccagcgagatcctgagcaccagcggcaagctgaacaagggccagctgaacagcctgaagcccagcaatgtgacagtggatgtgtttgtgcagtggttccaggacctgaaggagtgctacagcagcaagaggctcttctactggagcctgtggtgggcctttgccacagctggcttcaaccaggtgctgaactacgtgcagatcctgtgggactacaaggcccccagccaggacagcagcatctacaacggggctgtggaggccatcgccacctttggaggagctgtggccgcctttgctgtgggctacgtgaaggtgaactgggacctgctgggggagctggccctggtggtgttttctgtggtgaatgccggcagcctcttcctgatgcactacacagccaacatctgggcctgctacgccggctacctgatcttcaagagcagctacatgctgctgatcaccatcgctgtgttccagattgctgtgaacctgaatgtggagagatatgccctggtgtttggcatcaacaccttcatcgccctggtgatccagaccatcatgaccgtcatcgtggtggaccagaggggcctgaacctgcctgtgtccatccagttcctggtgtatggcagctactttgctgtgattgctggcatcttcctgatgaggtccatgtacatcacctacagcaccaagagccagaaggatgtgcagagccctgcccccagtgaaaatccagatgtgagccaccctgaggaggagagcaacatcatcatgagcaccaagctgtag

SEQ ID NO: 300814 - DNA, 165 bp, Artificial Sequence
  derived and/or modified sequence
atggactgctaccgcaccagcctgagcagctcctggatctaccccaccgtcatcctgtgcctgtttggcttcttctccatgatgaggccttctgagcccttcctgatcccctacctgagcggccctgacaagaacctgaccagcgctgagatcaccaatgaatag

SEQ ID NO: 300815 - DNA, 195 bp, Artificial Sequence
  derived and/or modified sequence
atggactgctaccgcaccagcctgagcagctcctggatctaccccaccgtcatcctgtgcctgtttggcttcttctccatgatgaggccttctgagcccttcctgatcccctacctgagcggccctgacaagaacctgaccagcgctgagatcaccaatgagatcttccctgtgtggacctacagctacctgtag

SEQ ID NO: 300816 - DNA, 399 bp, Artificial Sequence
  derived and/or modified sequence
atggactgctaccgcaccagcctgagcagctcctggatctaccccaccgtcatcctgtgcctgtttggcttcttctccatgatgaggccttctgagcccttcctgatcccctacctgagcggccctgacaagaacctgaccagcgctgagatcaccaatgagatcttccctgtgtggacctacagctacctggtgctgctgctgcctgtgtttgtgctgacagattatgtgcgctacaagcctgtgatcatcctgcagggcatctccttcatcatcacctggctgctgctgctgtttggccagggcgtgaagaccatgcaggtggtggagttcttctacggcatggtgacagctgctgaggtggcctactatgcctacatctacagcgtggtgtcctag

SEQ ID NO: 300817 - DNA, 1491 bp, Artificial Sequence
  derived and/or modified sequence
atggactgctaccggaccagcctgagcagcagctggatctaccccactgtcatcttatgtctgtttggtttcttcagcatgatgagaccctccgagccctttctgatcccgtacctatctgggcctgacaagaacctgacctctgcagagataactaacgagatattccccgtgtggacttacagctatctagttctgctcctccctgtctttgtacttaccgattacgtcaggtacaagcccgtcatcatattacaggggatttcattcatcattacatggcttctgctgttgtttggacagggcgtgaaaaccatgcaggtcgtggagttcttttacgggatggtaaccgctgccgaggtggcgtactacgcctatatatattccgtcgtttcccctgagcactatcagagggtctctggatattgccggtctgttactctcgcagcatacactgctgggtcagtgctcgctcaactgctggtgagcctggctaacatgagttatttctaccttaacgtcatttccctggcctcagtgtccgtcgcttttctgttctctttatttctccctatgccgaagaagagcatgttctttcacgccaagccgagcagggagatcaagaagagtagctccgtgaacccagtgctggaggagacccacgagggggaagctcccgggtgtgaagagcagaagcctacatccgaaatcctcagcaccagcggtaagctcaataaaggacaactaaattcactcaaaccatcaaacgttaccgtggatgtttttgtgcagtggtttcaggacttaaaggagtgctactcttcgaagcgtctgttctactggtccctatggtgggcttttgctacggcaggatttaatcaggttcttaattacgtccagatactctgggactataaagcccctagtcaagactcctccatctacaacggggctgttgaagctatagctacttttggaggtgccgttgcggcattcgcggtggggtacgtcaaggtcaactgggacctgttgggggagcttgctctggtagtcttctctgtcgtcaatgcggggtctctgtttctcatgcactataccgcgaatatatgggcctgctatgccggatatctgatattcaagtctagctacatgttactaatcactattgccgtgttccagatcgccgttaatttaaatgtcgagcggtatgccctggtattcggaattaacacatttatcgccctggtgatccaaaccatcatgacagtcatcgtagtggaccagcgtggcctaaacttgcccgtgagtatccagttccttgtctacgggagctacttcgcggtcattgctggtattttcctgatgcgctctatgtatattacttattccaccaagtcacagaaggacgttcagtctcctgctccaagtgaaaatcccgacgtctcccatcctgaggaggagagcaatattattatgagcaccaagctctag

SEQ ID NO: 300818 - DNA, 165 bp, Artificial Sequence
  derived and/or modified sequence
atggactgctaccggaccagcctgagcagcagctggatctaccccaccgtgatactttgcctgtttgggttcttctcgatgatgagaccaagcgaacccttccttattccttacctcagtgggccagacaagaacctgacctctgccgagatcaccaatgagtag

SEQ ID NO: 300819 - DNA, 195 bp, Artificial Sequence
  derived and/or modified sequence
atggactgctaccggaccagcctgagcagcagctggatctaccccactgtgatcctctgcctgtttggcttcttctccatgatgaggccgagtgagccatttctgatcccatacctgtcaggaccagacaaaaacctcacatctgcggagatcactaacgaaatttttccggtctggacctacagctacctatag

SEQ ID NO: 300820 - DNA, 1491 bp, Artificial Sequence
  derived and/or modified sequence
atggactgctaccggaccagcctgagcagcagctggatctaccccaccgtaatcctttgtctgttcggcttctttagcatgatgcgaccttctgaacccttcttgatcccttacctgtccggccccgacaaaaatttgaccagtgccgaaatcacaaatgagatatttcccgtgtggacatacagttaccttgtgttactgctgccagtgtttgttctaaccgattatgtcaggtacaaacccgtcatcatcctgcaaggaattagcttcatcattacatggcttctcctgctgttcggtcagggagttaagacaatgcaggtggtcgagtttttctacggcatggtgactgccgccgaggtggcctactacgcttacatttacagcgttgtgagccctgagcactaccaacgcgttagcggctattgtagaagcgtgacactcgccgcttatacagctgggtcggttttagcgcagctcctggtgtctctcgccaatatgagctatttctacctgaacgtcatctctcttgctagcgtgtcagtggcattcctgttctctctatttcttccaatgccaaagaagagtatgttcttccatgccaaaccatctagggaaatcaaaaaatcaagttctgtgaaccccgtgctggaggagacccacgagggcgaagcaccaggctgcgaagaacagaaaccgacctccgaaatattgtccactagcggcaagcttaacaagggccaattgaatagcctgaagccaagcaatgtcactgtggatgtgttcgtccagtggttccaggacttgaaagagtgttattcaagcaaaagactcttttactggagcctctggtgggctttcgcaacggcgggctttaatcaggtactgaattatgtgcagatcctttgggactacaaggctccctcacaggactcctccatttacaatggggcagtcgaggctattgcaaccttcgggggcgctgtggctgcgtttgctgttgggtacgttaaggttaactgggaccttttgggcgagcttgctctcgtagttttttccgtagtgaatgctggttcccttttcctgatgcactataccgccaacatctgggcatgctacgcaggctatctgatatttaagtcctcctatatgctcctcattacgattgctgtcttccaaattgccgtaaacctgaacgttgaacgatacgctctggtgtttggcattaacacctttatcgccctggtgatacagacaatcatgactgtgatcgtggtcgatcagaggggtttgaacctgccagtctcgatacaattccttgtgtacggaagctactttgccgtgattgctggcatcttcctcatgcgtagcatgtacatcacttacagtaccaagagtcagaaagacgtgcagtcacccgctcctagcgagaatcccgacgtgtcacacccagaggaggaaagcaacattattatgtcgacaaaattatag

SEQ ID NO: 300821 - DNA, 399 bp, Artificial Sequence
  derived and/or modified sequence
atggactgctaccggaccagcctgagcagcagctggatctaccccaccgtgattttatgtctttttgggttcttctccatgatgagaccaagcgagccgtttttaatcccctatttaagcgggcccgataagaacctcacttcagcagagataacgaacgaaatctttccggtgtggacttatagctatctcgtgctgttgctcccggtctttgtcctgacggactatgttaggtacaaacccgttatcatcctacagggaattagcttcatcatcacttggctgctgctgctgtttggacagggggttaagacgatgcaggtggtggagtttttctacggcatggtgaccgccgccgaggtggcttactacgcctacatctattctgtcgtgagttag

SEQ ID NO: 300822 - DNA, 1491 bp, Artificial Sequence
  derived and/or modified sequence
atggattgttatagaacctctctgtccagcagctggatttacccaaccgtgatcctttgcctatttgggttcttttccatgatgagacccagtgagccttttctcatcccttatctcagtggaccggacaagaatctcacatctgcagaaatcactaatgagatatttcctgtgtggacgtacagctacctcgtacttttgctgcctgtgttcgtgctaacagattacgtgagatacaaaccagtgatcatcttacagggcatcagcttcattataacttggctactcctcctgtttggacaaggtgtcaagaccatgcaggtagtggagttcttctatggaatggttaccgctgcagaggtagcttattatgcatacatctattccgtcgtaagccctgaacactatcagcgagtgagtggatactgcaggtccgtgacactcgcggcttacacggccggttctgtactcgctcaactgctcgtatccctcgccaatatgtcatatttttacctgaatgtcatttcgctggcgagcgttagcgtagccttcttattctccctgttcctgccaatgcccaagaagtccatgttttttcacgccaagccgagcagggagattaagaagtcatccagcgtgaacccagttcttgaggagacacatgagggggaggcacccggttgtgaggaacagaagccgacctctgaaattctttctacctccgggaaactaaacaagggacagctaaacagtctgaaacccagtaatgtcaccgtcgatgtgtttgtccaatggtttcaggacctgaaagaatgttactcttctaaacgactcttttactggtcgctctggtgggccttcgctaccgccggattcaaccaggtgctcaattatgtgcaaattctttgggactacaaggccccaagccaggactccagtatctataacggagcagtagaggccatagccacgttcgggggagccgttgccgcattcgccgtggggtatgtaaaagtgaactgggaccttctgggcgagctggcgctggtcgtgttttccgtcgtgaacgcgggttcattatttctgatgcattacacggccaacatttgggcctgctacgcaggctacctgattttcaagagttcctatatgttgttaatcactattgctgtatttcagatcgccgtaaacttgaatgttgaaaggtatgctttagtgttcggcataaacacgttcatcgccctcgttattcagactattatgacagttattgtggtcgaccagcgcggtctcaatcttcccgtgtcaattcagttcctcgtgtacggctcttattttgcagttattgcaggtattttcctgatgcgatccatgtacattacctactcaacaaagtcacagaaggacgtccagtcgcctgctcccagcgaaaacccagacgtgagtcatcccgaggaggagagcaacattattatgtccacgaagctttag

SEQ ID NO: 300823 - DNA, 165 bp, Artificial Sequence
  derived and/or modified sequence
atggactgttaccgcactagtctttcttcctcctggatataccccaccgtaattctgtgcctgttcggctttttctctatgatgcgcccttcagagccatttctgatcccctacctctcaggtccagataaaaatctaacctctgctgagatcacaaatgaatag

SEQ ID NO: 300824 - DNA, 195 bp, Artificial Sequence
  derived and/or modified sequence
atggattgctatcgcacgagcctctcatcttcctggatctacccaaccgtgattctgtgcctattcggattcttctctatgatgagaccaagtgagccattcttaataccatatctgagtgggcctgacaaaaatctgacttctgcggagatcaccaatgagatattcccagtctggacatacagttatctgtag

SEQ ID NO: 300825 - DNA, 1491 bp, Artificial Sequence
  derived and/or modified sequence
atggattgctataggaccagcttaagctcaagctggatttaccctacagtgatcctgtgcctattcggtttctttagcatgatgcggccatctgagccatttctcataccttacctgtcaggacccgataagaatctgacctccgccgaaattaccaatgagatctttcctgtatggacctattcctatctcgtactgctcctccctgtgtttgtgctcactgactatgttcggtacaagcccgttattattctgcagggcatcagctttattattacttggctcctgctgctcttcggtcagggcgtaaagacaatgcaggttgtggagtttttctatgggatggtcacagctgctgaggttgcatactatgcttacatatacagcgttgtttctccagagcattatcaaagggtgagcggttactgccgaagtgtgacattagcagcttacactgcaggctcagttcttgcgcagctgctcgtgtctttagcaaatatgtcttatttttacctgaatgttatatcactggcctcagtgagtgtggcctttcttttttccctgtttctccctatgcctaaaaagtctatgtttttccatgccaagccctctcgcgagatcaaaaagagctcttccgtcaatccagtgctagaagaaactcatgagggcgaggcgcctggctgcgaagaacagaagcccaccagcgagatcctgagtactagcggcaaattgaataaggggcagctgaactctctgaaaccctcgaatgttaccgtcgatgtgtttgtccagtggtttcaggacctcaaggagtgctactccagcaaaaggttgttctattggtccctctggtgggcgttcgcgactgccggtttcaaccaggttctgaattatgtgcaaatcctgtgggattacaaggctcccagtcaagactcttccatttacaacggtgcagtcgaggccatagctacctttggaggtgccgtggccgcatttgcagtaggatacgtgaaggtgaactgggatttgctgggggagctggccctcgttgtgttttcagtcgtcaacgccggtagcctgtttctcatgcactacaccgcaaatatttgggcgtgttatgctggctatttaatcttcaaatccagttacatgttgctgattaccattgcagttttccagattgctgtgaatttaaacgttgaacggtacgcccttgtcttcggcattaacacattcatcgctctagtgatccagaccattatgactgtcatcgtggtcgatcagcggggtctcaaccttccagtgagcatccagtttttagtgtacggttcctattttgctgtaattgctggcatcttcctgatgcgctcgatgtatatcacctacagtactaaatcacagaaagacgtgcagtcaccagcaccttctgagaatcctgacgttagccatcccgaagaggagagcaatattatcatgagcaccaaactctag

SEQ ID NO: 300826 - DNA, 399 bp, Artificial Sequence
  derived and/or modified sequence
atggattgctatcgaaccagtctatccagcagttggatctatcctactgtcattctgtgcctttttggtttctttagcatgatgcgaccttcagagcctttcttgattccctatttgagtggccctgataaaaacctgacctccgccgaaattactaacgaaatcttccctgtctggacgtactcatatctggtgctccttctgcctgtgtttgtgctgactgactacgtgcggtataagcccgtgattattctacagggcatctccttcatcattacctggcttttgttactgttcgggcagggagtgaagaccatgcaggtggtagagttcttctatggaatggtaacagcggctgaggtagcttactacgcttacatctactccgtagttagctag

SEQ ID NO: 300827 - DNA, 1491 bp, Artificial Sequence
  derived and/or modified sequence
atggactgctacagaaccagcctgagcagcagctggatctaccccaccgtgatcctgtgcctgttcggcttcttcagcatgatgagacccagcgagcccttcctgatcccctacctgagcggccccgacaagaacctgaccagcgccgagatcaccaacgagatcttccccgtgtggacctacagctacctggtgctgctgctgcccgtgttcgtgctgaccgactacgtgagatacaagcccgtgatcatcctgcagggcatcagcttcatcatcacctggctgctgctgctgttcggccagggcgtgaagaccatgcaggtggtggagttcttctacggcatggtgaccgccgccgaggtggcctactacgcctacatctacagcgtggtgagccccgagcactaccagagagtgagcggctactgcagaagcgtgaccctggccgcctacaccgccggcagcgtgctggcccagctgctggtgagcctggccaacatgagctacttctacctgaacgtgatcagcctggccagcgtgagcgtggccttcctgttcagcctgttcctgcccatgcccaagaagagcatgttcttccacgccaagcccagcagagagatcaagaagagcagcagcgtgaaccccgtgctggaggagacccacgagggcgaggcccccggctgcgaggagcagaagcccaccagcgagatcctgagcaccagcggcaagctgaacaagggccagctgaacagcctgaagcccagcaacgtgaccgtggacgtgttcgtgcagtggttccaggacctgaaggagtgctacagcagcaagagactgttctactggagcctgtggtgggccttcgccaccgccggcttcaaccaggtgctgaactacgtgcagatcctgtgggactacaaggcccccagccaggacagcagcatctacaacggcgccgtggaggccatcgccaccttcggcggcgccgtggccgccttcgccgtgggctacgtgaaggtgaactgggacctgctgggcgagctggccctggtggtgttcagcgtggtgaacgccggcagcctgttcctgatgcactacaccgccaacatctgggcctgctacgccggctacctgatcttcaagagcagctacatgctgctgatcaccatcgccgtgttccagatcgccgtgaacctgaacgtggagagatacgccctggtgttcggcatcaacaccttcatcgccctggtgatccagaccatcatgaccgtgatcgtggtggaccagagaggcctgaacctgcccgtgagcatccagttcctggtgtacggcagctacttcgccgtgatcgccggcatcttcctgatgagaagcatgtacatcacctacagcaccaagagccagaaggacgtgcagagccccgcccccagcgagaaccccgacgtgagccaccccgaggaggagagcaacatcatcatgagcaccaagctgtag

SEQ ID NO: 300828 - DNA, 165 bp, Artificial Sequence
  derived and/or modified sequence
atggactgctacagaaccagcctgagcagcagctggatctaccccaccgtgatcctgtgcctgttcggcttcttcagcatgatgagacccagcgagcccttcctgatcccctacctgagcggccccgacaagaacctgaccagcgccgagatcaccaacgagtag

SEQ ID NO: 300829 - DNA, 195 bp, Artificial Sequence
  derived and/or modified sequence
atggactgctacagaaccagcctgagcagcagctggatctaccccaccgtgatcctgtgcctgttcggcttcttcagcatgatgagacccagcgagcccttcctgatcccctacctgagcggccccgacaagaacctgaccagcgccgagatcaccaacgagatcttccccgtgtggacctacagctacctgtag

SEQ ID NO: 300830 - DNA, 399 bp, Artificial Sequence
  derived and/or modified sequence
atggactgctacagaaccagcctgagcagcagctggatctaccccaccgtgatcctgtgcctgttcggcttcttcagcatgatgagacccagcgagcccttcctgatcccctacctgagcggccccgacaagaacctgaccagcgccgagatcaccaacgagatcttccccgtgtggacctacagctacctggtgctgctgctgcccgtgttcgtgctgaccgactacgtgagatacaagcccgtgatcatcctgcagggcatcagcttcatcatcacctggctgctgctgctgttcggccagggcgtgaagaccatgcaggtggtggagttcttctacggcatggtgaccgccgccgaggtggcctactacgcctacatctacagcgtggtgagctag

SEQ ID NO: 300831 - protein, 698 aa, Artificial Sequence
  derived and/or modified sequence
MMRSRSKSPRRPSPTARGANCDVELLKTTTRDREELKCMLEKYERHLAEIQGNVKVLKSERDKIFLLYEQAQEEITRLRREMMKSCKSPKSTTAHAILRRVETERDVAFTDLRRMTTERDSLRERLKIAQETAFNEKAHLEQRIEELECTVHNLDDERMEQMSNMTLMKETISTVEKEMKSLARKAMDTESELGRQKAENNSLRLLYENTEKDLSDTQRHLAKKKYELQLTQEKIMCLDEKIDNFTRQNIAQREEISILGGTLNDLAKEKECLQACLDKKSENIASLGESLAMKEKTISGMKNIIAEMEQASRQCTEALIVCEQDVSRMRRQLDETNDELAQIARERDILAHDNDNLQEQFAKAKQENQALSKKLNDTHNELNDIKQKVQDTNLEVNKLKNILKSEESENRQMMEQLRKANEDAENWENKARQSEADNNTLKLELITAEAEGNRLKEKVDSLNREVEQHLNAERSYKSQISTLHKSVVKMEEELQKVQFEKVSALADLSSTRELCIKLDSSKELLNRQLVAKDQEIEMRENELDSAHSEIELLRSQMANERISMQNLEALLVANRDKEYQSQIALQEKESEIQLLKEHLCLAENKMAIQSRDVAQFRNVVTQLEADLDITKRQLGTERFERERAVQELRRQNYSSNAYHMSSTMKPNTKCHSPERAHHRSPDRGLDRSLEENLCYRDF

SEQ ID NO: 300832 - protein, 690 aa, Artificial Sequence
  derived and/or modified sequence
MMRSRSKSPRRPSPTARGANCDVELLKTTTRDREELKCMLEKYERHLAEIQGNVKVLKSERDKIFLLYEQAQEEITRLRREMMKSCKSPKSTTAHAILRRVETERDVAFTDLRRMTTERDSLRERLKIAQETAFNEKAHLEQRIEELECTVHNLDDERMEQMSNMTLMKETISTVEKEMKSLARKAMDTESELGRQKAENNSLRLLYENTEKDLSDTQRHLAKKKYELQLTQEKIMCLDEKIDNFTRQNIAQREEISILGGTLNDLAKEKECLQACLDKKSENIASLGESLAMKEKTISGMKNIIAEMEQASRQCTEALIVCEQDVSRMRRQLDETNDELAQIARERDILAHDNDNLQEQFAKAKQENQALSKKLNDTHNELNDIKQKVQDTNLEVNKLKNILKSEESENRQMMEQLRKANEDAENWENKARQSEADNNTLKLELITAEAEGNRLKEKVDSLNREVEQHLNAERSYKSQISTLHKSVVKMEEELQKVQFEKVSALADLSSTRELCIKLDSSKELLNRQLVAKDQEIEMRENELDSAHSEIELLRSQMANERISMQNLEALLVANRDKEYQSQIALQEKESEIQLLKEHLCLAENKMAIQSRDVAQFRNVVTQLEADLDITKRQLGTERFERERAVQELRRQNYSSNAYHMSSTMKPNTKCHSPERAHHRSPDRGLDRSLE

SEQ ID NO: 300833 - protein, 297 aa, Artificial Sequence
  derived and/or modified sequence
MMRSRSKSPRRPSPTARGANCDVELLKTTTRDREELKCMLEKYERHLAEIQGNVKVLKSERDKIFLLYEQAQEEITRLRREMMKSCKSPKSTTAHAILRRVETERDVAFTDLRRMTTERDSLRERLKIAQETAFNEKAHLEQRIEELECTVHNLDDERMEQMSNMTLMKETISTVEKEMKSLARKAMDTESELGRQKAENNSLRLLYENTEKDLSDTQRHLAKKKYELQLTQEKIMCLDEKIDNFTRQNIAQREEISILGGTLNDLAKEKECLQACLDKKSENIASLGESLAMKTVY

SEQ ID NO: 300834 - DNA, 3036 bp, Artificial Sequence
  derived and/or modified sequence
caggtatctaacctatctttgtatttttggaatttaatatagttcctgacataatcattgttcaatgggtctaattttttttttcctttaaaggcatttggatacctttgtgatagaaaaggcccttttcttcatccattgatggtttgatagtgggctgggaaggaaagctgtgttcctccacattaggcagcaaatacttgattgatttgatatttagcttagtcaaattgaagatctcaaacagacaaatcatggcttggaagaatatgttaggaaactcttggatagtaaggaggtggtaagcagtcaagtagatgatttaaccagccacaatgagcatctttgtaaagaattgattaaaattgaccaactagcagagcaactcgaaaaagagaaaaattttgtggtggattccgccaacaaggaacttgaagaagccaagattgatctcatttgccagcaaaataatattatagtattggaagatacaataaaaaggcttaaatctataattttagatactgaaaaagcacaaaataaatctccttctagacttgattcctttgtcaagactttggaagcagacaaagatcactataagagtgaagctcaacatttgagaaagatgatgcgaagtaggtctaaaagtccaagacgcccatcaccaactgcccggggtgcaaactgtgatgtagaacttttgaagacaacaacaagagatcgtgaagaacttaaatgcatgctggaaaaatatgagcgccatttggcagaaattcagggtaatgtcaaggttcttaaatctgagagagacaagatcttccttctttatgaacaggcacaggaagaaattacccgacttcgacgagaaatgatgaaaagctgtaagagtcctaaatcaacaacggcacatgctattctccggcgagtggagactgaaagagatgtagcctttactgatttacgaagaatgaccacagaacgagatagtctaagggagaggctaaagattgctcaagagacagcatttaatgagaaggctcacctggaacaaaggatagaggagctggagtgtacagttcataatcttgatgatgaacgtatggagcaaatgtcaaatatgactttgatgaaggaaaccataagcactgtggaaaaagaaatgaaatcactagcaagaaaggcaatggataccgaaagtgaacttggcagacaaaaagcagagaataattctttgagacttttgtatgaaaacacagaaaaagatctttctgatactcagcgacaccttgctaagaaaaaatatgagctacagcttactcaggagaaaattatgtgcttggatgaaaaaattgataactttacaaggcaaaatattgcacagcgagaagaaatcagcattcttggtggaaccctcaatgatctggctaaagaaaaggaatgcctgcaagcatgtttggataaaaaatctgagaatattgcatcccttggagagagtttggcaatgaaagaaaagaccatttcaggcatgaagaatatcattgctgagatggaacaggcatcaagacagtgtactgaggccctaattgtgtgtgaacaagacgtttccagaatgcgtcggcaattggatgagacaaatgatgagctggcccagatcgccagggaaagagatatcttggctcatgacaatgacaatctccaggaacagtttgctaaagctaaacaagaaaaccaggcactgtccaaaaaattgaatgacactcataatgaacttaatgacataaaacagaaggttcaagatactaatttggaggttaacaagctgaagaatatattaaagtctgaagaatctgagaaccggcaaatgatggaacaacttcgaaaagccaatgaagatgctgaaaactgggaaaataaagcccgtcaatcagaggcagataacaataccctcaaactggaacttatcactgctgaggcagagggtaacagattaaaagaaaaagtagattccctcaacagagaggttgagcaacacttaaatgcagaaaggtcttacaagtcccagatttctaccttacataaatctgttgtaaaaatggaagaggagcttcagaaggttcagtttgaaaaagtgtccgctcttgcagatttgtcttctactagggaactctgtattaaacttgactcaagcaaagaacttcttaatcgacagctggttgctaaagatcaagaaatagaaatgagggagaatgagttagattctgctcattctgaaattgaactcctgaggagtcagatggcaaatgagagaatctccatgcagaatctagaagctttgctggtggccaatcgagacaaagaatatcagtctcagatagcacttcaagaaaaagaatctgaaattcagcttcttaaagaacacctttgtttggcagaaaataaaatggccatccagagtagagatgtggcccagttcagaaatgttgtcacacaattggaagctgatttagacattaccaaaagacaactaggaacagagcgctttgaaagggagagggccgtacaagaacttcgccgccaaaattattcaagtaatgcttatcatatgagttctacaatgaagccaaatacaaaatgtcattcaccagaacgtgctcaccatcgatctcctgaccgaggcctagatcgatcattagaagagaatctttgctacagagatttctgacacctgaaatgattcttcacatccctgagaaaggtcaaagttacaaactgatttttttttttttgctacatgagtgcatttatcttttaaatgcttggcaatgttaaatgtatttattaactttgtgtctctgaatctctgttctaatgtgccatgttgcagtgatctgagatgacttataaaaacaaaaatgtatatggctctttctatccatgcagtgatagtgagtgtaaaatctgcttacttcactattgaacactattctgttcactatctggagtaaataaagaagcttattaaaacagggaaaa

SEQ ID NO: 300835 - DNA, 3037 bp, Artificial Sequence
  derived and/or modified sequence
gggcgtgcgcctgcgcggcgcggatgggccaggaaggggtccctcctaggtgccctgtaaggcaggcaggtagacgtacgcgtcgctccgtgcgtaggagcgcgcgcacggcttgtagaccccgcgagaaggaaggtcgagccaggttaccaccaaagaatatgattttggtctaggggctccagtttctgaagctgaaaactaccagaatactctccagctagaacaagaagtgagaaaccaagatagattcatctcgacactgaaattacagattgaagatctcaaacagacaaatcatggcttggaagaatatgttaggaaactcttggatagtaaggaggtggtaagcagtcaagtagatgatttaaccagccacaatgagcatctttgtaaagaattgattaaaattgaccaactagcagagcaactcgaaaaagagaaaaattttgtggtggattccgccaacaaggaacttgaagaagccaagattgatctcatttgccagcaaaataatattatagtattggaagatacaataaaaaggcttaaatctacttgattcctttgtcaagactttggaagcagacaaagatcactataagagtgaagctcaacatttgagaaagatgatgcgaagtaggtctaaaagtccaagacgcccatcaccaactgcccggggtgcaaactgtgatgtagaacttttgaagacaacaacaagagatcgtgaagaacttaaatgcatgctggaaaaatatgagcgccatttggcagaaattcagggtaatgtcaaggttcttaaatctgagagagacaagatcttccttctttatgaacaggcacaggaagaaattacccgacttcgacgagaaatgatgaaaagctgtaagagtcctaaatcaacaacggcacatgctattctccggcgagtggagactgaaagagatgtagcctttactgatttacgaagaatgaccacagaacgagatagtctaagggagaggctaaagattgctcaagagacagcatttaatgagaaggctcacctggaacaaaggatagaggagctggagtgtacagttcataatcttgatgatgaacgtatggagcaaatgtcaaatatgactttgatgaaggaaaccataagcactgtggaaaaagaaatgaaatcactagcaagaaaggcaatggataccgaaagtgaacttggcagacaaaaagcagagaataattctttgagacttttgtatgaaaacacagaaaaagatctttctgatactcagcgacaccttgctaagaaaaaatatgagctacagcttactcaggagaaaattatgtgcttggatgaaaaaattgataactttacaaggcaaaatattgcacagcgagaagaaatcagcattcttggtggaaccctcaatgatctggctaaagaaaaggaatgcctgcaagcatgtttggataaaaaatctgagaatattgcatcccttggagagagtttggcaatgaaagaaaagaccatttcaggcatgaagaatatcattgctgagatggaacaggcatcaagacagtgtactgaggccctaattgtgtgtgaacaagacgtttccagaatgcgtcggcaattggatgagacaaatgatgagctggcccagatcgccagggaaagagatatcttggctcatgacaatgacaatctccaggaacagtttgctaaagctaaacaagaaaaccaggcactgtccaaaaaattgaatgacactcataatgaacttaatgacataaaacagaaggttcaagatactaatttggaggttaacaagctgaagaatatattaaagtctgaagaatctgagaaccggcaaatgatggaacaacttcgaaaagccaatgaagatgctgaaaactgggaaaataaagcccgtcaatcagaggcagataacaataccctcaaactggaacttatcactgctgaggcagagggtaacagattaaaagaaaaagtagattccctcaacagagaggttgagcaacacttaaatgcagaaaggtcttacaagtcccagatttctaccttacataaatctgttgtaaaaatggaagaggagcttcagaaggttcagtttgaaaaagtgtccgctcttgcagatttgtcttctactagggaactctgtattaaacttgactcaagcaaagaacttcttaatcgacagctggttgctaaagatcaagaaatagaaatgagggagaatgagttagattctgctcattctgaaattgaactcctgaggagtcagatggcaaatgagagaatctccatgcagaatctagaagctttgctggtggccaatcgagacaaagaatatcagtctcagatagcacttcaagaaaaagaatctgaaattcagcttcttaaagaacacctttgtttggcagaaaataaaatggccatccagagtagagatgtggcccagttcagaaatgttgtcacacaattggaagctgatttagacattaccaaaagacaactaggaacagagcgctttgaaagggagagggccgtacaagaacttcgccgccaaaattattcaagtaatgcttatcatatgagttctacaatgaagccaaatacaaaatgtcattcaccagaacgtgctcaccatcgatctcctgaccgaggcctagatcgatcattagaagagaatctttgctacagagatttctgacacctgaaatgattcttcacatccctgagaaaggtcaaagttacaaactgatttttttttttttgctacatgagtgcatttatcttttaaatgcttggcaatgttaaatgtatttattaactttgtgtctctgaatctctgttctaatgtgccatgttgcagtgatctgagatgacttataaaaacaaaaatgtatatggctctttctatccatgcagtgatagtgagtgtaaaatctgcttacttcactattgaacactattctgttcactatctggagtaaataaagaagcttattaaaacagggaaaa

SEQ ID NO: 300836 - DNA, 2460 bp, Artificial Sequence
  derived and/or modified sequence
gcgcaccgggcctgggggcgagcgggacggaagcaaagctggggcgccggggaggtggaagacgagccccactccggttaccaccaaagaatatgattttggtctaggggctccagtttctgaagctgaaaactaccagaatactctccagctagaacaagaagtgagaaaccaagatagattcatctcgacactgaaattacagattgatctcatttgccagcaaaataatattatagtattggaagatacaataaaaaggcttaaatctataattttagatactgaaaaagcacaaaataaatctccttctagacttgattcctttgtcaagactttggaagcagacaaagatcactataagagtgaagctcaacatttgagaaagatgatgcgaagtaggtctaaaagtccaagacgcccatcaccaactgcccggggtgcaaactgtgatgtagaacttttgaagacaacaacaagagatcgtgaagaacttaaatgcatgctggaaaaatatgagcgccatttggcagaaattcagggtaatgtcaaggttcttaaatctgagagagacaagatcttccttctttatgaacaggcacaggaagaaattacccgacttcgacgagaaatgatgaaaagctgtaagagtcctaaatcaacaacggcacatgctattctccggcgagtggagactgaaagagatgtagcctttactgatttacgaagaatgaccacagaacgagatagtctaagggagaggctaaagattgctcaagagacagcatttaatgagaaggctcacctggaacaaaggatagaggagctggagtgtacagttcataatcttgatgatgaacgtatggagcaaatgtcaaatatgactttgatgaaggaaaccataagcactgtggaaaaagaaatgaaatcactagcaagaaaggcaatggataccgaaagtgaacttggcagacaaaaagcagagaataattctttgagacttttgtatgaaaacacagaaaaagatctttctgatactcagcgacaccttgctaagaaaaaatatgagctacagcttactcaggagaaaattatgtgcttggatgaaaaaattgataactttacaaggcaaaatattgcacagcgagaagaaatcagcattcttggtggaaccctcaatgatctggctaaagaaaaggaatgcctgcaagcatgtttggataaaaaatctgagaatattgcatcccttggagagagtttggcaatgaaagaaaagaccatttcaggcatgaagaatatcattgctgagatggaacaggcatcaagacagtgtactgaggccctaattgtgtgtgaacaagacgtttccagaatgcgtcggcaattggatgagacaaatgatgagctggcccagatcgccagggaaagagatatcttggctcatgacaatgacaatctccaggaacagtttgctaaagctaaacaagaaaaccaggcactgtccaaaaaattgaatgacactcataatgaacttaatgacataaaacagaaggttcaagatactaatttggaggttaacaagctgaagaatatattaaagtctgaagaatctgagaaccggcaaatgatggaacaacttcgaaaagccaatgaagatgctgaaaactgggaaaataaagcccgtcaatcagaggcagataacaataccctcaaactggaacttatcactgctgaggcagagggtaacagattaaaagaaaaagtagattccctcaacagagaggttgagcaacacttaaatgcagaaaggtcttacaagtcccagatttctaccttacataaatctgttgtaaaaatggaagaggagcttcagaaggttcagtttgaaaaagtgtccgctcttgcagatttgtcttctactagggaactctgtattaaacttgactcaagcaaagaacttcttaatcgacagctggttgctaaagatcaagaaatagaaatgagggagaatgagttagattctgctcattctgaaattgaactcctgaggagtcagatggcaaatgagagaatctccatgcagaatctagaagctttgctggtggccaatcgagacaaagaatatcagtctcagatagcacttcaagaaaaagaatctgaaattcagcttcttaaagaacacctttgtttggcagaaaataaaatggccatccagagtagagatgtggcccagttcagaaatgttgtcacacaattggaagctgatttagacattaccaaaagacaactaggaacagagcgctttgaaagggagagggccgtacaagaacttcgccgccaaaattattcaagtaatgcttatcatatgagttctacaatgaagccaaatacaaaatgtcattcaccagaacgtgctcaccatcgatctcctgaccgaggcctagatcgatcattagaaga

SEQ ID NO: 300837 - DNA, 3878 bp, Artificial Sequence
  derived and/or modified sequence
agaaggaggggcgcgcagggatcgcgcctagtctctccgcctgcggagccgtggggtcccggcagcccgcaggagtgctaagtaagggtccttcagggcgggaaccaggttccaggcagggacgcaggctacgttcgaataaaagtaccgaaggtcataaggccccagttcagatgggacttccccgcgtgacagcacagagataacggccagccctgggcgaaggttaccaccaaagaatatgattttggtctaggggctccagtttctgaagctgaaaactaccagaatactctccagctagaacaagaagtgagaaaccaagatagattcatctcgacactgaaattacaggcatttggatacctttgtgatagaaaaggcccttttcttcatccattgatggtttgatagtgggctgggaaggaaagctgtgttcctccacattaggcagcaaatacttgattgatttgatatttagcttagtcaaattgaagatctcaaacagacaaatcatggcttggaagaatatgttaggaaactcttggatagtaaggaggtggtaagcagtcaagtagatgatttaaccagccacaatgagcatctttgtaaagaattgattaaaattgaccaactagcagagcaactcgaaaaagagaaaaattttgtggtggattccgccaacaaggaacttgaagaagccaagattgatctcatttgccagcaaaataatattatagtattggaagatacaataaaaaggcttaaatctacttgattcctttgtcaagactttggaagcagacaaagatcactataagagtgaagctcaacatttgagaaagatgatgcgaagtaggtctaaaagtccaagacgcccatcaccaactgcccggggtgcaaactgtgatgtagaacttttgaagacaacaacaagagatcgtgaagaacttaaatgcatgctggaaaaatatgagcgccatttggcagaaattcagggtaatgtcaaggttcttaaatctgagagagacaagatcttccttctttatgaacaggcacaggaagaaattacccgacttcgacgagaaatgatgaaaagctgtaagagtcctaaatcaacaacggcacatgctattctccggcgagtggagactgaaagagatgtagcctttactgatttacgaagaatgaccacagaacgagatagtctaagggagaggctaaagattgctcaagagacagcatttaatgagaaggctcacctggaacaaaggatagaggagctggagtgtacagttcataatcttgatgatgaacgtatggagcaaatgtcaaatatgactttgatgaaggaaaccataagcactgtggaaaaagaaatgaaatcactagcaagaaaggcaatggataccgaaagtgaacttggcagacaaaaagcagagaataattctttgagacttttgtatgaaaacacagaaaaagatctttctgatactcagcgacaccttgctaagaaaaaatatgagctacagcttactcaggagaaaattatgtgcttggatgaaaaaattgataactttacaaggcaaaatattgcacagcgagaagaaatcagcattcttggtggaaccctcaatgatctggctaaagaaaaggaatgcctgcaagcatgtttggataaaaaatctgagaatattgcatcccttggagagagtttggcaatgaaagaaaagaccatttcaggcatgaagaatatcattgctgagatggaacaggcatcaagacagtgtactgaggccctaattgtgtgtgaacaagacgtttccagaatgcgtcggcaattggatgagacaaatgatgagctggcccagatcgccagggaaagagatatcttggctcatgacaatgacaatctccaggaacagtttgctaaagctaaacaagaaaaccaggcactgtccaaaaaattgaatgacactcataatgaacttaatgacataaaacagaaggttcaagatactaatttggaggttaacaagctgaagaatatattaaagtctgaagaatctgagaaccggcaaatgatggaacaacttcgaaaagccaatgaagatgctgaaaactgggaaaataaagcccgtcaatcagaggcagataacaataccctcaaactggaacttatcactgctgaggcagagggtaacagattaaaagaaaaagtagattccctcaacagagaggttgagcaacacttaaatgcagaaaggtcttacaagtcccagatttctaccttacataaatctgttgtaaaaatggaagaggagcttcagaaggttcagtttgaaaaagtgtccgctcttgcagatttgtcttctactagggaactctgtattaaacttgactcaagcaaagaacttcttaatcgacagctggttgctaaagatcaagaaatagaaatgagggagaatgagttagattctgctcattctgaaattgaactcctgaggagtcagatggcaaatgagagaatctccatgcagaatctagaagctttgctggtggccaatcgagacaaagaatatcagtctcagatagcacttcaagaaaaagaatctgaaattcagcttcttaaagaacacctttgtttggcagaaaataaaatggccatccagagtagagatgtggcccagttcagaaatgttgtcacacaattggaagctgatttagacattaccaaaagacaactaggaacagagcgctttgaaagggagagggccgtacaagaacttcgccgccaaaattattcaagtaatgcttatcatatgagttctacaatgaagccaaatacaaaatgtcattcaccagaacgtgctcaccatcgatctcctgaccgaggcctagatcgatcattagaagagaatctttgctacagagatttctgacacctgaaatgattcttcacatccctgagaaaggtcaaagttacaaactgatttttttttttttgctacatgagtgcatttatcttttaaatgcttggcaatgttaaatgtatttattaactttgtgtctctgaatctctgttctaatgtgccatgttgcagtgatctgagatgacttataaaaacaaaaatgtatatggctctttctatccatgcagtgatagtgagtgtaaaatctgcttacttcactattgaacactattctgttcactatctggagtaaataaagaagcttattaaaacagggaaaagtgtttttacaaaactgctttcctttcctttcttggtatctcaaataattggttggttaattttttttctttgtgatttgtgttttcatggctggaaaatctgtgccaaaatgggtacaacttactgatactggtctgggatctgatattccattttggaaccaaccttacatgaattccatgccataatctgatattgaagcagcagaaagtaggagtgttgtcagggttttaaaacctatagtattgtaccactcaaagactaagtaacatacatattctacaattgtgtttactactactgcttttagaaaggtaggtgatggtatatctgtcaagaatgtaagattttattaaaaatctttatttttaataagttttctttcaagtactgcaatcaacttaattgcgattttattttattgtctgtggcagctgtctgtaatctggagtaataagataagtgatgtttccttcctcccccaatttcctaaatctcttaccttatctatccataggctttgatgtaatgttcatattagagcctgaatgctactgtattttactgatataaactatttgtattcttgccattttaataaaaaaaggcttgtcattaatagta

SEQ ID NO: 300838 - DNA, 2485 bp, Artificial Sequence
  derived and/or modified sequence
gcgcaccgggcctgggggcgagcgggacggaagcaaagctggggcgccggggaggtggaagacgagccccactccggttaccaccaaagaatatgattttggtctaggggctccagtttctgaagctgaaaactaccagaatactctccagctagaacaagaagtgagaaaccaagatagattcatctcgacactgaaattacagattgatctcatttgccagcaaaataatattatagtattggaagatacaataaaaaggcttaaatctataattttagatactgaaaaagcacaaaataaatctccttctagacttgattcctttgtcaagactttggaagcagacaaagatcactataagagtgaagctcaacatttgagaaagatgatgcgaagtaggtctaaaagtccaagacgcccatcaccaactgcccggggtgcaaactgtgatgtagaacttttgaagacaacaacaagagatcgtgaagaacttaaatgcatgctggaaaaatatgagcgccatttggcagaaattcagggtaatgtcaaggttcttaaatctgagagagacaagatcttccttctttatgaacaggcacaggaagaaattacccgacttcgacgagaaatgatgaaaagctgtaagagtcctaaatcaacaacggcacatgctattctccggcgagtggagactgaaagagatgtagcctttactgatttacgaagaatgaccacagaacgagatagtctaagggagaggctaaagattgctcaagagacagcatttaatgagaaggctcacctggaacaaaggatagaggagctggagtgtacagttcataatcttgatgatgaacgtatggagcaaatgtcaaatatgactttgatgaaggaaaccataagcactgtggaaaaagaaatgaaatcactagcaagaaaggcaatggataccgaaagtgaacttggcagacaaaaagcagagaataattctttgagacttttgtatgaaaacacagaaaaagatctttctgatactcagcgacaccttgctaagaaaaaatatgagctacagcttactcaggagaaaattatgtgcttggatgaaaaaattgataactttacaaggcaaaatattgcacagcgagaagaaatcagcattcttggtggaaccctcaatgatctggctaaagaaaaggaatgcctgcaagcatgtttggataaaaaatctgagaatattgcatcccttggagagagtttggcaatgaaagaaaagaccatttcaggcatgaagaatatcattgctgagatggaacaggcatcaagacagtgtactgaggccctaattgtgtgtgaacaagacgtttccagaatgcgtcggcaattggatgagacaaatgatgagctggcccagatcgccagggaaagagatatcttggctcatgacaatgacaatctccaggaacagtttgctaaagctaaacaagaaaaccaggcactgtccaaaaaattgaatgacactcataatgaacttaatgacataaaacagaaggttcaagatactaatttggaggttaacaagctgaagaatatattaaagtctgaagaatctgagaaccggcaaatgatggaacaacttcgaaaagccaatgaagatgctgaaaactgggaaaataaagcccgtcaatcagaggcagataacaataccctcaaactggaacttatcactgctgaggcagagggtaacagattaaaagaaaaagtagattccctcaacagagaggttgagcaacacttaaatgcagaaaggtcttacaagtcccagatttctaccttacataaatctgttgtaaaaatggaagaggagcttcagaaggttcagtttgaaaaagtgtccgctcttgcagatttgtcttctactagggaactctgtattaaacttgactcaagcaaagaacttcttaatcgacagctggttgctaaagatcaagaaatagaaatgagggagaatgagttagattctgctcattctgaaattgaactcctgaggagtcagatggcaaatgagagaatctccatgcagaatctagaagctttgctggtggccaatcgagacaaagaatatcagtctcagatagcacttcaagaaaaagaatctgaaattcagcttcttaaagaacacctttgtttggcagaaaataaaatggccatccagagtagagatgtggcccagttcagaaatgttgtcacacaattggaagctgatttagacattaccaaaagacaactaggaacagagcgctttgaaagggagagggccgtacaagaacttcgccgccaaaattattcaagtaatgcttatcatatgagttctacaatgaagccaaatacaaaatgtcattcaccagaacgtgctcaccatcgatctcctgaccgaggcctagatcgatcattagaagagaatctttgctacagagatttctga

SEQ ID NO: 300839 - DNA, 894 bp, Artificial Sequence
  derived and/or modified sequence
atgatgagaagcagaagcaagagccccagaagacccagccccaccgccagaggcgccaactgcgacgtggagctgctgaagaccaccaccagagacagagaggagctgaagtgcatgctggagaagtacgagagacacctggccgagatccagggcaacgtgaaggtgctgaagagcgagagagacaagatcttcctgctgtacgagcaggcccaggaggagatcaccagactgagaagagagatgatgaagagctgcaagagccccaagagcaccaccgcccacgccatcctgagaagagtggagaccgagagagacgtggccttcaccgacctgagaagaatgaccaccgagagagacagcctgagagagagactgaagatcgcccaggagaccgccttcaacgagaaggcccacctggagcagagaatcgaggagctggagtgcaccgtgcacaacctggacgacgagagaatggagcagatgagcaacatgaccctgatgaaggagaccatcagcaccgtggagaaggagatgaagagcctggccagaaaggccatggacaccgagagcgagctgggcagacagaaggccgagaacaacagcctgagactgctgtacgagaacaccgagaaggacctgagcgacacccagagacacctggccaagaagaagtacgagctgcagctgacccaggagaagatcatgtgcctggacgagaagatcgacaacttcaccagacagaacatcgcccagagagaggagatcagcatcctgggcggcaccctgaacgacctggccaaggagaaggagtgcctgcaggcctgcctggacaagaagagcgagaacatcgccagcctgggcgagagcctggccatgaagaccgtgtactag

SEQ ID NO: 300840 - DNA, 894 bp, Artificial Sequence
  derived and/or modified sequence
atgatgcggtcaaggtctaagtcaccccgcagacccagccccacggcaaggggagccaattgtgacgttgaacttctgaaaacaacaacacgcgaccgggaggaactgaagtgtatgctggagaagtacgagcgacacctggccgaaatccaggggaatgtgaaagtactgaaatcagagcgagacaagatcttcttgctgtacgagcaggcgcaagaggagattacccgcctgcggcgtgagatgatgaagtcttgtaaatctcctaaaagtaccacggctcacgcgattctgaggcgcgtggagaccgaacgcgatgtggcgttcacagatctccggaggatgaccaccgaacgggactctcttcgggagaggctcaaaattgcccaggaaaccgcctttaacgaaaaagcccatctggaacagcgtatcgaagagcttgagtgtactgtccataacctggacgacgaacgaatggaacagatgtctaacatgactctaatgaaggagacgatcagcaccgtagagaaggaaatgaaatcactcgctaggaaggcaatggatacggagagcgaactgggtcgtcaaaaagcagaaaacaatagtcttaggttgctctacgagaacacagagaaagacttatctgacacccaacgccacctggccaaaaagaaatacgagctgcagctgacgcaggaaaagattatgtgcctggacgaaaagattgacaacttcacacgccagaatattgcccaacgtgaggagatatctatccttggggggaccctcaatgatctggccaaagaaaaggagtgcttgcaggcctgcctggataaaaagtccgagaatattgcaagcctgggtgaatcgctggcgatgaaaacagtgtactag

SEQ ID NO: 300841 - DNA, 894 bp, Artificial Sequence
  derived and/or modified sequence
atgatgaggagccgcagcaagagcccccggcggcccagccccacagcccggggggccaactgtgatgtggagctgctgaagaccaccacccgggaccgggaggagctgaagtgcatgctggagaagtatgagcggcacctggccgagatccagggcaatgtgaaggtgctgaagtctgagcgggacaagatcttcctgctgtatgagcaggcccaggaggagatcacccggctgcggcgggagatgatgaagagctgcaagagccccaagagcaccacagcccacgccatcctgcggcgggtggagacagaaagagatgtggccttcacagacctgcggaggatgaccacagagcgggacagcctgcgggagcggctgaagatcgcccaggagacagccttcaatgagaaggcccacctggagcagagaattgaggagctggagtgcaccgtgcacaacctggatgatgagaggatggagcagatgagcaacatgaccctgatgaaggagaccatcagcacagtggagaaggagatgaagagcctggccaggaaggccatggacacagaaagtgagctgggccggcagaaggccgagaacaacagcctgcggctgctgtatgagaacacagagaaggacctgagtgacacccagaggcacctggccaagaagaagtatgagctgcagctgacccaggagaagatcatgtgcctggatgagaagattgacaacttcacccggcagaacatcgcccagcgggaggagatcagcatcctgggcggcaccctgaatgacctggccaaggagaaggaatgtctgcaggcctgcctggacaagaagtctgagaacatcgccagcctgggggagagcctggccatgaagacagtgtactag

SEQ ID NO: 300842 - DNA, 894 bp, Artificial Sequence
  derived and/or modified sequence
atgatgcggagccggagcaagagcccccggcggcccagccccaccgcaagaggggctaactgtgacgtcgagttgctgaagactaccacacgtgaccgagaggagctgaaatgtatgttagagaagtacgaacggcatcttgccgaaatacagggaaatgtgaaggttctaaagagcgaacgtgacaaaatatttcttctgtacgagcaggcccaggaggagattaccaggctgcggcgggagatgatgaaatcctgtaagtcacctaaaagtacaacagcgcatgccatcctccgccgcgtggagaccgagcgagatgtggcattcacagatttgcggcgtatgacaaccgagagggatagtctgcgggaacgcctgaaaatcgcacaagaaactgcttttaatgaaaaggcccacctagagcaaaggatagaggagctggaatgtacggtacataacctagatgatgaaaggatggagcagatgtcaaatatgacgctcatgaaggaaacaatctctactgtggagaaagagatgaagtccctagcccgtaaggctatggatacagagtcagaactgggacgacagaaggccgaaaacaacagcctgcgtctgttgtacgaaaataccgaaaaagacctcagtgatacccagcgtcatttggccaaaaaaaagtatgagctgcagctgacacaggaaaagatcatgtgtctggacgaaaagattgataatttcacacggcagaacattgcgcagagagaagaaatttccatcttagggggcacactaaatgaccttgccaaagagaaagagtgtttacaggcgtgcctggacaagaagtccgagaatattgcaagtttgggtgagagtttagccatgaaaaccgtgtattag

SEQ ID NO: 300843 - DNA, 894 bp, Artificial Sequence
  derived and/or modified sequence
atgatgagatcacggtccaaaagcccacgcagaccctcccctacagccagaggcgctaactgcgatgttgagctgttgaagacaactacacgcgatcgcgaggagctgaagtgtatgctggagaaatatgagcggcacctagcagaaatccaggggaacgtcaaggtcctgaagtctgagcgtgataagatcttcttactctacgagcaggcacaggaggagatcacccgattgcggagggaaatgatgaaatcttgtaagtctcccaagtccacgacggcccacgccatccttagacgcgtggagaccgagcgagatgtcgcctttactgatcttcggagaatgaccaccgaaagagattcacttagagaacggctgaaaatagcccaggaaacagcatttaacgaaaaagcacacctggagcagcggatcgaagagctggaatgtacagtccacaacctcgacgatgagaggatggagcagatgagtaatatgacgttgatgaaggagaccatctcaacagtcgagaaggaaatgaagagcctagctcgaaaagccatggatactgagagcgagctgggacggcagaaggctgaaaacaatagtcttaggctgctctatgagaacactgaaaaggacttgtcagacacacagaggcacctcgcgaagaagaagtacgagctccagttaactcaggagaaaattatgtgtttggatgagaagatagacaacttcacacggcagaacattgcccagcgcgaggaaatctcgatcctgggcggaacgctgaatgatttggccaaagaaaaagaatgtctccaggcttgccttgataagaagagcgaaaacatcgcgtcactgggagagtccttggccatgaaaaccgtatattag

SEQ ID NO: 300844 - DNA, 1502 bp, Artificial Sequence
  derived and/or modified sequence
agtcgcggggatgagctctgggcaggacggcgggccgaggagcccggggagggacccggagctccaggttaccaccaaagaatatgattttggtctaggggctccagtttctgaagctgaaaactaccagaatactctccagctagaacaagaagtgagaaaccaagatagattcatctcgacactgaaattacagattgaagatctcaaacagacaaatcatggcttggaagaatatgttaggaaactcttggatagtaaggaggtggtaagcagtcaagtagatgatttaaccagccacaatgagcatctttgtaaagaattgattaaaattgaccaactagcagagcaactcgaaaaagagaaaaattttgtggtggattccgccaacaaggaacttgaagaagccaagattgatctcatttgccagcaaaataatattatagtattggaagatacaataaaaaggcttaaatctacttgattcctttgtcaagactttggaagcagacaaagatcactataagagtgaagctcaacatttgagaaagatgatgcgaagtaggtctaaaagtccaagacgcccatcaccaactgcccggggtgcaaactgtgatgtagaacttttgaagacaacaacaagagatcgtgaagaacttaaatgcatgctggaaaaatatgagcgccatttggcagaaattcagggtaatgtcaaggttcttaaatctgagagagacaagatcttccttctttatgaacaggcacaggaagaaattacccgacttcgacgagaaatgatgaaaagctgtaagagtcctaaatcaacaacggcacatgctattctccggcgagtggagactgaaagagatgtagcctttactgatttacgaagaatgaccacagaacgagatagtctaagggagaggctaaagattgctcaagagacagcatttaatgagaaggctcacctggaacaaaggatagaggagctggagtgtacagttcataatcttgatgatgaacgtatggagcaaatgtcaaatatgactttgatgaaggaaaccataagcactgtggaaaaagaaatgaaatcactagcaagaaaggcaatggataccgaaagtgaacttggcagacaaaaagcagagaataattctttgagacttttgtatgaaaacacagaaaaagatctttctgatactcagcgacaccttgctaagaaaaaatatgagctacagcttactcaggagaaaattatgtgcttggatgaaaaaattgataactttacaaggcaaaatattgcacagcgagaagaaatcagcattcttggtggaaccctcaatgatctggctaaagaaaaggaatgcctgcaagcatgtttggataaaaaatctgagaatattgcatcccttggagagagtttggcaatgaaaacagtgtactgaggccctaattgtgtgtgaacaagacgtttccagaatgcgtcggcaattggatgagac

SEQ ID NO: 300845 - protein, 214 aa, Artificial Sequence
  derived and/or modified sequence
MDKERRICMGMAWQSGTQRIGCSQAQKRRYSPGVQRVFPYISAMVNNGSLSYDHERDGRPTELGGCTAIVRNLHYDTFLVIRYVKRHLTIMMDIDGKHEWRDCIEVPGVRLPRGYYFGTSSITGDLSDNHDVISLKLFELTVERTPEEEKLHRDVFLPSVDNMKLPEMTAPLPPLSGLALFLIVFFSLVFSVFAIVIGIILYNKWQEQSRKRFY

SEQ ID NO: 300846 - protein, 203 aa, Artificial Sequence
  derived and/or modified sequence
MDKERRICMGMAWQSGTQRIGCSQRVFPYISAMVNNGSLSYDHERDGRPTELGGCTAIVRNLHYDTFLVIRYVKRHLTIMMDIDGKHEWRDCIEVPGVRLPRGYYFGTSSITGDLSDNHDVISLKLFELTVERTPEEEKLHRDVFLPSVDNMKLPEMTAPLPPLSGLALFLIVFFSLVFSVFAIVIGIILYNKWQEQSRKRFY

SEQ ID NO: 300847 - DNA, 645 bp, Artificial Sequence
  derived and/or modified sequence
atggacaaggagagaagaatctgcatgggcatggcctggcagagcggcacccagagaatcggctgcagccaggcccagaagagaagatacagccccggcgtgcagagagtgttcccctacatcagcgccatggtgaacaacggcagcctgagctacgaccacgagagagacggcagacccaccgagctgggcggctgcaccgccatcgtgagaaacctgcactacgacaccttcctggtgatcagatacgtgaagagacacctgaccatcatgatggacatcgacggcaagcacgagtggagagactgcatcgaggtgcccggcgtgagactgcccagaggctactacttcggcaccagcagcatcaccggcgacctgagcgacaaccacgacgtgatcagcctgaagctgttcgagctgaccgtggagagaacccccgaggaggagaagctgcacagagacgtgttcctgcccagcgtggacaacatgaagctgcccgagatgaccgcccccctgccccccctgagcggcctggccctgttcctgatcgtgttcttcagcctggtgttcagcgtgttcgccatcgtgatcggcatcatcctgtacaacaagtggcaggagcagagcagaaagagattctactag

SEQ ID NO: 300848 - DNA, 612 bp, Artificial Sequence
  derived and/or modified sequence
atggacaaggagagaagaatctgcatgggcatggcctggcagagcggcacccagagaatcggctgcagccagagagtgttcccctacatcagcgccatggtgaacaacggcagcctgagctacgaccacgagagagacggcagacccaccgagctgggcggctgcaccgccatcgtgagaaacctgcactacgacaccttcctggtgatcagatacgtgaagagacacctgaccatcatgatggacatcgacggcaagcacgagtggagagactgcatcgaggtgcccggcgtgagactgcccagaggctactacttcggcaccagcagcatcaccggcgacctgagcgacaaccacgacgtgatcagcctgaagctgttcgagctgaccgtggagagaacccccgaggaggagaagctgcacagagacgtgttcctgcccagcgtggacaacatgaagctgcccgagatgaccgcccccctgccccccctgagcggcctggccctgttcctgatcgtgttcttcagcctggtgttcagcgtgttcgccatcgtgatcggcatcatcctgtacaacaagtggcaggagcagagcagaaagagattctactag

SEQ ID NO: 300849 - DNA, 645 bp, Artificial Sequence
  derived and/or modified sequence
atggataaagaacgaaggatatgtatggggatggcttggcagagcggtacacagcgcattggttgttcacaggcccaaaaacgtagatactctcctggagttcagcgtgtgttcccctatattagcgcgatggttaataatggctcgttgagctatgatcatgaaagggacggtcgaccaactgaacttggcgggtgtacggccatcgtgcgcaatcttcattacgatacattcttagtgatacgttacgtcaaacgacacctaacaattatgatggatatcgacggcaaacacgagtggcgggattgtattgaggtcccgggcgtgagactgccaaggggatactatttcggaactagctccattacaggggacttatcggacaaccacgacgtaatttccctcaagcttttcgagttaactgtagaacggacgcctgaggaggaaaagctgcatagagatgtgttcctgccttcggtggacaacatgaaactccctgagatgaccgccccgctgcctccactgtcaggtcttgctctgtttctgatcgttttcttttctctagtgttttccgtcttcgccatagttataggaataattctttacaacaaatggcaggagcaatcaagaaagaggttttactag

SEQ ID NO: 300850 - DNA, 612 bp, Artificial Sequence
  derived and/or modified sequence
atggataaggagcgaagaatttgtatggggatggcttggcagagcggcactcaacggatcggttgttcccagcgcgtttttccatacattagcgccatggtgaacaatggaagtttgtcttatgatcatgagcgcgatgggcgccctacagagctgggcggatgtacagccattgtccgcaacctccactatgacacttttctggtgattcggtatgttaagagacacttaacgatcatgatggacattgacggtaaacatgagtggagagattgtatcgaagtacccggagttcgcctccctcgtgggtactattttgggacaagttcaatcactggcgacttatctgacaatcatgatgtgattagcttaaaactgtttgaactgacggtcgagagaactccggaagaagagaagctacatcgtgacgtgtttctgccttctgtcgacaacatgaaacttcccgagatgaccgcccccttgcctccactcagcgggctagctctgtttctgattgtatttttcagcctggtgtttagcgtatttgccattgtgatcggcatcatcctctacaacaaatggcaggagcagtcacggaagagattctactag

SEQ ID NO: 300851 - DNA, 645 bp, Artificial Sequence
  derived and/or modified sequence
atggacaaggagcggcgcatctgcatgggcatggcctggcagagcggcacccagagaattggctgcagccaggcccagaagaggcgctacagccctggggtgcagagggtcttcccctacatcagcgccatggtgaacaacggcagcctgtcctatgaccacgagagagatggccggcccacagagctgggcggctgcacagccatcgtgaggaacctgcactatgacaccttcctggtgatccgctacgtgaagaggcacctgaccatcatgatggacattgatggcaagcatgagtggagggactgcatcgaggtgcctggggtgcggctgccccggggctactacttcggcaccagcagcatcactggagacctgagtgacaaccatgatgtgatcagcctgaagctgtttgagctgactgtggagaggaccccagaggaggagaagctgcacagagatgtgttcctgcccagcgtggacaacatgaagctgcctgagatgacagcccccctgccccccctgagcggcctggccctcttcctgattgtgttcttcagcctggtgttttctgtgtttgccatcgtgattggcatcatcctgtacaacaagtggcaggagcagagcaggaagcgcttctactag

SEQ ID NO: 300852 - DNA, 612 bp, Artificial Sequence
  derived and/or modified sequence
atggacaaggagcggcgcatctgcatgggcatggcctggcagagcggcacccagagaattggctgcagccagagggtcttcccctacatcagcgccatggtgaacaacggcagcctgtcctatgaccacgagagagatggccggcccacagagctgggcggctgcacagccatcgtgaggaacctgcactatgacaccttcctggtgatccgctacgtgaagaggcacctgaccatcatgatggacattgatggcaagcatgagtggagggactgcatcgaggtgcctggggtgcggctgccccggggctactacttcggcaccagcagcatcaccggggacctgagtgacaaccatgatgtgatcagcctgaagctgtttgagctgactgtggagaggaccccagaggaggagaagctgcacagagatgtgttcctgcccagcgtggacaacatgaagctgcctgagatgacagcccccctgccccccctgagcggcctggccctcttcctgattgtgttcttcagcctggtgttttctgtgtttgccatcgtcatcggcatcatcctgtacaacaagtggcaggagcagagcaggaagcgcttctactag

SEQ ID NO: 300853 - DNA, 645 bp, Artificial Sequence
  derived and/or modified sequence
atggacaaggagcggcggatctgcatgggcatggcctggcagagcggaacccaacgaatcggatgttcccaagcccagaaacgccgctacagtccaggagtgcaacgtgtgttcccttatatttctgctatggtgaataacggcagtctgtcttatgaccatgaaagagatggccgcccaaccgagctgggtggatgcaccgccattgtcaggaaccttcactacgataccttccttgtgatcagatatgttaagcgccacctgactatcatgatggatatcgacgggaagcacgagtggcgcgactgtattgaggtgcctggcgtacgactgcctaggggctattactttggcacctcttctatcactggggatctgtcggataatcatgatgttatctccctgaagctgttcgaactgacagtcgagcggactccagaagaggagaaactgcatagagatgtgtttctgccatctgtggataatatgaagctgccagaaatgacggccccgctcccacccctcagcgggctggctctttttctgatcgtgttcttcagcctggtattctcagtgttcgctattgtgattggcatcatcctgtacaacaagtggcaggaacagagtcgaaagagattctactag

SEQ ID NO: 300854 - DNA, 612 bp, Artificial Sequence
  derived and/or modified sequence
atggacaaggagcggcggatctgcatgggcatggcctggcagagcggtactcaacgcatcggatgctcccagagggtgttcccctacatttcagctatggtgaacaacggaagcctgtcttatgatcacgagagggacgggcgacccaccgagttgggagggtgcacagctattgtgaggaatctgcattatgacactttcttagtcatcagatacgtgaagaggcacctgaccatcatgatggacatcgacgggaagcatgagtggagagactgcatcgaagtccctggagtgagactgccaagagggtactatttcgggacgtccagtataaccggtgacctgagcgataaccacgacgtcatttctctcaagctgtttgaactcacagtggaaagaacccccgaggaggagaaactgcatcgcgacgtctttttgccgtcagtagacaacatgaagttgccagagatgaccgcccctcttccacctttgagcggtctggctttgtttctgattgttttttttagtcttgtcttttcggtttttgctattgttatcgggatcatcctgtacaataagtggcaagaacaatctcgcaaaagattctattag

SEQ ID NO: 300855 - DNA, 645 bp, Artificial Sequence
  derived and/or modified sequence
atggataaggagaggaggatttgcatggggatggcttggcagtcagggacacagagaatagggtgcagccaggcacagaagcgacgttatagcccgggtgtacaacgggtgttcccgtatatctcagcaatggtcaacaacggttctctgtcatacgatcatgagagggacgggaggccaactgaacttggaggctgcaccgccatcgttcggaatctccactatgatacatttctggtaatcaggtacgttaagcggcacctgactattatgatggacatcgatggcaagcacgagtggagagattgtatcgaagtgcctggcgtaagactgcctagaggctactatttcggaacctcctccattacaggagacttaagtgataatcatgatgtcatatctctgaagttgttcgagctcacagttgagaggacacctgaagaagagaagctgcaccgggacgtgttcttgccctccgttgataatatgaaattaccagaaatgacggccccacttccacccctttccgggcttgcactgttcctcatcgttttcttctccctcgtattcagtgtcttcgccatagtgatcggaatcatactctataacaagtggcaggaacaatctcgcaaacgtttctattag

SEQ ID NO: 300856 - DNA, 612 bp, Artificial Sequence
  derived and/or modified sequence
atggacaaggagcggcgaatttgcatgggcatggcatggcagagcggtactcagcggataggctgctctcaacgagtctttccttatatctctgccatggtcaacaatggtagtttgtcttacgatcacgagcgggacggcagaccaactgaactcggagggtgtactgctattgtgcgaaatctgcattacgacaccttcctggtcatccggtacgtgaagagacacctgactattatgatggatatcgatggcaagcacgagtggcgggattgcatcgaggtgcctggggtacggctgcccagagggtattatttcggtaccagtagcataacaggcgacctgagcgataatcacgatgtaatcagcttgaagctgtttgagctcacagtggaacgcacacctgaagaggagaaactgcatcgggatgtatttctgcccagcgtcgacaacatgaagctccccgagatgactgcgcctctgcccccattaagcggcctggccctgttcctcattgtcttcttcagtcttgtgttcagtgtgtttgctattgtgattggaataattttatataacaaatggcaggaacaatctcgtaaaaggttctactag

SEQ ID NO: 300857 - DNA, 279 bp, Artificial Sequence
  derived and/or modified sequence
tgcggcatgagcagaagcggcctgctggagagcagcaccagactgaagccccacgaggcccagaactacagaaagaaggccctgtgggtgagctggttcagcatcatcgtgaccctggccctggccgtggccgccttcaccgtgagcgtgatgagatacagcgccagcgccttcggcttcgccttcgacgccatcctggacgtgctgagcagcgccatcgtgctgtggagatacagcaacgccgccgccgtgcacagcgcccacagagagtacatgtag

SEQ ID NO: 300858 - DNA, 279 bp, Artificial Sequence
  derived and/or modified sequence
tgtggcatgtcacgcagcggacttctcgagtcaagtactcgacttaagccccatgaggcacaaaactaccgcaagaaagccctctgggtgagctggttttcaatcatcgtcaccctagctcttgccgtggccgccttcacggtgtcggttatgagatacagtgctagtgccttcggcttcgcttttgacgctattctcgatgtactgtccagtgcgatagtactgtggcgctactccaacgctgctgccgtgcatagcgcccacagggagtacatgtag

SEQ ID NO: 300859 - DNA, 279 bp, Artificial Sequence
  derived and/or modified sequence
tgtggcatgagccgcagcggcctgctggagagcagcacccggctgaagccccatgaggcccagaactacaggaagaaggccctgtgggtgtcctggttcagcatcatcgtgaccctggccctggccgtggccgccttcaccgtgtctgtgatgagatacagcgccagcgccttcggctttgcctttgatgccatcctggatgtgctgagcagcgccatcgtgctgtggagatacagcaatgctgctgctgtgcacagcgcccaccgggagtacatgtag

SEQ ID NO: 300860 - DNA, 279 bp, Artificial Sequence
  derived and/or modified sequence
tgcggcatgagccggagcggcctgctggagagcagcacccggctgaaacctcacgaggctcagaattatcggaagaaagctttgtgggtgagttggttcagcatcattgtcactctggcccttgcagtcgccgcttttacagtgagtgtgatgagatactccgcgtccgccttcgggttcgcgtttgacgccattctcgacgtgctgtccagcgctatcgttctatggcgatactcaaatgccgccgccgtgcacagcgcccaccgggaatacatgtag

SEQ ID NO: 300861 - DNA, 279 bp, Artificial Sequence
  derived and/or modified sequence
tgcggtatgagccgttccggccttctagagtcttcaacccggctcaaaccccatgaggcccagaactaccgcaaaaaagccctttgggtctcctggttctcgatcatagtcacactggccttagccgtggcagccttcacagtctctgttatgcggtattccgcttcagcctttgggtttgcctttgacgctatcctggatgtgctttcgagcgccatcgtgctgtggagatactccaacgccgctgctgtacactccgctcacagagagtacatgtag

SEQ ID NO: 300862 - DNA, 279 bp, Artificial Sequence
  derived and/or modified sequence
tgtggtatgtcaaggagtggcttactagaaagcagcacccgcctgaaacctcacgaagcccagaactacaggaagaaggcattgtgggtgtcctggttctccatcattgtcaccctggccctcgcggtggctgcctttactgtctccgttatgaggtacagcgcctctgcttttgggtttgcatttgatgccatcctggacgtcctgtcatcggcgattgtcctgtggcgttacagcaacgcggccgctgtgcactctgcccatagggagtacatgtaa

SEQ ID NO: 300863 - DNA, 1107 bp, Artificial Sequence
  derived and/or modified sequence
atgggcctgggcaagaccatccaggccatcggcatcacctacttctacaaggaggagtggcccctgctgatcgtggtgcccagcagcctgagatacccctggaccgaggagatcgagaagtggatccccgagctgagccccgaggagatcaacgtgatccagaacaagaccgacgtgagaagaatgagcaccagcaaggtgaccgtgctgggctacggcctgctgaccgccgacgccaagaccctgatcgacgccctgaacaaccagaacttcaaggtggtgatcgtggacgagagccactacatgaagagcagaaacgccaccagaagcagaatcctgctgcccatcgtgcagaaggccagaagagccatcctgctgaccggcacccccgccctgggcagacccgaggagctgttcatgcagatcgaggccctgttcccccagaagttcggcagatggaccgactacgccaagagatactgcaacgcccacatcagatacttcggcaagagaccccagtgggactgcagaggcgccagcaacctgaacgagctgcaccagctgctgagcgacatcatgatcagaagactgaagaccgaggtgctgacccagctgccccccaaggtgagacagagaatccccttcgacctgcccagcgccgccgccaaggagctgaacaccagcttcgaggagtgggagaagatcatgagaacccccaacagcggcgccatggagaccgtgatgggcctgatcaccagaatgttcaagcagaccgccatcgccaaggccggcgccgtgaaggactacatcaagatgatgctgcagaacgacagcctgaagttcctggtgttcgcccaccacctgagcatgctgcaggcctgcaccgaggccgtgatcgagaacaagaccagatacatcagaatcgacggcagcgtgagcagcagcgagagaatccacctggtgaaccagttccagaaggaccccgacaccagagtggccatcctgagcatccaggccgccggccaggacctgtacgacaaggtggcctggggcaagagaaccctggtgagcggcctgttcatggagtgcttctgcttcgtgccctag

SEQ ID NO: 300864 - DNA, 1107 bp, Artificial Sequence
  derived and/or modified sequence
atgggcctgggcaaaactatccaggctatcggaataacctatttctacaaagaggagtggcctctgctcattgtggttcccagtagtcttcggtatccctggactgaggaaatcgaaaagtggatccctgaactgagccccgaggaaatcaacgtgatccaaaacaagactgacgtccgcagaatgtccaccagtaaggttactgtcctgggctacggactcctgacagccgatgcgaaaaccctaatagatgccctcaacaaccaaaattttaaggtcgttattgttgatgaatcacactatatgaaatcccgaaacgccaccaggagccggatcctgctcccaatcgtacaaaaggcacgccgtgccatcctgctgactggcaccccagccctcgggaggcccgaagaactttttatgcagatagaggcactcttccctcagaagtttggccggtggaccgactatgccaagaggtactgtaatgcccatatcagatattttggcaagaggcctcagtgggactgtcggggagcctcaaatctgaacgagctgcaccagcttctcagcgatattatgatacgaagactgaaaacagaggtcttgacacaactacccccaaaggttagacagagaatcccttttgatctccctagtgccgcggccaaagagctgaatactagcttcgaagagtgggagaagatcatgcgtaccccaaattccggcgcgatggaaaccgtgatgggactgatcacccgcatgtttaagcagactgcaattgcaaaagccggtgccgtgaaagattatatcaagatgatgctccagaatgattctctgaagttcctggtgtttgcccaccatttgagtatgctgcaggcttgtacggaagcggtgatcgagaataaaacccgctacatcaggatcgatggttccgtctctagctcagagcggatccatttagtgaaccagttccagaaggatccagatacccgcgttgcaatcttgtctatccaggcagccggccaagacctatatgataaagtggcgtgggggaaacgcactttggtgtccggtctctttatggagtgcttctgcttcgtcccctag

SEQ ID NO: 300865 - DNA, 1107 bp, Artificial Sequence
  derived and/or modified sequence
atgggcctgggcaagaccatccaggccatcggcatcacctacttctacaaggaggagtggcccctgctgattgtggtgcccagcagcctgcgctacccctggacagaggagattgagaagtggatccctgagctgagccctgaggagatcaacgtcatccagaacaagacagatgtgcggaggatgagcaccagcaaggtgacagtgctgggctacggcctgctgacagcagatgccaagaccctgattgatgccctgaacaaccagaacttcaaggtggtgattgtggatgagagccactacatgaagagcagaaatgccaccaggagccgcatcctgctgcccatcgtgcagaaggcccggcgggccatcctgctgaccggcaccccagccctgggccggcctgaggagctgttcatgcagatcgaggccctcttcccccagaagtttggccgctggacagattatgccaagcgctactgcaatgcccacatccgctactttgggaagaggccccagtgggactgccgcggggccagcaacctgaatgagctgcaccagctgctgagtgacatcatgatccggcggctgaagacagaggtgctgacccagctgccccccaaggtgcggcagaggatcccctttgacctgcccagcgctgctgccaaggagctgaacaccagctttgaggagtgggagaagatcatgaggacccccaacagcggggccatggagaccgtgatgggcctcatcaccaggatgttcaagcagacagccatcgccaaggccggggctgtgaaggactacatcaagatgatgctgcagaatgacagcctgaagttcctggtgtttgcccaccacctgtccatgctgcaggcctgcacagaagctgtgattgagaacaagacccgctacatcagaattgatggctctgtgagcagcagcgagcgcatccacctggtgaaccagttccagaaggaccctgacaccagggtggccatcctgagcatccaggccgccggccaggacctgtatgacaaggtggcctggggcaagaggaccctggtgtctggcctcttcatggagtgcttctgctttgtgccctag

SEQ ID NO: 300866 - DNA, 1107 bp, Artificial Sequence
  derived and/or modified sequence
atgggcctgggcaagaccatccaggccatcggcatcacctacttctataaagaggagtggcccctccttattgttgtgccctccagtctgcgctacccctggaccgaggagattgagaagtggattcccgaactttcacccgaagagattaacgtcatccaaaataagacagacgtgagaaggatgagcacctcaaaggtaacggtcctgggctacggtctactcacagcagacgccaaaactctcatcgatgccctgaataaccagaactttaaagtggttatcgtcgacgagagccactatatgaaatcgaggaatgccacgcggtctcggatactgctcccaatcgtgcagaaagcacgacgcgctattctgctgactggtacgcccgccctcggacgtccagaggaactattcatgcagattgaggcactgttcccgcagaagttcgggcggtggacggactatgccaaaagatactgcaatgcacatattagatactttggtaagcggccgcagtgggactgcaggggcgcttccaatttgaacgaactgcaccagctgttgtcagacataatgatccgtaggctgaagaccgaggtactcactcagctgccacctaaggtccggcagcggataccctttgatttaccgagcgcagccgcgaaggaactgaacaccagctttgaggagtgggaaaagattatgaggacgccaaattctggagccatggaaactgtcatggggttgattacccgcatgttcaagcagaccgctatcgcgaaagcaggagccgtgaaagactacattaaaatgatgttacagaatgactcactcaagttccttgtgtttgctcatcacctgtctatgctccaagcgtgcaccgaagcagtaattgaaaataaaacacggtacatcagaattgacggtagcgtcagcagtagtgaaaggattcacctggtcaaccagtttcagaaagaccccgatactcgggtcgctatcctgagtatccaagcagctggacaagacctctacgataaagtggcctggggaaagcggaccctggtctccggtttattcatggagtgcttctgctttgtgccctag

SEQ ID NO: 300867 - DNA, 1107 bp, Artificial Sequence
  derived and/or modified sequence
atgggacttggcaagacaatccaggccatcggcatcacctatttctataaggaagaatggcccctcctcatcgtggtcccatcatctctgagatacccatggactgaggagatcgagaaatggattccggagttgagccctgaggagatcaacgtgattcaaaacaagaccgacgtgaggagaatgtccacctcaaaggtcactgtcctggggtacggcctcctgacagctgatgccaagacccttatcgacgctctgaataaccagaactttaaggtagtgattgttgacgagtcgcactacatgaagtcgaggaacgctactcggagccggatcctgctgcctatagtccagaaagccagacgcgctatcctgcttactggaaccccagctttagggagaccagaagagctttttatgcagatcgaagctctgttccctcagaaatttggtcgttggactgattacgctaaacggtattgcaatgctcacattagatactttggtaagcgccctcagtgggactgccgcggagcttccaatctgaacgagttgcatcagctactatctgacattatgatccgccgtctgaagacagaagttctgacacagctgccccctaaggtccgtcagcgcatccccttcgacctgccatcggcggctgctaaggaacttaacacgagcttcgaagagtgggagaagatcatgaggaccccgaacagtggcgcaatggaaactgttatgggcttgataactcggatgttcaagcaaacggcaattgcaaaagcaggggctgttaaggactatataaagatgatgctccaaaatgacagcctgaagtttctggtgttcgcccatcacctttccatgctgcaagcttgcaccgaggccgtgatagagaacaaaacaaggtacatccgcatagatggcagcgttagctcatccgagagaatacatcttgttaatcaatttcagaaggaccccgacacgcgggtggccatcctttccatacaggccgcaggccaagatctgtatgataaggtagcctggggcaaaagaaccctcgtcagtggcttgttcatggaatgtttttgcttcgtgccctag

SEQ ID NO: 300868 - protein, 198 aa, Artificial Sequence
  derived and/or modified sequence
MDFSRNLYDIGEQLDSEDLASLKFLSLDYIPQRKQEPIKDALMLFQRLQEKRMLEESNLSFLKELLFRINRLDLLITYLNTRKEEMERELQTPGRAQISAYRVMLYQISEEVSRSELRSFKFLLQEEISKCKLDDDMNLLDIFIEMEKRVILGEGKLDILKRVCAQINKSLLKIINDYEEFSKERSSSLEGSPDEFSN

SEQ ID NO: 300869 - DNA, 1060 bp, Artificial Sequence
  derived and/or modified sequence
agactgagcttcctgcctgcctgtaccccgccaacagcttcagaagaaggtgactggtggctgcctgaggaataccagtgggcaagagaattagcatttctggagcatctgctgtctgagcagcccctgggtgcgtccactttctgggcacgtgaggttgggccttggccgcctgagcccttgagttggtcacttgaaccttgggaatattgagattatattctcctgccttttaaaaagatggacttcagcagaaatctttatgatattggggaacaactggacagtgaagatctggcctccctcaagttcctgagcctggactacattccgcaaaggaagcaagaacccatcaaggatgccttgatgttattccagagactccaggaaaagagaatgttggaggaaagcaatctgtccttcctgaaggagctgctcttccgaattaatagactggatttgctgattacctacctaaacactagaaaggaggagatggaaagggaacttcagacaccaggcagggctcaaatttctgcctacagggtcatgctctatcagatttcagaagaagtgagcagatcagaattgaggtcttttaagtttcttttgcaagaggaaatctccaaatgcaaactggatgatgacatgaacctgctggatattttcatagagatggagaagagggtcatcctgggagaaggaaagttggacatcctgaaaagagtctgtgcccaaatcaacaagagcctgctgaagataatcaacgactatgaagaattcagcaaagagagaagcagcagccttgaaggaagtcctgatgaattttcaaatgactttggacaaagtttaccaaatgaaaagcaaacctcggggatactgtctgatcatcaacaatcacaattttgcaaaagcacgggagaaagtgcccaaacttcacagcattagggacaggaatggaacacacttggatgcagggtttgagaatgtttttagctggtggcaataaatattagaagcctgcagaatccagctacgaatatagagggttttgctcttg

SEQ ID NO: 300870 - DNA, 658 bp, Artificial Sequence
  derived and/or modified sequence
gattctgcctttctgctggagggaagtgttttcacagattatattctcctgccttttaaaaagatggacttcagcagaaatctttatgatattggggaacaactggacagtgaagatctggcctccctcaagttcctgagcctggactacattccgcaaaggaagcaagaacccatcaaggatgccttgatgttattccagagactccaggaaaagagaatgttggaggaaagcaatctgtccttcctgaaggagctgctcttccgaattaatagactggatttgctgattacctacctaaacactagaaaggaggagatggaaagggaacttcagacaccaggcagggctcaaatttctgcctacagggtcatgctctatcagatttcagaagaagtgagcagatcagaattgaggtcttttaagtttcttttgcaagaggaaatctccaaatgcaaactggatgatgacatgaacctgctggatattttcatagagatggagaagagggtcatcctgggagaaggaaagttggacatcctgaaaagagtctgtgcccaaatcaacaagagcctgctgaagataatcaacgactatgaagaattcagcaaagagagaagcagcagccttgaaggaagtcctgatgaattttcaaatg

SEQ ID NO: 300871 - protein, 226 aa, Artificial Sequence
  derived and/or modified sequence
MATAMYLEHYLDSIENLPCELQRNFQLMRELDQRTEDKKAEIDILAAEYISTVKTLSPDQRVERLQKIQNAYSKCKEYSDDKVQLAMQTYEMVDKHIRRLDADLARFEADLKDKMEGSDFESSGGRGLKKGRGQKEKRGSRGRGRRTSEEDTPKKKKHKGGSEFTDTILSVHPSDVLDMPVDPNEPTYCLCHQVSYGEMIGCDNPDCPIEWFHFACVDLTTKPKGK

SEQ ID NO: 300872 - DNA, 681 bp, Artificial Sequence
  derived and/or modified sequence
atggcaactgctatgtaccttgaacattacctggatagtatcgagaacttgccatgcgagctccagcgcaactttcagctcatgagggagctggatcagcgaaccgaggacaagaaggcagagatcgatatactggccgccgaatacatcagcactgtgaagactctctcgcctgaccaaagagttgagaggctgcaaaagatacagaacgcatacagcaagtgtaaagagtattcagatgataaagtccaattagcaatgcagacctatgaaatggttgataaacatatccgccgcttagacgcagacttagctagatttgaggctgatttaaaggacaagatggagggctcagactttgaatctagcgggggacgcgggcttaagaaagggcgcgggcaaaaggagaagcggggttctagaggaagagggcgccgaacttctgaagaggacacacccaaaaagaaaaaacataaaggtggctccgagttcactgacacgattctcagtgtacatccatccgatgtgctcgatatgccagtggaccccaacgaacccacatattgtctgtgccatcaggtgagctatggagaaatgatagggtgtgataatcctgattgtccgattgagtggttccactttgcttgtgtggaccttacgactaaaccaaaggggaagtag

SEQ ID NO: 300873 - DNA, 681 bp, Artificial Sequence
  derived and/or modified sequence
atggccacagccatgtacctggagcactacctggacagcattgagaacctgccctgtgagctgcagaggaacttccagctgatgagggagctggaccagaggacagaggacaagaaggccgagattgacatcctggccgctgagtacatcagcacagtgaagaccctgagcccagaccagagggtggagcggctgcagaagatccagaatgcctacagcaagtgcaaggagtacagtgatgacaaggtgcagctggccatgcagacctatgagatggtggacaagcacatccggcggctggatgctgacctggccaggtttgaagctgacctgaaggacaagatggagggcagtgactttgagagcagcggcggccggggcctgaagaagggccggggccagaaggagaagaggggcagccggggccggggccgccgcaccagcgaggaggacacccccaagaagaagaagcacaagggcggcagcgagttcacagacaccatcctgtctgtgcaccccagtgatgtgctggacatgcctgtggaccccaatgagcccacctactgcctgtgccaccaggtgtcctatggagagatgattggctgtgacaacccagactgccccatcgagtggttccactttgcctgtgtggacctgaccaccaagcccaagggcaagtag

SEQ ID NO: 300874 - DNA, 681 bp, Artificial Sequence
  derived and/or modified sequence
atggccaccgccatgtacctggagcactacctggacagcatcgagaacctcccttgcgaactccagagaaatttccaactcatgagagagctggaccaaagaaccgaggataaaaaagcggaaatcgatatcttggccgccgagtatatatcaaccgtgaaaacactgagtcccgatcagagagtggagagattacagaaaatccagaacgcctattcaaaatgtaaagaatactcagatgataaggtgcagctcgcgatgcaaacttatgaaatggtggataagcatatccggcgccttgacgccgatctagctcgctttgaggcggacctgaaagataagatggagggtagcgattttgagtcatccggaggaaggggacttaagaagggaagaggacaaaaagagaagcgaggctcccggggcaggggacgaagaaccagcgaagaggacactccaaagaagaagaaacacaagggcgggtcggagttcacggacactattctttccgttcaccccagtgatgtgttagacatgcctgtagaccccaacgagccaacctactgcctctgtcaccaggtgagctacggtgaaatgattggttgcgacaatccagactgtcccatagaatggttccatttcgcatgtgtcgacctcacaactaaacctaagggcaaatag

SEQ ID NO: 300875 - DNA, 681 bp, Artificial Sequence
  derived and/or modified sequence
atggccactgccatgtacttggagcactacctagattccattgaaaacctgccttgtgagcttcagcgaaacttccagctgatgagagagctggatcaacggaccgaggataagaaagcagagattgacattctggctgcagaatacatctccaccgtgaagactttgtcacctgatcagagagtggagaggctgcagaaaattcagaatgcttactccaaatgtaaagaatattccgatgacaaggttcagctggctatgcagacttacgagatggtcgacaagcacattagacgactcgacgcagatctggccagattcgaggccgaccttaaggacaaaatggaaggaagcgatttcgagtcgtctgggggacgtggactgaagaagggaagaggccagaaggaaaagagaggctcaagagggaggggcagaagaacctctgaggaggatacccctaagaaaaagaagcacaagggcggatcggaattcactgatacgatactgtcagtgcatccttcagatgttttagacatgcctgtggaccctaacgaaccgacttactgtctatgccaccaagtttcctatggggagatgattggctgcgataacccggactgtcctattgagtggtttcactttgcttgcgtggatctgacaacaaaacccaagggcaaatag

SEQ ID NO: 300876 - DNA, 681 bp, Artificial Sequence
  derived and/or modified sequence
atggccaccgccatgtacctggagcactacctggacagcatcgagaacctgccctgcgagctgcagagaaacttccagctgatgagagagctggaccagagaaccgaggacaagaaggccgagatcgacatcctggccgccgagtacatcagcaccgtgaagaccctgagccccgaccagagagtggagagactgcagaagatccagaacgcctacagcaagtgcaaggagtacagcgacgacaaggtgcagctggccatgcagacctacgagatggtggacaagcacatcagaagactggacgccgacctggccagattcgaggccgacctgaaggacaagatggagggcagcgacttcgagagcagcggcggcagaggcctgaagaagggcagaggccagaaggagaagagaggcagcagaggcagaggcagaagaaccagcgaggaggacacccccaagaagaagaagcacaagggcggcagcgagttcaccgacaccatcctgagcgtgcaccccagcgacgtgctggacatgcccgtggaccccaacgagcccacctactgcctgtgccaccaggtgagctacggcgagatgatcggctgcgacaaccccgactgccccatcgagtggttccacttcgcctgcgtggacctgaccaccaagcccaagggcaagtag

SEQ ID NO: 300877 - DNA, 1795 bp, Artificial Sequence
  derived and/or modified sequence
ctgggcgggcgcagcgcggccaccgccccgggacccgcgccgctgccctccggctccgcgggcggcccacggcgagatttcatgtgttctttgtatacaagcgacgtcccagattataattctctgctgagatttgagttggatttgaggatttggagaatccctgcagctttgtaacttcagaggtgtaattagctgaaaacatcatcgttttgaagagttctgcgttttgccagtcacctctcaactgtgtgccaaagaaggactccatgaaagatgacagaagaagttattgtgatagccaagtgggactacaccgcccagcaggaccaggagctggacatcaagaagaacgagcggctgtggttgctggacgactccaagacgtggtggcgggtgaggaacgcggccaacaggacgggctatgtaccgtccaactacgtggagcggaagaacagcctgaagaagggctccctcgtgaagaacctgaaggacacactagcccagcgacttctccgtgtcccttaaagcgtcagggaagaacaaacacttcaaggtgcagctcgtggacaatgtctactgcattgggcagcggcgcttccacaccatggacgagctggtggaacactacaaaaaggcgcccatcttcaccagcgagcacggggagaagctctacctcgtcagggccctgcagtgacggcgccccggccccacactcgcctcccgggccccacggtggagctgcccgcccggccttgtggcagaggctcctcccgcggggacggccccgacggcttctctgcgagtctctctttatgttcaggtcgcttggtcggttcgtctcccatttgccatccaggcctcacacccacactcgagcccacccggccggccagctttagaggaggggaggagcagggcgagttcacattattccttttccatcggaagtggcgctcgtgcattcaactcgttcccgctcatggaacccctctttaaaaagacgcagggcacctgtgagcgcaggagcgagcctaaggccacccagcggcagcgcccgtgtcctgggcactcagcgtgctgggcagagcaggtgcgatggccccagtcctagcagccctcgcccatgtcctgtgcccttacatggctcccggactgtgcagggagccgatacgtttgctgatagcaatactggaaccaccgggtgcgatggcagtgaggagactgcccagtgcctttggggctgtgcttgcaataaagaatttcctggaaaggcagtctgcaaaagagggaaccggtgactcagaaagacagatgttttggtaatttaccccaaatgtgccatccacatagtgctttttcctcttgcccttcggcttgtttgaatctcacaattatgtatttaattctcaaagaaatatgtatctgtagccgtttgttgacactaatacagatgattaaggaaaacagctgatctttggggaagggagctaccaacactttatacacacacacacgtgcacacacacacacacacacactatatatatatatattatttacagggaaatttttcagggtttacaaaagagtatgtgattggtagtaagagacacacagaatgtttatgaagaaattgcattttctttttcctttacatttgaacttctttatagtttaaatataacgtcttgagatggcacattcctacgattgaagaaggggtcttgagatcccctaaacttgcatacccagttttttggatattgtaataaaaaaaagtattatgacaagg

SEQ ID NO: 300878 - DNA, 490 bp, Artificial Sequence
  derived and/or modified sequence
tcatcgttttgaagagttctgcgttttgccagtcacctctcaactgtgtgccaaaggactccatgaaagatgacagaagaagttattgtgatagccaagtgggactacaccgcccagcaggaccaggagctggacatcaagaagaacgagcggctgtggttgctggacgactccaagacgtggtggcgggtgaggaacgcggccaacaggacgggctatgtaccgtccaactacgtggagcggaagaacagcctgaagaagggctccctcgtgaagaacctgaaggacacactagcccagcgacttctccgtgtcccttaaagcgtcagggaagaacaaacacttcaaggtgcagctcgtggacaatgtctactgcattgggcagcggcgcttccacaccatggacgagctggtggaacactacaaaaaggcgcccatcttcaccagcgagcacggggagaagctctacctcgtcagggccctgcagtga

SEQ ID NO: 300879 - DNA, 108 bp, Artificial Sequence
  derived and/or modified sequence
atgaagccccacctgaagcagtggagacagagaatgctgttcggcatcttcgcctggggcctgctgttcctgctgatcttcatctacttcaccgacagcaacccctag

SEQ ID NO: 300880 - DNA, 108 bp, Artificial Sequence
  derived and/or modified sequence
atgaagccccatctaaagcagtggagacagcggatgctgtttgggattttcgcatgggggctcctcttcctgttaatctttatctatttcacagatagtaatccatag

SEQ ID NO: 300881 - DNA, 108 bp, Artificial Sequence
  derived and/or modified sequence
atgaagccccacctgaagcagtggaggcagaggatgctgtttggcatctttgcctggggcctgctcttcctgctgatcttcatctacttcacagacagcaacccctag

SEQ ID NO: 300882 - DNA, 108 bp, Artificial Sequence
  derived and/or modified sequence
atgaagccccacctgaagcagtggcggcagcggatgctgttcggcattttcgcatggggcctccttttcctactcatctttatttatttcactgacagtaacccatag

SEQ ID NO: 300883 - DNA, 108 bp, Artificial Sequence
  derived and/or modified sequence
atgaaacctcacctgaagcaatggcgacaaaggatgctctttggcatcttcgcatgggggctgctcttcctcctgatctttatttactttaccgactccaacccttag

SEQ ID NO: 300884 - DNA, 308 bp, Artificial Sequence
  derived and/or modified sequence
acactccgtgtttaggagcgagacccgtgtgtggggaatgttgaaggtggtttggggaaaagcaggaaattctggagaagcgaacgggaggacggcttgcgctttggggacgggcggatacagttgtgcccctgtggctcagtaaaggttcattctgccacccatctgcattaagacacaaggtgctgaccgcagagacctgccatgaaaccacacttgaagcaatggagacaacgaatgcttttcggaatattcgcttgggggctcctctttttgctgattttcatctacttcaccgacagcaaccc

SEQ ID NO: 300885 - protein, 272 aa, Artificial Sequence
  derived and/or modified sequence
MASLLQDQLTTDQDLLLMQEGMPMRKVRSKSWKKLRYFRLQNDGMTVWHARQARGSAKPSFSISDVETIRNGHDSELLRSLAEELPLEQGFTIVFHGRRSNLDLMANSVEEAQIWMRGLQLLVDLVTSMDHQERLDRWLSDWFQRGDKNQDGKMSFQEVQRLLHLMNVEMDQEYAFSLFQAADTSQSGTLEGEEFVQFYKALTKRAEVQELFESFSADGQKLTLLEFLDFLQEEQKERDCTSELALELIDRYEPSDSGASEEDPGEGEEVNT

SEQ ID NO: 300886 - protein, 614 aa, Artificial Sequence
  derived and/or modified sequence
MNSYSDSGYQEAGSFHNSQNVSKADNRQQHSFIGSTNNHVVRNSRAEGQTLVQPSVANRAMRRVSSVPSRAQSPSYVISTGVSPSRGSLRTSLGSGFGSPSVTDPRPLNPSAYSSTTLPAARAASPYSQRPASPTAIRRIGSVTSRQTSNPNGPTPQYQTTARVGSPLTLTDAQTRVASPSQGQVGSSSPKRSGMTAVPQHLGPSLQRTVHDMEQFGQQQYDIYERMVPPRPDSLTAYGVPMLVSIVSLGKTFVLPCPDLHITPIYEGRTYYSPVYRSPNHGTVELQGSQTALYRTGSVGIGNLQRTSSQRSTLTYQRNNYALNTTATYAEPYRPIQYRVQECNYNRLQHAVPADDGTTRSPSIDSIQKDPREFAWRDPELPEVIHMLQHQFPSVQANAAAYLQHLCFGDNKVKMEVCRLGGIKHLVDLLDHRVLEVQKNACGALRNLVFGKSTDENKIAMKNVGGIPALLRLLRKSIDAEVRELVTGVLWNLSSCDAVKMTIIRDALSTLTNTVIVPHSGWNNSSFDDDHKIKFQTSLVLRNTTGCLRNLSSAGEEARKQMRSCEGLVDSLLYVIHTCVNTSDYDSKTVENCVCTLRNLIGWSWRCPRPGYWD

SEQ ID NO: 300887 - protein, 91 aa, Artificial Sequence
  derived and/or modified sequence
TAFRRTPGEEFAWRDPELPEVIHMLQHQFPSVQANAAAYLQHLCFGDNKVKMEVCRLGGIKHLVDLLDHRVGSSEECLWCPSKPRFWQVYR

SEQ ID NO: 300888 - DNA, 276 bp, Artificial Sequence
  derived and/or modified sequence
acagccttcaggaggacccccggagaggagttcgcgtggcgggaccctgagctgcctgaagtcatacacatgctgcaacaccagtttccctcagttcaggcaaacgctgccgcatacctacagcatctctgcttcggtgacaacaaagttaaaatggaagtgtgtagactcggaggcattaagcacttagtcgatttgctggatcatagggtcgggtcttcagaggagtgcctctggtgcccgtcaaagcctagattttggcaggtgtacagatag

SEQ ID NO: 300889 - DNA, 276 bp, Artificial Sequence
  derived and/or modified sequence
acagccttccggaggaccccaggagaggagtttgcctggagggaccctgagctgcctgaggtgatccacatgctgcagcaccagttccccagcgtgcaggccaatgctgctgcctacctgcagcacctgtgctttggagacaacaaggtgaagatggaggtgtgccgcctgggcggcatcaagcacctggtggacctgctggaccaccgggtgggcagcagcgaggagtgcctgtggtgccccagcaagccccgcttctggcaggtgtacagatag

SEQ ID NO: 300890 - DNA, 276 bp, Artificial Sequence
  derived and/or modified sequence
accgccttccggcggacccccggcgaggagttcgcctggcgggaccctgagttacctgaggtcatccacatgctccaacaccagtttccaagcgtgcaggctaatgcagctgcctacctgcagcacctctgctttggagataacaaagttaagatggaagtgtgtcggctgggcggcatcaagcacttggtagatctgctggatcatcgggtgggctcctccgaagaatgtttatggtgcccttccaagcctagattctggcaggtgtacagatag

SEQ ID NO: 300891 - DNA, 276 bp, Artificial Sequence
  derived and/or modified sequence
accgcatttcgtcgaacccctggtgaagagtttgcctggcgagaccctgagctgccggaagtcattcatatgctgcagcatcagttcccttctgttcaggcaaacgcagctgcatatttacagcacttgtgtttcggcgacaataaggttaaaatggaggtgtgccgcttagggggtattaaacacttagtggacctcttggaccatagagtgggctcctcggaggaatgcctgtggtgtccttccaaaccaagattctggcaggtgtaccgatag

SEQ ID NO: 300892 - DNA, 276 bp, Artificial Sequence
  derived and/or modified sequence
accgccttcagaagaacccccggcgaggagttcgcctggagagaccccgagctgcccgaggtgatccacatgctgcagcaccagttccccagcgtgcaggccaacgccgccgcctacctgcagcacctgtgcttcggcgacaacaaggtgaagatggaggtgtgcagactgggcggcatcaagcacctggtggacctgctggaccacagagtgggcagcagcgaggagtgcctgtggtgccccagcaagcccagattctggcaggtgtacagatag

SEQ ID NO: 300893 - DNA, 966 bp, Artificial Sequence
  derived and/or modified sequence
atggatccaaagtacccgtggagcaagtgcggccataaaacgacctccaaagctagtttgaatccctccgatacgccgccatccgtcgtcaatgaggactttttgcacgacctgaaagagaccaatatctcgtattcacaggaagccgacgaccgggttttcagggcgcatgggcattgtcttcatgaaatattcctgttgagagaaggaatgtttgagaggatccccgatatcgttttatggcctacatgtcacgacgacgttgtaaagatcgtgaatttggcctgtaagtacaacctatgcatcatccccattggggggggtactagcgtgtcctatggcctgatgtgccccgccgacgagaccagaacaatcatctctctagacaccagtcaaatgaataggatcctttgggtcgacgagaacaacctgacagcacacgtagaggctggaatcaccggccaggagctggagcgacagctcaaggagagtggttattgcaccggacatgagccagacagcctcgagttctctactgtggggggttgggtgtctactagggccagcggaatgaaaaagaacatctatgggaacatcgaagatttagtagtccacataaaaatggttaccccgcgaggaatcatcgaaaaatcttgtcagggtccccgaatgtctacagggccagatatacatcacttcatcatgggctcagagggcactctgggagtgattaccgaggctacaatcaaaatacgccctgtgccagaataccagaaatacggttccgttgcctttcccaactttgaacagggcgtggcatgtttaagggaaattgcaaaacagcgatgtgcacctgcttccatccgcctgatggataataaacagtttcagtttgggcatgcactgaaaccccaggtcagctcgattttcacatcctttctggatggcctcaaaaagttctactag

SEQ ID NO: 300894 - DNA, 966 bp, Artificial Sequence
  derived and/or modified sequence
atggaccccaagtacccctggagcaaatgtggccacaagaccaccagcaaggccagcctgaaccccagcgacaccccacccagcgtggtgaatgaagacttcctgcatgacctgaaggagaccaacatctcctacagccaggaggctgatgacagagtcttccgggcccacggccactgcctgcacgagatcttcctgctgcgggagggcatgtttgagcgcatcccagacatcgtgctgtggcccacctgccatgatgatgtggtgaagatcgtgaacctggcctgcaagtacaacctgtgcatcatccccatcggcggcggcacctctgtgtcctatggcctgatgtgcccagcagatgagaccaggaccatcatcagcctggacaccagccagatgaaccgcatcctgtgggtggatgagaacaacctgacagcccacgtggaggccggcatcaccggccaggagctggagcggcagctgaaggagagcggctactgcaccggccacgagccagacagcctggagttcagcacagtgggcggctgggtgtccacccgggccagcggcatgaagaagaacatctacggcaacatcgaggacctggtggtgcacatcaagatggtgaccccccggggcatcatcgagaagagctgccagggccccaggatgagcacaggccctgacatccaccacttcatcatgggcagcgagggcaccctgggcgtcatcacagaggccaccatcaagatccggcctgtgcctgagtaccagaagtatggctctgtggccttccccaactttgagcagggcgtggcctgcctgcgggagatcgccaagcagagatgtgccccagccagcatccggctgatggacaacaagcagttccagtttggccacgccctgaagccccaggtgagcagcatcttcaccagcttcctggatggcctgaagaagttctactag

SEQ ID NO: 300895 - DNA, 1249 bp, Artificial Sequence
  derived and/or modified sequence
aaagaagcggtgagtagcggtatgtggaaggagttagcgtcgagggaccaggccgggcctgtgctgcaggagggcacaggcgaggcaagaagttatgaaatggaatggatggggatataatgattctaaattcatcttcaataagaagggccaaattgaattgactgggaaaaggtaccctcttagtggcatgggtttaccaacatttaaagaatggatccaaaatacccttggagtaaatgtggacataaaactacctctaaagcatccttaaatcctagtgatacacctccttctgttgtaaatgaagattttcttcatgaccttaaagaaactaatatttcatattcacaagaggcagatgatcgagtatttagagctcatggtcattgtcttcatgagatatttttgctcagggaaggaatgtttgagcgaattcctgatatagttttatggccaacatgccatgatgatgtagttaagattgtgaatctagcttgcaaatataatctttgtatcataccaattggtggaggaacaagtgtttcatatggcctgatgtgtcctgcagatgagacaagaacaattatttctttggacacttcacaaatgaatcgaattctctgggttgatgagaacaatttgacagctcatgtagaggctggcataacaggacaagagttggaaagacagcttaaagaaagtggttattgtacaggtcatgaaccagattccctggagttcagtactgtaggaggatgggtatctactcgcgcatcaggcatgaagaagaatatctatggcaatatcgaggacctggtggttcatataaaaatggtaacacctagaggtataatagaaaaaagctgtcaaggacctcgtatgtcaacaggccctgatatccatcacttcatcatgggatctgaaggaactcttggtgtaataacagaagctacaataaaaatcagaccagtccctgaataccaaaagtatggctcagtagctttccctaattttgaacaaggagtagcctgtttaagagaaattgcaaaacagagatgtgctccggcatctattcgcctcatggacaacaagcagtttcagtttggtcatgctcttaaacctcaggtttcctctatttttacatcatttttggacggattaaaaaagttttatattacaaagtttaaaggatttgacccaaatcagctaagtgtagccacattactgtttgagggggatcgtgaga

SEQ ID NO: 300896 - DNA, 966 bp, Artificial Sequence
  derived and/or modified sequence
atggaccccaagtacccctggagcaagtgcggccacaagaccacctccaaagcctctctgaacccttctgatacaccacctagcgtcgtaaatgaggacttcttgcacgatctcaaggaaacaaatattagttactcacaggaagcagatgaccgagtttttcgcgcccacggccactgcctccacgaaatttttctcctgagggaggggatgttcgaaagaatacccgacattgtcttgtggcctacctgtcacgacgatgtggtgaaaatcgtgaatcttgcctgtaaatataacttgtgtatcattcccatcggaggaggcaccagcgtttcttacggcctcatgtgccccgccgatgagactcgtacaattatttcactagacacaagccagatgaatcggattctgtgggtcgacgagaataatctaaccgcacatgtggaagctggcatcacgggtcaagagttagagcggcagcttaaagaaagtggctactgcaccgggcatgagccggatagcctggagttttccactgttggaggatgggtgtctacaagagcgtctggtatgaaaaagaatatttatggtaatatcgaggacctcgtggtgcacatcaaaatggtcactccgaggggaattattgagaagtcatgccagggccctagaatgtcaactggtcctgacattcaccattttatcatggggtctgagggcactctgggagtgatcacggaggcgactatcaaaattaggcccgttcctgagtaccaaaaatacggtagcgttgcctttcctaatttcgaacagggcgtcgcctgcttgcgtgagattgcaaaacagcgatgcgccccggcttctatccgcctgatggataataagcagtttcagtttggacacgcacttaaaccacaggtaagttctatatttaccagctttctggacggcctaaaaaaattttattag

SEQ ID NO: 300897 - DNA, 966 bp, Artificial Sequence
  derived and/or modified sequence
atggatcccaagtatccttggtccaaatgtgggcacaaaactacctctaaggcgagtttaaatcccagcgacaccccacctagcgtggttaatgaagatttcctgcatgatctgaaggagacaaatatctcatactctcaagaggctgatgatagagtcttcagggcccacggccactgtcttcacgagatatttttattgagagaggggatgttcgagcgcatccccgatatcgtcttgtggccaacctgtcatgatgatgttgtgaagatagtaaacctggcatgcaaatacaacctgtgtataatcccaatagggggaggaacaagtgtctcctatgggctgatgtgtcctgctgatgagacgcggacaataatcagccttgacacttcccagatgaataggatcctgtgggttgacgaaaataacttgacggcccatgtggaagccggaataaccgggcaggagctcgagaggcagctgaaagagtcaggatattgcactggccatgagcccgattcactggagttctctaccgtcggcggttgggtgtcaaccagggcaagcggcatgaagaagaacatctacggcaacatcgaggatctagtggtgcacattaagatggtaactcctaggggcatcattgaaaagtcatgccagggtcctagaatgtcaactggtcctgacattcaccactttattatgggttcggaaggcactctgggtgtgatcactgaagccaccataaagatcagacccgtgccagagtaccagaaatacggatctgtcgctttccctaacttcgagcagggggtcgcatgtcttcgtgaaatcgccaagcaaaggtgcgcgcctgcaagcatacgtctgatggataacaagcaattccaatttggccacgctttgaagccgcaggtatcctcaatcttcaccagcttccttgacgggcttaagaaattctactag

SEQ ID NO: 300898 - DNA, 966 bp, Artificial Sequence
  derived and/or modified sequence
atggaccccaagtacccctggagcaagtgcggccacaagaccaccagcaaggccagcctgaaccccagcgacaccccccccagcgtggtgaacgaggacttcctgcacgacctgaaggagaccaacatcagctacagccaggaggccgacgacagagtgttcagagcccacggccactgcctgcacgagatcttcctgctgagagagggcatgttcgagagaatccccgacatcgtgctgtggcccacctgccacgacgacgtggtgaagatcgtgaacctggcctgcaagtacaacctgtgcatcatccccatcggcggcggcaccagcgtgagctacggcctgatgtgccccgccgacgagaccagaaccatcatcagcctggacaccagccagatgaacagaatcctgtgggtggacgagaacaacctgaccgcccacgtggaggccggcatcaccggccaggagctggagagacagctgaaggagagcggctactgcaccggccacgagcccgacagcctggagttcagcaccgtgggcggctgggtgagcaccagagccagcggcatgaagaagaacatctacggcaacatcgaggacctggtggtgcacatcaagatggtgacccccagaggcatcatcgagaagagctgccagggccccagaatgagcaccggccccgacatccaccacttcatcatgggcagcgagggcaccctgggcgtgatcaccgaggccaccatcaagatcagacccgtgcccgagtaccagaagtacggcagcgtggccttccccaacttcgagcagggcgtggcctgcctgagagagatcgccaagcagagatgcgcccccgccagcatcagactgatggacaacaagcagttccagttcggccacgccctgaagccccaggtgagcagcatcttcaccagcttcctggacggcctgaagaagttctactag

SEQ ID NO: 300899 - DNA, 303 bp, Artificial Sequence
  derived and/or modified sequence
atgggcaccagcagcatcttcctgtgcgtgctgttcctgtgcggcgccctcggtctcaccatgagcccagcccgcgggaggttgcgctgctatatatgtggctttacgaaaccatgccaccccgtgcctacagaatgcagagacgatgaggcctgcggcatctcaattggaacctctggacgcacgctcgtgcagtggcccttcagcagacgcctgccaacctcaatccaccccgcttttccggtagccccagccagtgcttgcctttttcatcctaccgaccaaagtgagatcacagagtag

SEQ ID NO: 300900 - protein, 1755 aa, Artificial Sequence
  derived and/or modified sequence
MLKAVLKKSREGGKGGKKEAGSDFGPETSPVLHLDHSADSPVSSLPTAEDTYRVSLAKGVSMSLPSSPLLPRQSHLVQSRVNKKSPGPVRKPKYVESPRVPGDAVIMPFREVAKPTEPDEHATITSSSENDDRSGSSLEWNKDGNLRLGVQKGVLHDRRADNCSPVAEEETTGSAESTLPKAESSAGDGPVPYSQGSSSLIMPRPNSVAATSSTKLEDLSYLDGQRNAPLRTSIRLPWHNTAGGRAQEVKARFAPYKPQDILLKPLLFEVPSITTDSVFVGRDWLFHQIEENLRNTELAENRGAVVVGNVGFGKTAIISKLVALSCHGSRMRQIASNSPGSSPKTSDPTQDLHFTPLLSPSSSTSASSTAKTPLGSISAENQRPREDAVKYLASKVVAYHYCQADNTYTCLVPEFVHSIAALLCRSHQLAAYRDLLIKEPQLQSMLSLRSCVQDPVAAFKRGVLEPLTNLRNEQKIPEEEYIILIDGLNEAEFHKPDYGDTLSSFITKIISKFPAWLKLIVTVRANFQEIISALPFVKLSLDDFPDNKDIHSDLHAYVQHRVHSSQDILSNISLNGKADATLIGKVSSHLVLRSLGSYLYLKLTLDLFQRGHLVIKSASYKVVPVSLSELYLLQCNMKFMTQSAFERALPILNVALASLHPMTDEQIFQAINAGHIQGEQGWEDFQQRMDALSCFLIKRRDKTRMFCHPSFREWLVWRADGENTAFLCEPRNGHALLAFMFSRQEGKLNRQQTMELGHHILKAHIFKGLSKKTGISSSHLQALWIGYSTEGLSAALASLRNLYTPNVKVSRLLILGGANVNYRTEVLNNAPILCVQSHLGHEEVVTLLLEFGACLDGTSENGMTALCYAAAAGHMKLVCLLTKKGVRVDHLDKKGQCALVHSALRGHGDILQYLLTCEWSPGPPQPGTLRKSHALQQALTAAASMGHSSVVQCLLGMEKEHEVEVNGTDTLWGETALTAAAGRGKLEVCELLLGHGAAVSRTNRRGVPPLFCAARQGHWQIVRLLLERGCDVNLSDKQGRTPLMVAACEGHLSTVEFLLSKGAALSSLDKEGLSALSWACLKGHRAVVQYLVEEGAAIDQTDKNGRTPLDLAAFYGDAETVLYLVEKGAVIEHVDHSGMRPLDRAIGCRNTSVVVALLRKGAKLGNAAWAMATSKPDILIILLQKLMEEGNVMYKKGKMKEAAQRYQYALRKFPREGFGEDMRPFNELRVSLYLNLSRCRRKTNDFGMAEEFASKALELKPKSYEAFYARARAKRNSRQFVAALADLQEAVKLCPTNQEVKRLLARVEEECKQLQRSQQQKQQGPLPAPLNDSENEEDTPTPGLSDHFHSEETEEEETSPQEESVSPTPRSQPSSSVPSSYIRNLQEGLQSKGRPVSPQSRAGIGKSLREPVAQPGLLLQPSKQAQIVKTSQHLGSGQSAVRNGSMKVQISSQNPPPSPMPGRIAATPAGSRTQHLEGTGTFTTRAGCGHFGDRLGPSQNVRLQCGENGPAHPLPSKTKTTERLLSHSSVAVDAAPPNQGGLATCSDVRHPASLTSSGSSGSPSSSIKMSSSTSSLTSSSSFSDGFKVQGPDTRIKDKVVTHVQSGTAEHRPRNTPFMGIMDKTARFQQQSNPPSRSWHCPAPEGLLTNTSSAAGLQSANTEKPSLMQVGGYNNQAKTCSVSTLSASVHNGAQVKELEESKCQIPVHSQENRITKTVSHLYQESISKQQPHISNEAHRSHLTAAKPKRSFIESNV

SEQ ID NO: 300901 - DNA, 5268 bp, Artificial Sequence
  derived and/or modified sequence
atgctgaaggccgtgctgaagaagagcagagagggcggcaagggcggcaagaaggaggccggcagcgacttcggccccgagaccagccccgtgctgcacctggaccacagcgccgacagccccgtgagcagcctgcccaccgccgaggacacctacagagtgagcctggccaagggcgtgagcatgagcctgcccagcagccccctgctgcccagacagagccacctggtgcagagcagagtgaacaagaagagccccggccccgtgagaaagcccaagtacgtggagagccccagagtgcccggcgacgccgtgatcatgcccttcagagaggtggccaagcccaccgagcccgacgagcacgccaccatcaccagcagcagcgagaacgacgacagaagcggcagcagcctggagtggaacaaggacggcaacctgagactgggcgtgcagaagggcgtgctgcacgacagaagagccgacaactgcagccccgtggccgaggaggagaccaccggcagcgccgagagcaccctgcccaaggccgagagcagcgccggcgacggccccgtgccctacagccagggcagcagcagcctgatcatgcccagacccaacagcgtggccgccaccagcagcaccaagctggaggacctgagctacctggacggccagagaaacgcccccctgagaaccagcatcagactgccctggcacaacaccgccggcggcagagcccaggaggtgaaggccagattcgccccctacaagccccaggacatcctgctgaagcccctgctgttcgaggtgcccagcatcaccaccgacagcgtgttcgtgggcagagactggctgttccaccagatcgaggagaacctgagaaacaccgagctggccgagaacagaggcgccgtggtggtgggcaacgtgggcttcggcaagaccgccatcatcagcaagctggtggccctgagctgccacggcagcagaatgagacagatcgccagcaacagccccggcagcagccccaagaccagcgaccccacccaggacctgcacttcacccccctgctgagccccagcagcagcaccagcgccagcagcaccgccaagacccccctgggcagcatcagcgccgagaaccagagacccagagaggacgccgtgaagtacctggccagcaaggtggtggcctaccactactgccaggccgacaacacctacacctgcctggtgcccgagttcgtgcacagcatcgccgccctgctgtgcagaagccaccagctggccgcctacagagacctgctgatcaaggagccccagctgcagagcatgctgagcctgagaagctgcgtgcaggaccccgtggccgccttcaagagaggcgtgctggagcccctgaccaacctgagaaacgagcagaagatccccgaggaggagtacatcatcctgatcgacggcctgaacgaggccgagttccacaagcccgactacggcgacaccctgagcagcttcatcaccaagatcatcagcaagttccccgcctggctgaagctgatcgtgaccgtgagagccaacttccaggagatcatcagcgccctgcccttcgtgaagctgagcctggacgacttccccgacaacaaggacatccacagcgacctgcacgcctacgtgcagcacagagtgcacagcagccaggacatcctgagcaacatcagcctgaacggcaaggccgacgccaccctgatcggcaaggtgagcagccacctggtgctgagaagcctgggcagctacctgtacctgaagctgaccctggacctgttccagagaggccacctggtgatcaagagcgccagctacaaggtggtgcccgtgagcctgagcgagctgtacctgctgcagtgcaacatgaagttcatgacccagagcgccttcgagagagccctgcccatcctgaacgtggccctggccagcctgcaccccatgaccgacgagcagatcttccaggccatcaacgccggccacatccagggcgagcagggctgggaggacttccagcagagaatggacgccctgagctgcttcctgatcaagagaagagacaagaccagaatgttctgccaccccagcttcagagagtggctggtgtggagagccgacggcgagaacaccgccttcctgtgcgagcccagaaacggccacgccctgctggccttcatgttcagcagacaggagggcaagctgaacagacagcagaccatggagctgggccaccacatcctgaaggcccacatcttcaagggcctgagcaagaagaccggcatcagcagcagccacctgcaggccctgtggatcggctacagcaccgagggcctgagcgccgccctggccagcctgagaaacctgtacacccccaacgtgaaggtgagcagactgctgatcctgggcggcgccaacgtgaactacagaaccgaggtgctgaacaacgcccccatcctgtgcgtgcagagccacctgggccacgaggaggtggtgaccctgctgctggagttcggcgcctgcctggacggcaccagcgagaacggcatgaccgccctgtgctacgccgccgccgccggccacatgaagctggtgtgcctgctgaccaagaagggcgtgagagtggaccacctggacaagaagggccagtgcgccctggtgcacagcgccctgagaggccacggcgacatcctgcagtacctgctgacctgcgagtggagccccggccccccccagcccggcaccctgagaaagagccacgccctgcagcaggccctgaccgccgccgccagcatgggccacagcagcgtggtgcagtgcctgctgggcatggagaaggagcacgaggtggaggtgaacggcaccgacaccctgtggggcgagaccgccctgaccgccgccgccggcagaggcaagctggaggtgtgcgagctgctgctgggccacggcgccgccgtgagcagaaccaacagaagaggcgtgccccccctgttctgcgccgccagacagggccactggcagatcgtgagactgctgctggagagaggctgcgacgtgaacctgagcgacaagcagggcagaacccccctgatggtggccgcctgcgagggccacctgagcaccgtggagttcctgctgagcaagggcgccgccctgagcagcctggacaaggagggcctgagcgccctgagctgggcctgcctgaagggccacagagccgtggtgcagtacctggtggaggagggcgccgccatcgaccagaccgacaagaacggcagaacccccctggacctggccgccttctacggcgacgccgagaccgtgctgtacctggtggagaagggcgccgtgatcgagcacgtggaccacagcggcatgagacccctggacagagccatcggctgcagaaacaccagcgtggtggtggccctgctgagaaagggcgccaagctgggcaacgccgcctgggccatggccaccagcaagcccgacatcctgatcatcctgctgcagaagctgatggaggagggcaacgtgatgtacaagaagggcaagatgaaggaggccgcccagagataccagtacgccctgagaaagttccccagagagggcttcggcgaggacatgagacccttcaacgagctgagagtgagcctgtacctgaacctgagcagatgcagaagaaagaccaacgacttcggcatggccgaggagttcgccagcaaggccctggagctgaagcccaagagctacgaggccttctacgccagagccagagccaagagaaacagcagacagttcgtggccgccctggccgacctgcaggaggccgtgaagctgtgccccaccaaccaggaggtgaagagactgctggccagagtggaggaggagtgcaagcagctgcagagaagccagcagcagaagcagcagggccccctgcccgcccccctgaacgacagcgagaacgaggaggacacccccacccccggcctgagcgaccacttccacagcgaggagaccgaggaggaggagaccagcccccaggaggagagcgtgagccccacccccagaagccagcccagcagcagcgtgcccagcagctacatcagaaacctgcaggagggcctgcagagcaagggcagacccgtgagcccccagagcagagccggcatcggcaagagcctgagagagcccgtggcccagcccggcctgctgctgcagcccagcaagcaggcccagatcgtgaagaccagccagcacctgggcagcggccagagcgccgtgagaaacggcagcatgaaggtgcagatcagcagccagaaccccccccccagccccatgcccggcagaatcgccgccacccccgccggcagcagaacccagcacctggagggcaccggcaccttcaccaccagagccggctgcggccacttcggcgacagactgggccccagccagaacgtgagactgcagtgcggcgagaacggccccgcccaccccctgcccagcaagaccaagaccaccgagagactgctgagccacagcagcgtggccgtggacgccgccccccccaaccagggcggcctggccacctgcagcgacgtgagacaccccgccagcctgaccagcagcggcagcagcggcagccccagcagcagcatcaagatgagcagcagcaccagcagcctgaccagcagcagcagcttcagcgacggcttcaaggtgcagggccccgacaccagaatcaaggacaaggtggtgacccacgtgcagagcggcaccgccgagcacagacccagaaacacccccttcatgggcatcatggacaagaccgccagattccagcagcagagcaacccccccagcagaagctggcactgccccgcccccgagggcctgctgaccaacaccagcagcgccgccggcctgcagagcgccaacaccgagaagcccagcctgatgcaggtgggcggctacaacaaccaggccaagacctgcagcgtgagcaccctgagcgccagcgtgcacaacggcgcccaggtgaaggagctggaggagagcaagtgccagatccccgtgcacagccaggagaacagaatcaccaagaccgtgagccacctgtaccaggagagcatcagcaagcagcagccccacatcagcaacgaggcccacagaagccacctgaccgccgccaagcccaagagaagcttcatcgagagcaacgtgtag

SEQ ID NO: 300902 - DNA, 5268 bp, Artificial Sequence
  derived and/or modified sequence
atgctaaaagcagtactgaagaagtcaagagagggtggcaagggaggcaagaaggaagccgggagtgacttcggccctgaaacatctcccgtgctgcacctggaccacagcgccgactcacctgtcagctccctccccaccgccgaagacacatatcgggtcagcttagcgaagggtgtgtcaatgtccctgccaagctcacctcttctccctcgacagagtcatcttgttcagagtcgggtcaacaaaaagtcacccggacctgtgcgaaaacctaaatacgtggagagcccgcgagtgcccggcgacgccgtaatcatgccatttagggaagtcgccaaacctacagagcctgatgaacatgctaccattacatctagttccgaaaacgatgatcgaagcggtagttcccttgaatggaataaagacggcaatctgagactcggcgtgcagaagggagtcttgcacgatcgccgggctgataattgtagtccggtagctgaagaggaaaccaccggatccgctgagtctaccctccctaaagcagaatcctcagctggagacggcccagttccctattctcagggatcgtctagtctcatcatgcctagaccaaattcggtcgccgcaacctctagtacaaagctggaggacctgagttatctagacggacaacggaatgcacctctgcggacatccatccgcctgccatggcataatactgccggagggcgagcacaggaggtaaaagctcggtttgctccatacaaaccgcaagacatcctgttgaaacccctcctcttcgaagtcccaagtataaccactgattccgttttcgtgggtcgagattggctgtttcatcagatcgaggaaaaccttagaaatactgagttagcagagaaccgaggagccgtggttgtgggcaacgtgggattcgggaaaacggctatcattagcaagctggtcgccctttcttgtcacggatctagaatgcgccagattgcatctaactcaccggggtcttcccccaagacaagtgaccccacccaagacctccatttcacgccccttctgagcccttccagtagcacttctgcctccagcaccgcaaaaacccccctgggttctatcagcgccgaaaatcagagacctagagaagacgccgtgaagtacctggcatccaaagtagtagcttatcattattgccaggcagataacacatatacttgcctggtcccagaatttgtccactccatagcggcgctgctgtgtcggtcccatcagctcgctgcttaccgagacctcctaattaaggaacctcagctacagtccatgctgagcctgcggagttgcgttcaggaccctgttgcggcttttaagcgcggtgtgcttgagccactgaccaacctgaggaacgagcagaagatacctgaagaggaatacattatactgatcgacgggctgaacgaggccgagtttcataaacccgattacggagacactctgtcttcttttattacaaaaattatttctaagtttcctgcctggctgaaactgatcgtgaccgtgagggcgaattttcaggagatcatctctgcattgcctttcgtaaagttgtccttggatgattttcccgacaataaggacatccacagcgatttacacgcctatgtgcagcatcgggtccactccagtcaagacatcctgagcaatattagtctgaatggaaaggcggacgcaacattaatcggaaaggtatccagccacttggttctgagatcactggggtcctatttgtacctgaaactgactctggacctcttccaacgaggacaccttgtaatcaagtccgcctcctataaagtggttcccgtgtcacttagcgagctttacctgctgcaatgtaacatgaagtttatgactcagagcgcctttgagcgggcacttcctatcttgaatgtcgctcttgcttccctgcatccgatgaccgacgagcagatttttcaagcgattaacgccggccacatacaaggagaacaaggctgggaggacttccagcagcggatggacgccctcagttgttttttgataaaacgtcgggacaaaactaggatgttttgtcatcctagcttccgcgagtggcttgtgtggagggcagacggcgagaataccgcatttctttgcgaacccaggaatggccacgcattgttggcatttatgttctcgcggcaggagggcaaactcaaccggcagcaaacaatggagttaggccaccacatcctgaaggcgcacatctttaaaggcttgtctaagaaaacggggatcagctcgtcccaccttcaggctctatggattggctacagcacagaaggactgtctgcagctctagcctcgctcaggaacctatatactcccaatgtgaaagtgtccagacttttaatactgggcggggcaaatgtcaactatcgaaccgaggtgctcaacaacgcccccatcctctgcgtgcagagccaccttggacatgaagaagttgtaacgctgcttttagagtttggagcctgtctcgacgggactagcgaaaatggcatgaccgccctatgctatgccgccgccgctgggcacatgaagctggtgtgccttctgacgaagaagggagtgagggtggaccatctggacaaaaaagggcagtgtgccctggtccactccgcactgcggggtcacggggatatcctccagtaccttctgacatgcgaatggtcccctggcccgccccagccaggtacactgcggaaatcccacgcacttcaacaggccctaacagcagcagcatccatgggtcattcatccgtagtgcaatgcctcctgggcatggaaaaagagcatgaagtggaagtcaacggcactgacactctgtggggtgagaccgccttgacagcagccgctggaagaggcaagctggaggtctgtgaactcctgctgggtcatggtgccgctgtgtctagaaccaatagacggggcgtacccccccttttttgcgcagctcgccagggccactggcagattgttaggcttctcctcgaaaggggctgtgatgtgaatttgagtgacaagcagggaaggaccccattgatggtggccgcttgcgagggacacctcagtacagtcgaattcctgctgtccaaaggcgctgcactatcctcccttgacaaggaaggcctgtccgcgctcagctgggcctgcttgaagggtcatcgggctgtggtacagtatctggtggaagagggtgccgccatagaccaaactgacaaaaatggtcgtacacccctggatttagccgcattctatggagatgctgagactgtcctgtaccttgtggagaaaggtgctgtcatcgagcatgtggaccactctggtatgcgtccactggaccgcgcgatcggttgccggaacacatctgttgtggtcgccctgctgcggaagggcgcaaaactggggaacgctgcctgggccatggctacaagcaagcccgatatcctgattattttgttacaaaaactcatggaagaaggaaacgtgatgtacaagaaggggaagatgaaagaggccgctcagcggtaccaatacgcactgcggaaattccctcgggaggggttcggcgaggatatgcgtccttttaacgaactgcgcgtttctctctacttgaacctgtcccggtgtcgacggaaaaccaacgatttcggaatggcggaggagttcgcctccaaggcactcgagctgaagcccaaaagctatgaggctttttatgctagagccagggcaaagcggaactccaggcagttcgtcgcggccttggccgaccttcaggaagccgtcaaactctgccccacaaaccaggaggtaaagcggctactcgctcgggttgaagaggaatgcaaacagctgcagcgatcgcagcagcagaagcaacagggcccattgcccgcaccactgaatgattccgagaacgaagaggacactccaactcccggcctgtccgaccatttccactctgaagaaaccgaagaggaggagacatcaccccaagaggaatccgtgtcccctaccccgcgttctcagccctcctcaagcgtccccagttcttacatccgcaatctgcaggagggattacagtcaaagggccgtccagtttccccccagtcgagggccggtatagggaaatctttgcgggagcctgtggctcagccaggtctgctcttgcagccttctaaacaggctcagatcgtcaagacctcccagcacctggggtccggtcaatccgcagtccgcaacggctctatgaaggtgcagataagctcacagaatccccctccctcacccatgccaggcagaattgctgccacccccgcaggcagcaggactcaacatctcgagggaaccggcacatttacgacgcgagcagggtgtggacattttggcgatcgcctgggcccgagtcagaatgtacggctgcagtgcggcgaaaatggccctgctcatcccttgccttcaaaaaccaagaccaccgaaaggttgctgagccactctagcgtggcagtggacgctgcgccccctaaccagggtggactagccacttgctcagatgtgagacacccggcatcactgacaagctctgggagttccggatccccctcctcttcaataaaaatgtcgagtagcacaagttccctgacctccagctcttcctttagcgacggcttcaaagttcagggcccagatacacgcatcaaggataaggtggtcacccatgtacagagtgggaccgcagagcaccgtccacgaaatactccatttatgggaattatggacaaaactgcgcgttttcagcagcagtctaaccccccgtctcggtcttggcactgccccgcacccgaggggctgctcaccaacaccagtagcgccgcagggttgcagtccgcaaatactgagaagccttctctgatgcaagtagggggatataataaccaggcaaaaacctgttcagtgtcaacccttagcgcatccgtacacaatggggcccaggttaaggagttggaagagtccaagtgccagattcccgtgcactcccaagagaaccggataacaaagaccgtttcacacctgtaccaggaatcaatttcaaagcagcagccccacatctccaatgaggcccataggtctcacttgactgcagctaaacctaagagatcattcatcgaatccaacgtctag

SEQ ID NO: 300903 - DNA, 5268 bp, Artificial Sequence
  derived and/or modified sequence
atgctgaaggctgtgctgaagaagagccgggagggcggcaagggcggcaagaaggaggccggcagtgactttggacctgagaccagccctgtgctgcacctggaccacagcgctgacagccctgtgagcagcctgcccacagctgaggacacctacagagtgtccctggccaagggcgtgtccatgagcctgcccagcagccccctgctgccccggcagagccacctggtgcagagccgggtgaacaagaagagccctggccctgtgaggaagcccaagtatgtggagagcccccgggtgcctggagatgctgtgatcatgcccttccgggaggtggccaagcccacagagccagatgaacatgccaccatcaccagcagcagtgaaaatgatgacaggagcggcagcagcctggagtggaacaaggatggcaacctgcggctgggcgtgcagaagggcgtgctgcatgaccggcgggctgacaactgcagccctgtggccgaggaggagaccaccggcagcgctgagagcaccctgcccaaggccgagagcagcgctggagatggccctgtgccctacagccagggcagcagcagcctcatcatgccccggcccaacagcgtggccgccaccagcagcaccaagctggaggacctgagctacctggatggccagagaaatgcccccctgcggaccagcatccggctgccctggcacaacacagctgggggccgggcccaggaggtgaaggccaggtttgccccctacaagccccaggacatcctgctgaagcccctgctgtttgaggtgcccagcatcaccacagattctgtgtttgtgggccgggactggctgttccaccagatcgaggagaacctgaggaacacagagctggccgagaacagaggagctgtggtggtgggcaatgtgggctttgggaagacagccatcatcagcaagctggtggccctgagctgccacggcagcaggatgaggcagatcgccagcaacagccctggcagcagccccaagaccagtgaccccacccaggacctgcacttcacccccctgctgagccccagcagcagcaccagcgccagcagcacagccaagacccccctgggcagcatctctgctgagaaccagaggccccgggaggatgctgtgaagtacctggccagcaaggtggtggcctaccactactgccaggccgacaacacctacacctgcctggtgcctgagtttgtgcacagcattgctgccctgctgtgccgcagccaccagctggccgcctacagagacctgctgatcaaggagccccagctgcagagcatgctgagcctgcggagctgtgtgcaggaccctgtggccgccttcaagaggggcgtgctggagcccctgaccaacctgagaaatgagcagaagatccctgaggaggagtacatcatcctgattgatggcctgaatgaagctgagttccacaagccagactatggagacaccctgagcagcttcatcaccaagatcatcagcaagtttcctgcctggctgaagctgattgtgacagtgcgggccaacttccaggagatcatcagcgccctgccctttgtgaagctgagcctggatgacttcccagacaacaaggacatccacagcgacctgcacgcctacgtgcagcaccgggtgcacagcagccaggacatcctgagcaacatcagcctgaatggcaaggcagatgccaccctgattggcaaggtgagcagccacctggtgctgcggagcctgggcagctacctgtacctgaagctgaccctggacctcttccagaggggccacctggtgatcaagagcgccagctacaaggtggtgcctgtgtccctgtctgagctgtacctgctgcagtgcaacatgaagttcatgacccagagcgcctttgagcgggccctgcccatcctgaatgtggccctggccagcctgcaccccatgacagatgagcagatcttccaggccatcaatgccggccacatccagggcgagcagggctgggaggacttccagcagaggatggatgccctgagctgcttcctgatcaagagaagagacaagaccaggatgttctgccaccccagcttccgggagtggctggtgtggagggcagatggagagaacacagccttcctgtgtgagcccagaaatggccacgccctgctggccttcatgttcagccggcaggagggcaagctgaaccggcagcagaccatggagctgggccaccacatcctgaaggcccacatcttcaagggcctgagcaagaagacaggcatcagcagcagccacctgcaggccctgtggattggctacagcacagagggcctgtctgctgccctggccagcctgaggaacctgtacacccccaacgtgaaggtgtcccggctgctgatcctgggcggggccaacgtgaactacagaacagaggtgctgaacaatgcccccatcctgtgtgtgcagagccacctgggccacgaggaggtggtgaccctgctgctggagtttggagcctgcctggatggcaccagtgaaaatggcatgacagccctgtgctatgctgctgctgctggccacatgaagctggtgtgcctgctgaccaagaagggcgtgcgggtggaccacctggacaagaagggccagtgtgccctggtgcacagcgccctgcggggccatggagacatcctgcagtacctgctgacctgtgagtggagccctggccccccccagcccggcaccctgaggaagagccacgccctgcagcaggccctgacagctgctgcctccatgggccacagctctgtggtgcagtgcctgctgggcatggagaaggagcacgaggtggaggtgaatggaacagacaccctgtggggcgagacagccctgacagctgctgctggccggggcaagctggaggtgtgtgagctgctgctgggccatggagctgctgtgtccaggaccaacagaagaggagtgcccccactcttctgtgccgcccggcagggccactggcagatcgtgcggctgctgctggagcggggctgtgatgtgaacctgagtgacaagcagggccgcacccccctgatggtggccgcctgtgagggccacctgagcacagtggagttcctgctgagcaaaggagctgccctgagcagcctggacaaggagggcctgagcgccctgtcctgggcctgcctgaagggccacagagctgtggtgcagtacctggtggaggagggcgccgccatcgaccagacagacaagaatggccgcacccccctggacctggccgccttctatggagatgctgagaccgtgctgtacctggtggagaagggagctgtgattgaacatgtggaccacagcggcatgaggcccctggaccgggccatcggctgcaggaacacctctgtggtggtggccctgctgaggaagggggccaagctgggcaatgctgcctgggccatggccaccagcaagccagacatcctgatcatcctgctgcagaagctgatggaggagggcaatgtgatgtacaagaagggcaagatgaaggaggccgcccagcgctaccagtatgccctgaggaagttcccccgggagggctttggagaggacatgaggcccttcaatgagctgcgggtgtccctgtacctgaacctgagccgctgcaggaggaagaccaatgactttggcatggccgaggagtttgccagcaaggccctggagctgaagcccaagagctatgaggccttctacgcccgggcccgggccaagaggaacagccggcagtttgtggccgccctggccgacctgcaggaggccgtgaagctgtgccccaccaaccaggaggtgaagaggctgctggcccgggtggaggaggagtgcaagcagctgcagaggagccagcagcagaagcagcagggccccctgcctgcccccctgaatgattctgaaaatgaggaggacacccccaccccaggcctgagtgaccacttccacagcgaggagacagaggaggaggagaccagcccccaggaggagagcgtgagccccacccccaggagccagcccagcagctctgtgcccagcagctacatccggaacctgcaggagggcctgcagagcaagggccggcctgtgagcccccagagccgggccggcatcggcaagagcctgcgggagcctgtggcccagcccggcctgctgctgcagcccagcaagcaggcccagatcgtgaagaccagccagcacctgggcagcggccagagcgctgtgagaaatggctccatgaaggtgcagatcagcagccagaaccccccacccagccccatgcctggaagaattgctgccaccccagctggcagcaggacccagcacctggagggcaccggcaccttcaccacccgggccggctgcggccactttggagaccggctgggccccagccagaatgtgcggctgcagtgtggagaaaatggacctgcccaccccctgcccagcaagaccaagaccacagagcggctgctgagccacagctctgtggccgtggatgctgccccacccaaccagggcggcctggccacctgcagtgatgtgcgccacccagccagcctgaccagcagcggcagcagcggcagccccagcagcagcatcaagatgagcagcagcaccagcagcctgaccagcagcagcagcttcagtgatggcttcaaggtgcagggccctgacacccgcatcaaggacaaggtggtgacccacgtgcagagcggcacagctgagcaccggcccaggaacacccccttcatgggcatcatggacaagacagcccgcttccagcagcagagcaacccccccagccgctcctggcactgcccagcccctgagggcctgctgaccaacaccagcagcgctgctggcctgcagagcgccaacacagagaagcccagcctgatgcaggtgggcggctacaacaaccaggccaagacctgcagcgtgtccaccctgagcgcctctgtgcacaacggggcccaggtgaaggagctggaggagagcaagtgccagatccctgtgcacagccaggagaaccgcatcaccaagacagtgagccacctgtaccaggagagcatcagcaagcagcagccccacatcagcaatgaggcccacaggagccacctgacagctgccaagcccaagaggagcttcatcgagagcaatgtgtag

SEQ ID NO: 300904 - DNA, 5268 bp, Artificial Sequence
  derived and/or modified sequence
atgctgaaggccgtgctgaagaagagccgggagggcggcaagggcggcaaaaaagaggctgggagcgacttcggccctgaaacctcccccgtgctgcacctggatcacagcgccgactcccccgtttccagcctgcctacagcagaggacacgtatcgcgtcagcctagccaaaggcgtcagcatgtccctgcccagctctcctctattgccccgacaaagccatttagtgcagtctcgcgtgaataagaaaagcccgggaccggtgcgaaagcccaagtacgtcgaatcacctcgagtaccaggcgatgctgtgattatgccatttcgagaggtagctaagcccacggagccagacgagcacgccaccatcacgtcctcaagcgagaatgacgatcgctccggatcgtcactggaatggaacaaggatggcaacttgagactgggggtccagaagggagtgctccatgacagaagggcagacaactgctccccggtagccgaggaggagacgactggctccgctgagagtaccttgcccaaagctgagtcaagtgctggcgatggcccagtgccctatagccagggatcgagtagcctgataatgccaagaccaaacagtgttgcggcgacaagtagtacaaagctggaagacctcagttaccttgatggacagcgcaacgcaccactgaggacgagcattagactcccctggcataacactgcaggaggcagagcccaagaagtgaaggcccgcttcgcaccgtataaaccacaggacatcctgctgaaaccgttgctgtttgaggtaccaagcattacaacggatagtgtattcgtcggccgtgattggcttttccatcagatcgaagaaaatctgcgcaacaccgaattggccgagaatcgaggagcggtggttgtggggaatgtgggcttcggaaaaaccgctataatctcaaagctggtggctcttagctgtcacggatctagaatgagacagattgcctctaacagtcctggcagttccccaaagacttcagacccgacacaagatctccattttactcccctcctcagcccatcttcttccacaagcgctagcagtactgctaaaacccccttagggagcatctcagcagagaaccagagaccgagggaagacgcagtgaagtacctggctagtaaagtcgtcgcctatcactactgtcaggccgataacacatatacttgcttggtgcccgagttcgttcactctatcgcagccttgctctgccggtcacatcagctggctgcatatagagatctcctaattaaagagccacaactgcagtcaatgctgagcttacggtcctgcgtacaggatcctgtggccgcctttaagcgaggggtccttgagcccctgacaaatctccgcaatgagcagaaaattcccgaagaggaatatattattctgattgatggcttaaacgaagcagagttccataaacctgactacggagacaccctttcatctttcattaccaaaatcatttccaagttccctgcatggctcaaacttatcgtgacagttagagccaactttcaggagatcataagtgctttgccatttgtcaaactctccttagatgactttcctgataataaagatatccatagcgatcttcacgcctacgtccagcaccgggtgcattctagccaggatatactgagcaacatctcccttaatggaaaagccgatgccacactgattgggaaggtgagttcacatctggtccttcgcagtttgggttcgtacttatacctcaaactgacccttgatctctttcagcggggccatcttgtcatcaagtccgcttcatataaggttgtccctgtctccctgtccgagctgtacctcctgcagtgcaatatgaagtttatgactcagtcagccttcgagcgggccctgccgatcctgaatgtagctctggccagcttgcaccccatgactgatgagcagatcttccaagccattaatgccgggcatatccaaggggagcaggggtgggaggactttcaacagcgtatggacgccctttcctgttttttaatcaaaagaagggacaagaccagaatgttctgtcacccatctttccgcgaatggttggtgtggagagccgatggcgagaacacagctttcctctgcgaacccaggaacggacacgcccttctcgccttcatgttctcaaggcaggaagggaaacttaatcggcagcaaactatggaactcggccaccacattcttaaagctcacatctttaaaggcctgagcaaaaagaccggcatctcctcatcccacctccaagccctgtggataggttacagcacagagggtctgagcgctgcccttgcctcgctgagaaatctgtacacccccaacgtgaaggttagccggctcctgatcctgggcggtgctaatgttaactatagaaccgaggtgctgaacaacgcgcccattctgtgcgtgcagagccacctggggcacgaggaggtcgtaactctcttgctggagtttggcgcctgcctggacgggacatcagaaaacggcatgaccgccctttgctatgccgctgccgccggacatatgaagctcgtttgcctgctgactaagaagggagtcagggtggatcatcttgacaagaagggtcagtgtgctttggtgcactcggccctgagaggacacggggacattctgcagtatctccttacgtgtgagtggtcccccggccccccccagcccggtacccttaggaaatcccacgctcttcagcaagcactgacagccgctgcctctatggggcattcctccgtcgtccagtgtttgctggggatggagaaggagcatgaagtggaagtgaacggaacagataccctgtggggcgagactgcactgacagcggccgcagggaggggaaagctggaggtgtgcgaacttctgttgggccatggggctgccgtctccaggacaaataggagaggcgtccccccccttttttgcgccgccaggcaaggccattggcagatcgtgcgcctgctgctagagagaggctgcgatgtgaacctatcggacaagcagggaagaacaccccttatggttgcagcctgcgagggacacctgtctaccgttgagttcctcctctccaaaggtgccgcattgagcagtctcgacaaagaggggctgagtgctctgtcgtgggcctgtctcaaaggccacagggctgtggttcaatatctggtcgaagagggcgccgccattgaccaaacagataagaatggacggactcctctggatctggctgctttttatggtgatgcggagacagtcctgtacctggttgaaaaaggcgctgttatagaacacgtggatcactccggaatgagaccattagatcgagcaatcgggtgtcggaatactagcgtggtggtggccctgctgcgcaaaggagcaaagctgggcaatgctgcttgggctatggccaccagcaagccggacattctaataattttactgcagaagttgatggaggaaggcaacgtgatgtataaaaaaggtaaaatgaaggaagccgcacagcgctaccagtatgccctcagaaagttcccacgggagggctttggagaggatatgcgcccattcaatgaactcagagttagtctttacctcaacctgagccggtgtcggcgcaagacgaatgatttcggaatggccgaagagtttgcctcaaaagcactcgaacttaaaccgaagagttacgaggctttctacgccagggctagagccaaacgtaacagccggcagttcgtggccgctctcgcagacctgcaggaggctgttaagctgtgtcccacgaatcaggaggttaagcgtctcctcgctagagtcgaagaggagtgtaagcagctgcagcgtagtcaacagcagaaacagcaaggacccttacccgctccgctgaacgactccgaaaacgaagaggacacaccgaccccgggactgtcagaccattttcatagcgaggagaccgaggaagaggaaacatccccgcaggaagagagtgtcagtcctacccctcggagccagccgtcgtcctccgtgccatcgtcttacatccgcaacctccaggaaggcttgcaatccaaggggcggccagtgtcgccccagagtagagccggcatcggaaaaagcctcagagagcccgtggcccaaccaggccttttgcttcaaccctccaagcaggcccagatcgtgaagacatctcagcacctcggcagcgggcaatcggccgtcagaaacggcagcatgaaggttcagatctccagtcagaaccctcccccaagcccaatgccggggagaatcgcagcaacccctgctggtagccgcacccagcacctggaagggaccggaactttcacaacccgggctggttgcggtcatttcggggatagactgggcccctcccagaatgtaaggttgcagtgtggcgaaaatggaccggcacaccccctgcctagtaagactaagaccactgagcggctgttgtcacattctagcgtggccgtggacgctgcccctcctaatcagggaggtctggccacctgcagtgacgtgagacatcctgcctctcttacttcttccggaagtagcggtagcccgagtagtagcatcaagatgagctccagcacctcttctctcaccagttctagttcgttttcagatgggttcaaagtgcagggacccgacacacgcataaaggacaaggtggtcacccacgtgcagtctggcacagctgaacatcgtccccgtaacacgccattcatgggtattatggataagacggcaaggttccaacaacagtccaatccgccttcacggtcgtggcactgccctgccccagaaggactgctgaccaatacctcttcagctgccggactgcaatcggccaataccgaaaaacctagcctaatgcaagtcggaggctacaacaaccaggccaagacatgctctgtttccacgctgtctgcatccgtacacaatggcgcccaagtcaaagagctggaagagagtaagtgccagattcctgtccatagccaggagaatagaattaccaagaccgtgtctcacttgtaccaggagagcattagcaagcagcaaccgcacatatcaaatgaggcacataggagtcacctcactgctgccaaaccaaaacgatcttttattgaatcaaatgtctag

SEQ ID NO: 300905 - DNA, 5267 bp, Artificial Sequence
  derived and/or modified sequence
atgctgaaggccgttttgaagaaatcgcgagaggggggaaagggaggcaaaaaggaggcgggatccgacttcggcccagagacgagtccagtcctgcatcttgaccattctgctgattccccggtgtcttctctgcctacggccgaagacacatacagggtctcactggcaaagggcgtaagcatgagcctcccatcctctccactcctgcccagacagagccaccttgtccagagccgggtgaacaagaagtctcccggtcctgtgcggaagcctaagtatgtggagtctcccagagtgcccggagatgcagtgatcatgccttttagagaagttgcgaagcccactgagccagatgagcacgccactatcacttcttcctcggagaacgacgacaggtccggaagcagtctggagtggaataaagacggaaatctgcggttgggcgtgcagaaaggcgtcctccacgaccgacgtgctgacaattgttctccagtggcagaagaggaaacaactggttccgccgaatccaccctgccaaaggcagaatcctctgctggggacggcccagtaccttactcacagggatcctctagtcttatcatgccacgtcctaacagtgtcgcagctacaagctcaacgaaactcgaagacctctcttatctggacggtcagcgtaacgcccctctccggacaagcattaggctcccttggcataatacagctggtggcagagcgcaggaagtaaaagccaggtttgccccatacaaaccacaagatatactcctgaaacctctgctgtttgaggttccttccatcacaacggactcagtgtttgttgggagagactggctatttcatcagatcgaggagaacctgagaaatacagaactcgccgaaaatcgtggcgctgttgtggtcggaaatgtaggattcggaaagactgctattatttccaagctggtagctttgtcgtgtcatggttcccggatgaggcagattgcgtcaaatagccctggtagctctcccaagaccagcgacccgacacaggacctgcactttacacccctgctgagtcccagttctagtaccagcgctagcagcaccgctaaaactcctcttgggtccatctccgcggagaatcagagaccgagagaggacgcagtgaagtatctggcctctaaagtcgtggcctaccattattgccaggctgacaacacttacacctgtctggtgcccgagttcgtccacagcattgccgcactactttgcaggagccaccagcttgctgcctacagagatctcttgataaaggagccccagctccaatccatgctgtcacttcgctcatgcgtacaagatccagtcgccgcattcaaacggggagtgctcgaacctttgacaaatctgcggaatgaacagaaaatacctgaggaagaatatataatcctcatcgacgggctcaatgaggctgaattccataaacccgactacggcgataccctgagctccttcattactaaaataatatccaagtttcccgcttggttaaaacttatcgttacggtgcgggctaactttcaggagataatttccgcactgcctttcgtgaagctgtcacttgacgactttcccgataacaaagacatccacagtgatttgcatgcatacgttcagcacagggtgcacagctctcaggacatattgagtaatattagcctgaatggcaaagctgatgccacgttgatcggcaaggttagttcacacctggtgctgcgcagcctgggttcttatttgtacctcaaactcacactggacttgttccagcgtggccacttggtgattaagtcagcctcttacaaagttgttccagtgagcctgtccgagctgtacctgttacagtgcaatatgaagttcatgactcaatccgcctttgagcgggcacttcctattctgaatgttgctttggctagcctgcaccctatgaccgacgagcaaatcttccaagccatcaatgccggtcatatacagggcgaacagggatgggaggattttcagcagcgaatggacgctttgtcttgctttctgattaagcgcagggataaaactcggatgttttgccacccatcctttagagaatggttagtatggcgggctgatggggaaaatacagccttcctctgtgaacccagaaatggccatgccctcctagcttttatgtttagtcgccaggaaggcaaactcaataggcagcagacgatggaattgggacatcacatccttaaggctcacatatttaaagggctgagtaagaagaccgggatttcatcctcacacctgcaggccctgtggatcggctacagtacggaaggactcagtgccgcactggcttcgttgcgcaacctctacaccccaaatgtcaaggtgtcccggctgctcatcctgggaggtgccaacgttaattacagaacagaggtactgaacaatgcaccaatcctgtgtgtgcagtcccatttgggacacgaggaggtggtgaccctgctgctggagtttggcgcatgcctggacgggacttcggagaatggcatgaccgcgttatgctacgctgcagccgcagggcatatgaaactcgtctgtctgctaaccaagaaaggcgtaagggtagatcatctcgacaaaaagggtcagtgcgccctcgtccattcagcacttaggggtcacggagacatcctacagtacctcttaacctgtgagtggagtccaggtcctccccagcctggcactctgcgcaaaagccatgcgctccagcaggcacttacagccgctgctagtatggggcactcaagcgtggtgcagtgtcttcttggcatggaaaaggaacatgaagtagaagtgaatggcacagacaccctgtggggagagacggccttgactgccgcagcaggccgaggcaaactcgaggtgtgtgaattgctcctgggacacggcgctgccgtgtcaagaacaaataggaggggggtgccgcctttattctgcgctgcacggcaaggacattggcagattgttcggctcttgttggaacggggatgtgacgtgaacctctccgataaacagggtcggacacctctcatggttgccgcttgcgaaggacacctgtctaccgttgaattcctcctcagtaaaggggcagccctcagtagtctggacaaggaggggttgagcgccctgagctgggcttgcttgaaggggcacagagcagttgttcagtacttggttgaagaaggcgctgcaatcgaccaaactgacaagaatggacgtacacccctggatcttgccgctttttacggggatgccgaaactgtcctctacctggttgaaaagggagcggtaatcgaacatgttgatcactcgggaatgaggcccctcgacagagccattggctgtagaaacacttctgtggtagtggcccttctgagaaagggtgctaagttgggcaatgccgcatgggccatggccacctccaagccagacatccttataatcctcctgcaaaaactgatggaagagggcaacgtcatgtacaagaaaggtaaaatgaaagaagccgcacaacgctatcagtatgccctccgcaaattccctcgcgaggggtttggggaagacatgcggccattcaatgaactgcgcgtgtcactgtatctcaatctgtctcgatgcaggagaaagactaacgactttggaatggctgaggagttcgcatccaaggctttggagttaaagccaaaaagctacgaggctttttacgctcgagccagagccaagcgaaacagcagacaatttgtcgcggctctggcagatctccaggaggcagtgaagttatgtcccacaaaccaggaggtcaaacgtttgctcgcaagagtcgaggaagagtgcaagcagctgcagcggtctcaacagcaaaagcagcagggtccactcccagccccattgaacgatagtgaaaacgaggaagacacacccacacctgggttaagcgaccactttcactctgaggaaactgaggaagaagagacctctccacaagaagagtctgtgagccccacccctcgctctcagccgtcctcttcagtacctagcagctatattagaaacctccaggagggattacagtctaaaggcagacctgtttctcctcagtcacgcgcaggaattggcaaatctctgcgcgagccagtggcccagcccggattgctgcttcaaccttcgaagcaggcacagatcgtgaagaccagccagcatctgggatccgggcagtccgctgtaagaaatgggagcatgaaggtgcaaattagtagccaaaatcctccaccatcaccaatgccgggaagaatcgccgcaacacccgctggcagccgaacccagcatttagagggaaccggcacctttaccaccagggccggatgcgggcacttcggtgaccggttaggcccttcccagaacgtgcggctccagtgtggggagaatggaccggctcaccctctcccgagcaagaccaagaccactgagcggctactctcacattcgtctgtggctgtggatgcagccccacccaaccaggggggactagccacttgctcagacgtccgtcatcccgcatccctcacttcgtctgggagctcagggtcaccttccagttccatcaagatgtcatcaagtaccagcagccttacaagctcgtcatccttcagtgatggctttaaggtccagggacccgatacacgcattaaggataaggtcgtaacacatgtccaaagcggaacggcggaacataggcccagaaacacgccctttatgggcataatggacaagacagccaggttccagcagcagtctaaccctccttctcggagctggcactgccccgcacccgaaggattgctaaccaatacttcatctgctgccggattacagtccgccaatactgaaaagccgagtttaatgcaggtggggggatacaacaaccaggcgaagacctgctctgtgagcacactcagcgcttcggtccataacggggctcaggtcaaagagctggaggaaagcaagtgtcaaattccagtccactcacaggaaaaccgtattactaagactgtgtcacacctctaccaggaatccatctctaagcagcagccgcatatcagtaatgaagctcatcggtcccacctgacagccgctaagcccaaaaggagcttcattgaaagtaatgtcta

SEQ ID NO: 300906 - DNA, 7185 bp, Artificial Sequence
  derived and/or modified sequence
agcggaggctttgctgtggcagctgctggagcggcggccgcctcgggagccggaggagaggcagccgcggagcgccgagctggcctcgccccgaggcccggccctgggtgtggggaaccgcgctgaggagctggaaactttcccggcaggagctgactgctgggcaggaacgtctctcaggagaaagagtggaagagaaaattgtgaactaaggccccctgcccccttttcctggtgcatgtgaagttatcaaaaacagaaacaagtgttgaaaatgttaaaggctgtgctgaagaagagccgagagggaggaaagggaggcaagaaggaagcaggaagtgactttggtccagagacttctccagtcctgcaccttgaccacagtgctgactctcctgtgagcagtcttcccacagcagaggacacctatagggtgagcttggccaaaggtgtctcgatgtctctgccttcctcacctttgctgcctcgacagtctcacttggtgcaatcaagagtgaacaaaaaatccccaggtcccgtcaggaagcccaagtatgtggaaagccccagagtgcctggagatgcagttataatgccattcagagaagtagccaagccaacagagcctgatgagcatgccacaattacaagttcatccgaaaatgatgaccggagtggctccagtttggaatggaataaagatggaaacctaagattaggggttcagaagggagtgcttcatgaccgcagggcagataactgctccccagtggcagaagaggagaccaccgggtcagcagagagcacgctgcccaaagcagaatcctcagctggagatggtccagtcccttattctcagggctccagctcactaataatgccacggcccaactcagttgcagcaacaagctcaaccaaattggaagatctgagttatttagacgggcagagaaatgctcctctacggacgtcaattagattaccatggcacaatacggccggaggtagggcacaggaagttaaagcacgatttgctccctacaagccacaagacattttgttgaaacccttgttgtttgaagtaccaagcataacaacagactctgtgtttgtgggaagggattggctctttcaccagatagaagaaaacttgaggaacacagaactggcagaaaacagaggcgcggtggtggttggcaatgtgggatttgggaagacggcaatcatttccaagttggtggccctgagctgccacggaagccgcatgaggcagattgcttccaacagcccgggttcatcacctaaaacctctgaccccactcaggatcttcatttcactccgttgctttcaccgagttcttccacaagtgcttccagcacagctaaaacacctcttgggtctatcagtgctgaaaaccagagaccaagagaggatgcagtgaaatatcttgcttctaaggtggtggcctaccactactgccaggctgacaacacgtacacttgcctggtgcccgagtttgtgcacagcatcgcagctttgctctgccggtcccatcagctggccgcctacagagaccttctgataaaggagccccaactacagagcatgctgagcctccgatcctgtgtgcaggacccggtggcagctttcaagaggggagtgctggagccactcacaaacctgagaaatgagcagaaaattcctgaagaagaatacattattttgatagatggcttaaatgaagctgagtttcataaacctgattatggagatacgctttcttcatttattaccaaaattatttctaaatttcctgcctggttgaagttgattgtgactgtaagagcaaattttcaggaaatcataagtgcgctgccatttgtcaagctttccttagatgacttcccagacaacaaagacatccacagtgacctgcacgcctacgtccagcacagggtgcacagcagccaggacatcctcagcaacatctccctgaatggcaaggccgatgccacactcattggaaaagtgagcagccacctggtgctgcggagcctcggctcctacctgtacctcaagctcaccctggaccttttccagaggggccacttggtcattaagagtgccagctacaaggtggtgcccgtgtctctctctgagctctatttgcttcagtgcaacatgaagttcatgacccagtccgcctttgagagggcacttccgattctcaacgtggccctcgcatccctccaccccatgacagacgagcagatctttcaggctattaatgctggccacatccagggggagcagggatgggaagactttcagcagaggatggacgccctctcctgcttcctcattaagaggcgagacaaaacccgcatgttctgccacccgtccttcagggagtggcttgtatggagagcagacggggaaaacacggccttcctgtgtgagcccaggaacgggcacgcgctcttggcattcatgttctcgcgtcaggagggcaagttgaaccgccagcagaccatggagcttggccaccacatcctgaaggcgcacattttcaagggcctcagtaagaagacgggaatttcttcaagccatctccaagccctgtggatcggctacagcaccgaggggctgtccgccgccctggcctctctcaggaatctctatactcccaacgtgaaggtgagccgtctcctgattttgggaggggccaacgtgaactacaggacagaagtgttaaataatgccccaatcctgtgcgtccagtctcaccttggccacgaggaagttgtcactctgctcctggaatttggtgcctgcctggacggaacgtcagagaacggcatgactgccctctgttacgcagcagctgctggccacatgaagctggtgtgtctgctgaccaagaagggagtgagagtggaccacttggataagaagggccagtgtgcgcttgtccacagtgccctacggggccacggtgacattctccagtacctgctgacttgtgagtggtcgccgggtcctccccagccaggcaccctgaggaagagccacgccctgcagcaggcgctgaccgcggcggccagcatgggccacagctcggtggtccagtgcttgctggggatggagaaggaacatgaagtagaagtcaatggcaccgacacattgtggggagaaacagccctgactgccgccgcaggaagagggaagctggaggtctgtgagctgctgctggggcatggagctgctgtgtcgcggacaaacaggagaggggttccacctttgttttgtgcagcacgccaggggcattggcagattgttagactgctgttggaacgcggctgtgatgtgaacctaagtgacaagcaaggccggacgcccctcatggtggctgcttgtgaagggcacttgagcaccgtggaattcctcctttcaaaaggtgcagccctttcttctctagacaaagagggtctgtcagcattaagctgggcttgtctgaaaggtcacagggcagtggtccagtatctggttgaagaaggagctgcaatagaccagacagacaagaatggccgcacacccttggacctggctgccttctatggcgatgccgagactgtgctgtacctggtggagaagggagccgtgatcgagcatgtggaccacagcgggatgcggcccttggacagagccatcggctgccggaacacatctgtagtggtggcgctactcagaaagggagccaagttaggaaatgctgcttgggcgatggccacttccaaacctgatatcttgattatacttttacagaaattaatggaggaaggaaatgtgatgtacaaaaaagggaaaatgaaagaggcagcccagaggtaccagtatgccttaagaaagtttcctcgagaaggattcggagaggacatgagacccttcaatgaattaagggtttccctctatctcaatttgtcgcgatgccgaagaaaaacaaatgactttggcatggcagaggaatttgcttccaaggctctcgaattgaagcccaagtcctatgaagccttttatgccagagcaagagcgaagagaaatagcaggcaattcgtggcagctctggctgacctgcaagaggctgtgaaactctgtcccaccaatcaggaagtcaagaggcttctggcccgcgtagaagaggagtgcaaacaactccagaggagtcaacagcaaaaacagcagggcccgctaccagctccactcaacgactccgagaacgaagaggacaccccaacccctggcttaagtgaccactttcactctgaggagactgaagaggaagaaacttctccccaggaagaatctgtttccccaactcccaggtcccagccatcctcatctgtcccttcctcatacatccgaaaccttcaagaagggttacagtccaaaggaaggccggtatcgccacagagcagggcaggaatcggcaagtccctgagagagcctgtggcccagccagggctgctcctgcagccctccaagcaggcccagatcgtgaaaaccagccagcacctgggctctggccagtcggcagtgagaaatggcagtatgaaagttcagatctcttctcagaaccctcctccaagtcccatgccagggagaatcgctgccactcctgctgggagcagaacccagcatttagagggaacaggtactttcactacaagagctggttgtggccactttggggatcggctgggccccagccagaatgtccgcctgcagtgtggtgagaatggccctgcacaccctttaccaagtaagacgaaaaccacagagaggcttctgtctcattcctccgtggctgtggacgcagcccctccaaaccaaggtgggctggcgacctgcagcgacgtgcgacacccagcttccctcaccagctcaggctcttctggttctccatccagcagcataaagatgtcaagttcaaccagtagtttgacttcgagcagcagtttttcagatggcttcaaggtccaaggaccagatactagaattaaagacaaggttgtaacccacgttcagagcggtacagctgagcacagaccccgcaacacgccgttcatgggcatcatggataagactgcgaggttccaacagcagagcaatcctccaagccgcagctggcactgtccggcaccagaggggctgctgacaaacacgtcttctgcagctggcctgcagtctgctaacactgagaagccctctctcatgcaagtgggaggatataataaccaagccaaaacctgttctgtttctaccctgagtgcaagtgtccacaatggggcacaagtgaaggagctagaagaaagcaagtgccaaattccagtccactctcaagagaacaggataactaagactgtttctcatctgtaccaggaaagtatctccaaacagcagcctcatattagtaatgaagcccacaggagccacctcactgcagccaaaccaaagcgatcatttatagagtcaaatgtgtgaaccttaagaaatccccatttgtggaatttggaaacgtgtgttgactcctggtggtaaattaaatagtttttttcatcagaaaaattattttttagccattttttttctttggggtggatctgatgccattgatatatctaaaatgtgggataaaacttctttaatagctagaaatcaccataaataagaatgctaaacagaattgaaaattatatcaacttaaaattttaagacagcccagaagacattaatgactctcacttatgaaattgtttggcttttgccactttcttccttgcctttgctatatggtagaatcacagaacttacttagagaataaatatgtctattgttcaagagtaacaggtttaactcatgaccaagtgatgtacatccaagtgatgtattctggaaacgatggaattttacagttacagttccattgagtcaaatcccattttatatatacataaaaattaagttctgagtgagttctagctaaatataagtgcgactgtaaacgcagccaatttttttaagcagaatatgagaacacctaagtattctcttcatagcagttcctataaagggattaaacacttatttctgtgttatggttcttattcatatatttttatagcacttttggaacctatatttgtgcttgaaggtgtttttgatatttggaaacagtataagccatttggagtcatgattggtggtcaagtggattcaagctaaaatactaagaccagcattcttagtggcgcttataaattagctctcacctggtttccaaactgcttttaacaatggtagtgctcctggaacaatccttccaagctcctctaaggacaatatttaattcagatactaaaggtaagactggttgttacttttgttttgttgtacaattagtactttatagtcacatgttgtatatattaaatagcccagttttattcagacttgtaaatagaactatttcaatgtagttaatctaaaaacaaaaaagaaaaccccagtcacgatttgcatgttctctgtaagcttcatccatgctggttattgcactgaatgatatattattagggcatgttaacagtataccagtaacagcactttatctcatttatatgaacacctttgaggtgctacttaagtccaagctctgatgtattattcatttgtaaagataaggtacaggaatgaaccttggtttaaaggtatttttatatgaaaatggtgtgttattggaagatgttaaaatgctaatttgagagaagtaggagtgtatctgttttatatgttgggatgtgaaatttattttctaaaattgaggagaaggaagttatatatttgcagaatgttttaaagtgaattgttgtaatgaagttcctgtgaacatcattatggttttgtacaaataggaacctctgatgtcattcttcaacgtttgttcctgtgtgtacaattgtactttgtatgaacagctttatcatttttataggctttccatgagttttgctgtaactactatggcttatttattttctttaatatttgtgaaagtcttactcctttgttagttttgtttctgcacaactactgtacttttccatatggaataaagactattaat

SEQ ID NO: 300907 - DNA, 1716 bp, Artificial Sequence
  derived and/or modified sequence
atggagaacgtaaaggagatttttgggcagacaattattcaccaccatataccatttaattgggattgcgagttcatccgactacatttcggtcacaacagaaaaaagcacctcaattacacagaatttacccaatttctgcaggaactacagttggagcatgcaagacaggcctttgccctgaaggacaagtctaagagcggaatgatcagcgggcttgatttttcagatattatggtcacaatcagatcccatatgttgacccccttcgtcgaagagaaccttgttagcgcagccgggggatcaatttcccatcaggtttctttctcttactttaatgctttcaattcgctcctcaataatatggaattggtgcggaagatctatagcactcttgccggcacccgcaaagacgttgaggtcacaaaagaggagtttgcacagtccgctatccgttacggccaggtgacacctctagaaattgacattctataccagctcgcggacctgtataatgcttccggcagactgacactggctgacattgagcgaattgcccctctggcagagggtgcgttaccttataatctagccgagcttcaacgacagcaatcccccgggcttggacggcccatctggttgcagattgccgagagcgcatatagattcaccctcggctctgtggccggcgctgtgggcgccactgccgtctatccaattgaccttgtcaagacccgtatgcagaatcaaaggggatcaggttcagtggtgggagagctgatgtacaagaacagctttgattgcttcaaaaaggttttgcgctacgaggggttcttcggtctgtaccgtggccttataccccagctgatcggggtggccccagaaaaagccatcaagctgactgtcaatgattttgtgcgtgacaagttcacaaggcgggacggttcagttccgctccctgccgaggtcctggcagggggttgcgcggggggtagccaggtgattttcactaatcccctcgagatcgtgaaaatccggctgcaagtggccggtgagattaccacaggacctcgggtgagcgcccttaatgtgctgagggatctgggtatctttggactgtacaagggtgctaaggcatgttttctgagagacatccccttttcagccatttactttcccgtgtatgcacactgcaaacttcttctggcagatgaaaacggccacgtggggggcttgaacctgctcgccgccggcgccatggccggagttccagctgcctccctggtgaccccggctgacgtcatcaagaccaggctgcaggttgctgccagagcgggacagacaacatactctggagtcatcgactgctttaggaaaattcttagggaggaaggaccctctgcattttggaagggcaccgctgcccgagtttttcgctcaagcccccagttcggcgtgactctggtcacgtatgagttactacagaggtggttctacatcgacttcggtggcttgaagcctgcgggttcagagcctacccctaagtctcgaatcgcagatttgcctccagcgaatccagaccatattggtggctatcggcttgctacagctacattcgctggaatcgaaaataagtttgggctgtatctacccaagtttaaaagtccatcggtggccgtggtgcaaccaaaggcagcagttgcagccactcagtag

SEQ ID NO: 300908 - DNA, 1716 bp, Artificial Sequence
  derived and/or modified sequence
atggagaatgtgaaggagatcttcggccagaccatcatccaccaccacatccccttcaactgggactgtgagttcatccggctgcacttcggccacaacaggaagaagcacctgaactacacagagttcacccagttcctgcaggagctgcagctggagcacgcccggcaggcctttgccctgaaggacaagagcaagagcggcatgatcagcggcctggacttcagtgacatcatggtgaccatccgcagccacatgctgaccccatttgtggaggagaacctggtgtctgctgctgggggcagcatcagccaccaggtgtccttctcctacttcaatgccttcaacagcctgctgaacaacatggagctggtgaggaagatctacagcaccctggccggcaccaggaaggatgtggaggtgaccaaggaggagtttgcccagagcgccatccgctatggccaggtgacccccctggagattgacatcctgtaccagctggccgacctgtacaatgccagcggccgcctgaccctggccgacatcgagagaattgcccccctggccgagggcgccctgccctacaacctggccgagctgcagaggcagcagagccctggcctgggccggcccatctggctgcagattgctgagagcgcctaccgcttcaccctgggctctgtggccggggctgtgggcgccacagctgtgtaccccatcgacctggtgaagaccaggatgcagaaccagaggggcagcggctctgtggtgggggagctgatgtacaagaacagctttgactgcttcaagaaggtgctgcgctatgagggcttcttcggcctgtaccggggcctcatcccccagctgattggagtggcccctgagaaggccatcaagctgactgtgaatgactttgtgcgggacaagttcaccaggagagatggctctgtgcccctgcctgctgaggtgctggccggcggctgtgccggcggcagccaggtgatcttcaccaaccccctggagatcgtgaagatccggctgcaggtggccggggagatcaccaccggcccccgggtgtctgccctgaatgtgctgcgggacctgggcatcttcggcctgtacaagggggccaaggcctgcttcctgcgggacatccccttcagcgccatctacttccctgtgtatgcccactgcaagctgctgctggctgatgaaaatggccacgtgggcggcctgaacctgctggccgccggggccatggccggcgtgcctgctgccagcctggtgaccccagcagatgtgatcaagacccggctgcaggtggccgcccgggccggccagaccacctacagcggggtcatcgactgcttcaggaagatcctgcgggaggagggccccagcgccttctggaagggcacagctgcccgggtcttccgcagcagcccccagtttggagtgaccctggtgacctatgagctgctgcagcgctggttctacatcgactttggaggcctgaagccagctggcagcgagcccacccccaagagcagaattgctgacctgcccccagccaacccagaccacatcggcggctaccgcctggccacagccacctttgctggcatcgagaacaagtttggcctgtacctgcccaagttcaagagccccagcgtggccgtggtgcagcccaaggctgctgtggccgccacccagtag

SEQ ID NO: 300909 - DNA, 1716 bp, Artificial Sequence
  derived and/or modified sequence
atggagaacgtgaaggagatcttcggccagaccatcatccaccaccatatccctttcaactgggattgcgaatttatccgattgcactttggacacaacagaaagaagcatttgaattataccgagtttacacaatttctgcaggaattgcagctggagcatgcccgccaagcctttgcacttaaagacaagtctaagtccggtatgatctcaggcttggacttcagtgatattatggtcacaataagaagtcacatgctgactcccttcgtcgaggagaatttggtgtcagccgccggggggtctatcagtcatcaagtttccttctcgtatttcaacgcttttaactctctgctcaacaatatggaactggtgagaaagatctatagtaccttggcagggacaagaaaggacgtcgaagtcacaaaagaggaatttgctcaaagcgcgatccggtatgggcaggtgactcctctggagatagacattctctaccagctagcagacctctacaatgcatctggacgactgaccttggctgatatcgagcgaatcgccccactggcggaaggcgccctgccatacaacctcgccgagctccaacgccaacaatctcccggcctaggccggcctatctggctgcagatcgctgaaagtgcctaccgtttcactcttggcagcgttgcgggcgccgtaggggccacagccgtgtacccaatagatttggtgaaaacaaggatgcagaatcaaaggggcagcggaagtgtcgtgggtgaactcatgtacaagaattcttttgactgcttcaaaaaagtgctgcgctatgaagggtttttcggattgtatcgcgggttgatcccacagctgattggcgtggcccctgagaaagcaattaaactgaccgtgaacgactttgtacgagataaatttacccgaagagacggctccgtgccattacccgcagaagttctggccggtggatgcgcggggggcagtcaggttattttcactaatcctctcgaaatcgtcaagatacggctgcaggtagctggggagatcacgacagggcctcgcgtctcggctctgaatgtacttcgagacctgggtatcttcggtctctataagggggctaaagcctgctttctacgcgatatccctttttctgccatctactttcccgtctacgcccactgtaagcttctcctagcagacgagaacggccatgttggcggattaaacctcctagctgcgggggctatggcaggcgtcccggctgcctcgctggtgaccccggcggatgttataaagacaaggctccaggttgcagctagggctgggcagactacgtacagcggcgttatagattgcttcagaaaaattttgagggaggagggtccctcggctttctggaagggtactgccgcgagggtgttcaggagctccccccagttcggtgtcactttagtgacgtatgaactgctgcagcgctggttctatatagattttggtggactgaaacccgcaggctccgagcccacccctaaaagccggatcgcagacctgccgcccgcgaacccggatcatatcggtgggtacagattagcaacagccacctttgctggaatcgaaaacaaattcgggctttacttacccaagttcaagtcacccagcgttgccgttgtgcagccaaaggcagctgttgcagccactcagtag

SEQ ID NO: 300910 - DNA, 1716 bp, Artificial Sequence
  derived and/or modified sequence
atggaaaacgttaaggaaatctttggccagaccattattcatcatcatatcccattcaattgggactgtgagtttataaggcttcacttcggtcacaataggaagaaacacctaaactacacagagttcacacaattcctgcaagagctgcagctggaacacgctcgtcaggcattcgctctcaaggataaatccaaatcagggatgatttcgggactggattttagcgacattatggtcaccataaggagccacatgctcaccccatttgtcgaggagaacctggttagcgctgccggaggcagtatttcacatcaggtcagcttcagctacttcaacgcctttaattccctgctgaacaatatggagctggttaggaaaatttacagtactctcgccggtacacggaaggatgtggaagtgaccaaagaagaatttgcccagtctgccataaggtacgggcaggtgacccctctagaaatcgacatcctctaccaactggcggatctatacaacgccagtggtagacttactctggccgatatcgagagaatcgcccctttagcggaaggagcgctcccatacaatctagcagaacttcagcggcagcagagccctggcctgggcagacctatttggctccagattgctgagtccgcttacagatttactctgggaagtgtagctggagccgtgggcgcaacagcagtctacccgatagacctggtcaaaacaagaatgcaaaaccaaaggggtagcggttcagtggtcggagaattgatgtacaaaaatagttttgactgctttaagaaggtgctccgctacgagggattttttggcctctatagggggttaatcccccagctcatcggtgtggctccagagaaagccataaagcttacagttaacgactttgtgcgagacaagttcacccggagggacggttccgttccactccccgcagaagtgctcgcaggcggttgtgccggagggtcccaggtgatcttcaccaaccccctggaaatcgtaaagatccggcttcaagttgcaggagagattaccacaggaccacgcgtttctgcactaaacgtcctgagggatttaggaatcttcggtctgtacaaaggtgcaaaagcctgctttcttcgcgacatcccgttctccgccatctactttcctgtctatgcccattgtaagctgctgctcgcagacgaaaatggccacgtggggggtctcaatttgctggccgctggagctatggctggagtaccagccgctagtctcgttacccctgccgacgtgatcaaaacccgcctgcaggttgctgcacgcgcaggccagacgacatatagcggcgtcattgactgctttagaaaaatcctccgggaagaagggccatccgcattttggaaaggcacagccgctcgggtgttcaggtctagtcctcagttcggggtgacactggttacttacgagttgttgcagcgctggttctatattgacttcggtggactgaagcccgcaggctctgaaccaaccccaaaatcccggatcgccgatctccccccagcgaatcccgaccacatcgggggttaccgtttagctactgctacgtttgcaggcatcgagaataagtttggactgtacctgcccaagttcaagtcgccaagcgttgccgtggtgcaaccgaaggccgctgtggccgcaactcagtag

SEQ ID NO: 300911 - DNA, 2429 bp, Artificial Sequence
  derived and/or modified sequence
gagcacagcatggcggtcaaggtgcagacaactaagcgaggggatcctcatgagttaagaaacatatttctacagtatgccagtactgaggttgatggagagcgttatatgaccccagaagactttgttcagcgctatcttggactgtataatgatccaaatagtaacccaaagatcgtgcagctcttggcaggagtagctgatcaaaccaaggatggaaaatgtcaaagaaatttttggacagactattattcatcatcatatcccttttaactgggattgtgaatttatccgactgcattttgggcataaccggaagaagcatcttaactacacagaattcacgcagtttctccaggagctgcaattggaacatgcaagacaagcctttgcactcaaagacaaaagcaaaagtggcatgatttctggtctggatttcagtgacatcatggttaccattagatctcacatgcttactccttttgtggaggagaacttagtttcagcagctggaggaagtatctcacaccaggttagcttctcctacttcaatgcatttaactcgttactgaataacatggagcttgttcgtaagatatatagcactctagctggcacaaggaaagatgttgaagtcacaaaggaggaatttgcccagagtgccatacgctatggacaagtcacaccactagaaattgatattctatatcagcttgcagacttatataatgcttcagggcgcttgactttggcagatattgagagaatagccccattggctgagggggccttaccttacaacctggcagaacttcagagacagcagtctcctgggttaggcaggcctatctggctccagattgccgagtctgcttacagattcactctgggctcagttgctggagctgtgggagccactgcagtgtatcctatagatctggtgaagacccgaatgcaaaaccagcgtggctctggctctgttgttggggagctaatgtacaaaaacagctttgactgttttaagaaagtcttgcgttatgagggcttctttggactctacaggggtctgataccacaacttataggggttgctccagaaaaggccattaaactgactgttaatgattttgttcgggacaaatttaccagaagagatggctctgttccacttccagcagaagttcttgctggaggctgtgctggaggctctcaggtcatttttaccaacccattggagatagtgaagattcgtctgcaagtagctggagagatcaccacgggacccagagtcagcgccctgaatgtgctccgggacttgggaatttttggtctgtataagggtgccaaagcgtgtttcctccgagacattcccttctctgcaatctattttcctgtttatgctcattgcaaactacttctggctgatgaaaatggacacgtgggaggtttaaatcttcttgcagctggagccatggcaggtgtcccagctgcatctctggtgacccctgctgatgtcatcaagacaagactgcaggtggctgcccgcgctggccagacgacatacagtggtgtcatcgactgtttcaggaagattctccgggaagaagggccctcagcattttggaaagggactgcagctcgagtgtttcgatcctctccccagtttggtgttaccttggtcacttatgaacttctccagcggtggttttacattgattttggaggcctcaaacccgctggttcagaaccaacacctaagtcacgcattgcagaccttcctcctgccaaccctgatcacatcggtggatacagactcgccacagccacgtttgcaggcatcgaaaacaaatttggcctttatctcccgaaatttaagtctcctagtgttgctgtggttcagccaaaggcagcagtggcagccactcagtgatgagacaactgttgagtgtggcaaaatggcgccttgaagaaagaggcctaggagagcagccctgtaatgtatccagtcagctgcatggtactgactgagctgaggagtcaaactcttctttctgtatgacatatacatatacttgtttataaaataatcatttgcccagggaaaaaaccacaacgctgtttcaagctttagtcttatgtgttgaaatgtttttgtaagccttggcatgaattagtgttctagactctgctttgcacagcttgcacttacagtgattgtacatattgtacatctttgtacagagacatcttggcacctcatcccaacaaatcacatttgtagaaatgtaatgcggttctgagtggcttgaaatgtacagaatgttttgaaagtgttttattaagaatcacacaaaaataaatgtattaaaattaaattcattctcttattggtgacttatggaaataaagcatcaatattggatgtattt

SEQ ID NO: 300912 - DNA, 1716 bp, Artificial Sequence
  derived and/or modified sequence
atggagaacgtgaaggagatcttcggccagaccatcatccaccaccacatccccttcaactgggactgcgagttcatcagactgcacttcggccacaacagaaagaagcacctgaactacaccgagttcacccagttcctgcaggagctgcagctggagcacgccagacaggccttcgccctgaaggacaagagcaagagcggcatgatcagcggcctggacttcagcgacatcatggtgaccatcagaagccacatgctgacccccttcgtggaggagaacctggtgagcgccgccggcggcagcatcagccaccaggtgagcttcagctacttcaacgccttcaacagcctgctgaacaacatggagctggtgagaaagatctacagcaccctggccggcaccagaaaggacgtggaggtgaccaaggaggagttcgcccagagcgccatcagatacggccaggtgacccccctggagatcgacatcctgtaccagctggccgacctgtacaacgccagcggcagactgaccctggccgacatcgagagaatcgcccccctggccgagggcgccctgccctacaacctggccgagctgcagagacagcagagccccggcctgggcagacccatctggctgcagatcgccgagagcgcctacagattcaccctgggcagcgtggccggcgccgtgggcgccaccgccgtgtaccccatcgacctggtgaagaccagaatgcagaaccagagaggcagcggcagcgtggtgggcgagctgatgtacaagaacagcttcgactgcttcaagaaggtgctgagatacgagggcttcttcggcctgtacagaggcctgatcccccagctgatcggcgtggcccccgagaaggccatcaagctgaccgtgaacgacttcgtgagagacaagttcaccagaagagacggcagcgtgcccctgcccgccgaggtgctggccggcggctgcgccggcggcagccaggtgatcttcaccaaccccctggagatcgtgaagatcagactgcaggtggccggcgagatcaccaccggccccagagtgagcgccctgaacgtgctgagagacctgggcatcttcggcctgtacaagggcgccaaggcctgcttcctgagagacatccccttcagcgccatctacttccccgtgtacgcccactgcaagctgctgctggccgacgagaacggccacgtgggcggcctgaacctgctggccgccggcgccatggccggcgtgcccgccgccagcctggtgacccccgccgacgtgatcaagaccagactgcaggtggccgccagagccggccagaccacctacagcggcgtgatcgactgcttcagaaagatcctgagagaggagggccccagcgccttctggaagggcaccgccgccagagtgttcagaagcagcccccagttcggcgtgaccctggtgacctacgagctgctgcagagatggttctacatcgacttcggcggcctgaagcccgccggcagcgagcccacccccaagagcagaatcgccgacctgccccccgccaaccccgaccacatcggcggctacagactggccaccgccaccttcgccggcatcgagaacaagttcggcctgtacctgcccaagttcaagagccccagcgtggccgtggtgcagcccaaggccgccgtggccgccacccagtag

SEQ ID NO: 300913 - DNA, 375 bp, Artificial Sequence
  derived and/or modified sequence
atggtgcgggccacccggggctactgggaggccaagggcaagtggcagacctggctgcgcttcaggaagaagagcagcaaatgtcgggaggcccggaccttccccagcttcaagttcctgaagggcagccagagcagcttcagcagcctgctgcagatgcccctgcagagcttcaccgctgcccacacctacagaagaagaaacagccccagccagaaggatgaccgggccctgggcgctggggtgcccctggtgctggccgagagcctggatgcctgtgaggtgaagccagacctgggcaaggccgccctgtggaccctgctggccgtgccccacacccagctgggcttcctgaggaagcagcaccggctgtag

SEQ ID NO: 300914 - DNA, 1329 bp, Artificial Sequence
  derived and/or modified sequence
atgtacttcctgaatgatactctggccgcggaagactctccttctttctccctcctgcagtctgcccatccgggtgagcatcttgcacagggcgcgagccgcttgcaagtgctgcaggcacagttgacctgggtaagggtgagtcatgagcacctgttacaaagagtagacaattttacacagaaccctggaatgtttaggataaagggggaacagggggctccagggctccaggggcacaaaggtgctatggggatgcccggagctcccggcccaccagggccccctgccgaaaagggggccaagggcgccatggggcgtgatggcgctacgggcccaagcgggccacagggaccacccggagtcaaaggggaggcagggctccaaggaccgcagggagctccaggtaagcagggcgccaccggtactccagggcctcaaggggaaaaaggttccaagggtgatggcggactgattggtccaaaaggggagaccgggacaaagggggaaaaaggcgatctgggactgcctggatcgaaaggcgaccgtgggatgaagggtgacgctggggtgatggggcctccgggcgcccaaggaagcaagggagatttcggtaggcccggcccaccgggcctggcgggatttcccggcgcgaaaggagaccaggggcagcccgggctgcagggagtgcctgggcctccaggagccgtcggacacccgggagccaagggggaacctgggtctgccggaagcccaggcagagccggtctacctgggagccccggctctccaggcgccactggacttaaaggttccaagggagatactggcttgcaaggccagcaggggaggaaaggtgagagtggcgtgccaggacccgcaggagtaaagggtgagcaggggtctcccggcctggccggtcctaaaggggcccccggacaggccgggcagaaaggagatcagggggtgaaggggtcctccggtgagcagggggttaaaggagagaagggcgagcgaggggaaaactctgtaagtgtcaggatcgtgggatcctcaaataggggaagggccgaggtctactactctgggacttggggtaccatttgcgacgatgaatggcagaactctgatgccatcgttttctgccgcatgcttggctactcaaagggacgtgcactgtataaggttggagctggaaccggccaaatttggctcgacaatgtgcagtgcaggggtacggagtctactctatggtcctgtacaaaaaactcttggggacatcatgactgcagccacgaggaagacgcgggcgtagagtgttcagtttag

SEQ ID NO: 300915 - DNA, 1329 bp, Artificial Sequence
  derived and/or modified sequence
atgtacttcctgaatgacaccctggccgctgaggacagccccagcttcagcctgctgcagagcgcccaccctggagagcacctggcccagggcgccagccggctgcaggtgctgcaggcccagctgacctgggtgcgggtgtcccatgagcacctgctgcagagggtggacaacttcacccagaaccctggcatgttccgcatcaagggggagcagggcgcccctggcctgcagggccacaagggggccatgggcatgcctggggcccctggccccccaggccccccagctgagaagggggccaagggggccatgggcagagatggagccaccggccccagcggcccccagggccccccaggagtgaagggggaggccggcctgcagggcccccagggcgcccctgggaagcagggcgccaccggcaccccaggcccccagggcgagaagggcagcaaaggagatggcggcctgattggccccaagggggagaccggcaccaagggggagaagggggacctgggcctgcccggcagcaagggggaccggggcatgaagggagatgctggggtgatgggccccccaggggcccagggcagcaaaggagactttggccggcccggccccccaggcctggccggcttccctggggccaagggggaccagggccagcccggcctgcagggcgtgcccggccccccaggagctgtgggccaccctggggccaagggggagcccggcagcgctggcagccctggccgggccggcctgcccggcagccctggcagccctggggccaccggcctgaagggcagcaaaggagacaccggcctgcagggccagcagggcaggaaaggagagagcggcgtgcccggccctgctggggtgaagggggagcagggcagccctggcctggccggccccaagggggcccctggccaggccggccagaagggggaccagggcgtgaagggcagcagtggagagcagggcgtgaagggggagaagggggagagaggagaaaattctgtgtctgtgcgcatcgtgggcagcagcaacagaggccgggcagaggtgtactacagcggcacctggggcaccatctgtgatgatgagtggcagaacagtgatgccatcgtgttctgcaggatgctgggctacagcaagggccgggccctgtacaaggtgggcgccggcaccggccagatctggctggacaacgtgcagtgccggggcacagagagcaccctgtggagctgcaccaagaacagctggggccaccacgactgcagccatgaggaggatgctggggtggagtgcagcgtgtag

SEQ ID NO: 300916 - DNA, 1329 bp, Artificial Sequence
  derived and/or modified sequence
atgtacttcctgaacgacaccctggccgccgaggacagccccagcttcagcttgctacagagcgctcacccaggagagcaccttgcccagggcgcctctagattgcaggtactccaggcccagctgacctgggtgagagtcagccacgagcatctcttgcaaagagtggacaattttactcagaaccccggaatgtttaggatcaaaggagagcagggcgccccgggcctgcaggggcacaagggagccatggggatgcctggagccccgggccctcctgggccaccggctgaaaagggcgctaaaggagccatgggccgtgacggcgccactggcccatccggacctcagggcccacctggcgtgaagggggaagcaggattgcagggcccacagggcgcaccaggtaaacagggggcaacaggcacacctgggccacagggtgagaaagggagtaagggagatggcggcttgattggccccaagggtgagacgggcaccaaaggggagaaaggagacctcggcctgccaggttccaagggagaccggggtatgaagggggacgccggcgttatgggaccgccaggagctcaggggtcaaagggcgacttcggtcgccctggcccaccaggcttggctggctttcccggcgccaaaggtgaccaaggacagcctggcctacagggtgttcccgggcccccgggcgccgttggtcacccaggagccaagggggagccagggagtgccggatcacccggtcgggcaggattgcccggatctcccgggtccccaggcgccacaggactgaaaggttctaaaggcgatactgggctgcagggacagcagggccgcaaaggggaatccggagtgcctggtccagcgggggttaaaggggagcaaggatctcctgggcttgcgggcccgaagggagccccggggcaggctggacagaaaggcgatcagggcgtgaaaggcagcagtggcgaacagggagtcaagggcgaaaaaggcgagaggggcgagaattctgtctccgttcggatagtgggcagtagcaaccgtgggagagctgaggtgtactatagcggaacatggggtaccatctgcgacgatgaatggcaaaacagcgatgcaatcgtgttctgtcgcatgcttggctactccaaagggagagctttatacaaagtgggcgctggcaccggccagatctggctcgacaatgtgcagtgtcgcgggaccgaatcgactctttggtcttgtacgaagaactcttggggacaccatgattgtagtcatgaagaagatgcaggggtggagtgctccgtgtag

SEQ ID NO: 300917 - DNA, 1329 bp, Artificial Sequence
  derived and/or modified sequence
atgtacttcctgaatgatactctggcggcagaggactccccttcattttctctcctccagtccgcgcatccaggtgagcatctcgcacagggggctagcagacttcaggttctgcaagcacaactcacatgggtgcgggtctcccatgagcacttgctgcagagagtggacaactttactcagaaccccggaatgttcaggattaaaggggagcagggcgctccgggtttgcagggccacaagggagcaatgggaatgcccggtgcgcctggccctccaggccctccagcggagaagggagcgaagggcgcaatgggccgagacggtgcgacaggcccttctggaccacagggcccaccgggtgtgaagggcgaggcagggctacagggtccacagggtgccccaggtaagcagggcgcaaccggcactcccggaccccagggcgagaaggggtctaaaggggatggtggactgattggacccaagggagaaaccggtactaagggagaaaaaggagacctgggactacctgggagcaaaggcgaccggggtatgaaaggtgatgcgggtgtgatgggaccgccaggcgcacaaggatctaaaggggacttcgggaggcccggtccccctggactggccggttttcccggtgccaagggtgatcagggacaaccaggtctgcagggggttcccggtcccccaggggcagtaggccacccaggcgctaagggtgaaccaggcagtgctggatcaccaggcagagcaggtctaccagggtccccgggatctcctggcgctacaggcctcaaaggcagcaagggcgataccggactgcaaggacagcaaggtcgaaagggcgagtcaggggtccccggaccagctggggtgaagggtgagcagggcagcccaggactggccggtcctaaaggtgctccaggccaggcaggtcaaaaaggcgaccagggggtgaaagggagttctggtgagcagggagttaagggagaaaaaggcgaacgtggcgaaaactcggtgtcggtacgaatagtgggctcaagtaaccgaggtcgcgctgaagtgtattatagcgggacatggggcacgatctgtgatgacgaatggcagaatagcgacgcgattgtgttttgtaggatgctagggtactcaaagggacgagctctgtacaaggttggcgcagggaccggccagatatggctcgacaatgtccagtgccggggtaccgagagcacactgtggagttgtactaagaactcttggggtcaccacgattgctctcatgaagaggatgccggagtggagtgttcagtctag

SEQ ID NO: 300918 - DNA, 1329 bp, Artificial Sequence
  derived and/or modified sequence
atgtacttcctgaacgacaccctggccgccgaggacagccccagcttcagcctgctgcagagcgcccaccccggcgagcacctggcccagggcgccagcagactgcaggtgctgcaggcccagctgacctgggtgagagtgagccacgagcacctgctgcagagagtggacaacttcacccagaaccccggcatgttcagaatcaagggcgagcagggcgcccccggcctgcagggccacaagggcgccatgggcatgcccggcgcccccggcccccccggcccccccgccgagaagggcgccaagggcgccatgggcagagacggcgccaccggccccagcggcccccagggcccccccggcgtgaagggcgaggccggcctgcagggcccccagggcgcccccggcaagcagggcgccaccggcacccccggcccccagggcgagaagggcagcaagggcgacggcggcctgatcggccccaagggcgagaccggcaccaagggcgagaagggcgacctgggcctgcccggcagcaagggcgacagaggcatgaagggcgacgccggcgtgatgggcccccccggcgcccagggcagcaagggcgacttcggcagacccggcccccccggcctggccggcttccccggcgccaagggcgaccagggccagcccggcctgcagggcgtgcccggcccccccggcgccgtgggccaccccggcgccaagggcgagcccggcagcgccggcagccccggcagagccggcctgcccggcagccccggcagccccggcgccaccggcctgaagggcagcaagggcgacaccggcctgcagggccagcagggcagaaagggcgagagcggcgtgcccggccccgccggcgtgaagggcgagcagggcagccccggcctggccggccccaagggcgcccccggccaggccggccagaagggcgaccagggcgtgaagggcagcagcggcgagcagggcgtgaagggcgagaagggcgagagaggcgagaacagcgtgagcgtgagaatcgtgggcagcagcaacagaggcagagccgaggtgtactacagcggcacctggggcaccatctgcgacgacgagtggcagaacagcgacgccatcgtgttctgcagaatgctgggctacagcaagggcagagccctgtacaaggtgggcgccggcaccggccagatctggctggacaacgtgcagtgcagaggcaccgagagcaccctgtggagctgcaccaagaacagctggggccaccacgactgcagccacgaggaggacgccggcgtggagtgcagcgtgtag

SEQ ID NO: 300919 - protein, 832 aa, Artificial Sequence
  derived and/or modified sequence
MKPPGSSSRQPPLAGCSLAGASCGPQRGPAGSVPASAPARTPPCRLLLVLLLLPPLAASSRPRAWGAAAPSAPHWNETAEKNLGVLADEDNTLQQNSSSNISYSNAMQKEITLPSRLIYYINQDSESPYHVLDTKARHQQKHNKAVHLAQASFQIEAFGSKFILDLILNNGLLSSDYVEIHYENGKPQYSKGGEHCYYHGSIRGVKDSKVALSTCNGLHGMFEDDTFVYMIEPLELVHDEKSTGRPHIIQKTLAGQYSKQMKNLTMERGDQWPFLSELQWLKRRKRAVNPSRGIFEEMKYLELMIVNDHKTYKKHRSSHAHTNNFAKSVVNLVDSIYKEQLNTRVVLVAVETWTEKDQIDITTNPVQMLHEFSKYRQRIKQHADAVHLISRVTFHYKRSSLSYFGGVCSRTRGVGVNEYGLPMAVAQVLSQSLAQNLGIQWEPSSRKPKCDCTESWGGCIMEETGVSHSRKFSKCSILEYRDFLQRGGGACLFNRPTKLFEPTECGNGYVEAGEECDCGFHVECYGLCCKKCSLSNGAHCSDGPCCNNTSCLFQPRGYECRDAVNECDITEYCTGDSGQCPPNLHKQDGYACNQNQGRCYNGECKTRDNQCQYIWGTKAAGSDKFCYEKLNTEGTEKGNCGKDGDRWIQCSKHDVFCGFLLCTNLTRAPRIGQLQGEIIPTSFYHQGRVIDCSGAHVVLDDDTDVGYVEDGTPCGPSMMCLDRKCLQIQALNMSSCPLDSKGKVCSGHGVCSNEATCICDFTWAGTDCSIRDPVRNLHPPKDEGPKVNMATSRLIGAVAGTILALGVIFGGTGWGIENVKKRRFDPTQQGPI

SEQ ID NO: 300920 - DNA, 2499 bp, Artificial Sequence
  derived and/or modified sequence
atgaagcctccagggagctcttcacggcagcctcccctggccgggtgctccctggctggagcatcttgtggaccacagcgcggtcccgctgggtctgtgccagcaagtgcccccgccaggactcccccatgccgcctgctgcttgtgctccttctattgccaccactggcggcgtctagtagaccacgggcctggggcgccgccgccccttctgctccacattggaatgaaacagccgaaaagaacctgggggtgttggcagacgaagacaacacccttcaacagaacagctcctctaatattagctactccaacgccatgcagaaggagatcaccctcccaagccgattaatctattacataaatcaggattcggaaagcccttatcacgtcctagacaccaaggctcggcaccagcagaaacataacaaggccgtgcatctggcacaggccagtttccagattgaggcattcggatctaagtttatcctggatctaatcctgaacaacgggttgctgtccagcgattatgtggagattcactatgagaacggtaagccgcagtactctaaaggtggagaacactgctactatcacggctccattcgtggggtcaaggattcaaaggtagccttgtccacctgcaatggtctgcatgggatgtttgaagacgatactttcgtgtatatgatcgagccactcgaactcgtgcacgatgagaagtcgaccggaagaccacatattatccagaagacccttgcgggacaatacagcaagcagatgaagaatttaaccatggaaaggggagaccagtggccctttctgtcagagctgcagtggctcaagagaagaaaacgtgccgtgaacccatccagaggcattttcgaagagatgaagtatttggagctcatgatcgttaatgatcacaagacatataaaaagcacagatcgtctcatgctcacaccaataacttcgcgaagtccgtggttaatttagtggactccatatacaaggagcagttaaacacacgagtcgttctggtggctgtggaaacatggactgaaaaagatcaaatcgatattaccactaatcccgtgcagatgctgcacgaattcagcaaatacaggcagaggattaagcagcacgccgacgcagtgcatctgattagtagggtgacgttccattacaaacgtagctccctgagttatttcgggggagtctgctctaggacaaggggcgttggtgtaaatgaatacggacttccaatggctgttgcccaggtactgtcacagtctttggctcagaatctcggaatccaatgggaacctagctccagaaaacctaagtgtgactgcaccgaatcctggggcgggtgcattatggaggagacaggtgtatcccacagcaggaagtttagcaagtgtagcattctggagtatcgtgactttttacagcgcggaggcggcgcttgcctgtttaatcgccccacaaaactattcgagccaactgagtgtggtaatggctacgtggaggctggcgaggagtgcgattgcgggtttcacgtcgagtgctatggcctgtgctgtaagaagtgcagcctgtcaaacggagcgcactgcagcgatgggccatgttgcaataatacatcttgcctgtttcagccacggggatatgaatgccgcgacgccgtgaatgagtgcgatattaccgagtattgtactggggattctggacagtgtcctcctaatctgcacaagcaagacgggtacgcctgcaatcagaaccaggggagatgttataacggtgaatgtaagaccagagacaatcagtgccagtacatatggggcaccaaggcagccggaagtgataaattttgttacgaaaagcttaacactgagggcacggaaaagggaaactgcgggaaggacggcgatcgctggatccagtgcagtaagcacgacgtgttctgcggcttcctgctgtgtaccaatctcacaagggctccacgaatcggccagctgcagggcgaaataattcctacctccttttaccaccaaggccgcgtcatcgattgctctggagcacacgtagtactggacgatgacaccgatgtgggctacgtagaggacggcactccttgtggaccctctatgatgtgcctggatcgcaagtgtttgcagatccaggctttaaacatgtcctcgtgccccctagacagcaagggcaaggtgtgtagcgggcatggagtctgtagcaacgaagcaacgtgtatttgcgacttcacctgggctgggacagattgctcaattagggaccccgtgagaaatctccatcctccaaaggacgagggccctaaggtgaatatggctactagccgcttgatcggagcagtggccggaacgatcttggccctgggggtgatattcggaggcacaggttggggcattgaaaatgtgaagaaacggaggttcgaccctacgcaacagggtccaatctag

SEQ ID NO: 300921 - DNA, 2100 bp, Artificial Sequence
  derived and/or modified sequence
atgcaaaaggagattacccttccttcgcggttgatttactacataaaccaggactctgaatccccatatcacgttctcgacactaaggctaggcaccagcagaaacacaataaggcagtccatctcgcccaggcgagtttccagattgaggcctttgggagcaaatttattctggatctgattttaaacaacggtctgctatcatctgactacgtggaaatacactatgagaatggcaaaccacagtattctaaaggcggtgagcactgctattatcacggatcgattaggggcgtaaaggatagtaaagtggccctgtctacatgcaatggcctccatggaatgttcgaggacgataccttcgtgtatatgatcgagcccctggaattggtacatgacgagaagagcactggccggcctcacattattcaaaaaaccctggccgggcagtactccaagcagatgaagaatctcacaatggagagaggggaccagtggccttttctgagcgagctacaatggctgaaaaggagaaagagggctgtgaaccctagtcgtgggatttttgaggagatgaaatacctagagctcatgattgtgaacgaccacaagacctacaagaagcaccgctcatcccacgcccatacaaataatttcgccaaaagcgtcgtgaatctggtcgacagtatctacaaggagcagctgaacacacgtgtggtgctggtcgccgtagagacttggaccgagaaagaccagatagacattacgaccaatcccgttcagatgcttcacgagttctcaaaatataggcaacgaattaagcagcacgccgacgcggtgcatctcatttcgagagtgacctttcactataagaggagctccctcagctattttggaggagtgtgcagcaggacacgcggagtgggcgtcaatgagtatgggctgccgatggcggtggcacaggtgctctcccagagtctggcacagaatcttggcatccagtgggaaccaagttcacggaagcccaagtgcgactgtacagagtcatggggaggctgcatcatggaagaaaccggggtttcccattcccgcaaatttagcaagtgctcaattctcgaatacagggactttctccagcgaggcggaggagcctgcctgttcaacagacctactaaactgtttgaacccaccgagtgtgggaatgggtatgtagaagccggcgaggaatgtgattgcggctttcatgtggaatgttacggtctatgctgtaagaaatgcagtctgagcaacggtgctcattgctcagatgggccgtgctgtaataacacgtcttgcttgtttcagccccggggctacgaatgtcgcgatgccgtaaacgaatgcgatatcacagagtactgtacaggagattccggacagtgcccacctaatctccataagcaggacggctacgcttgcaaccaaaaccagggtcgctgctacaacggcgagtgtaagacccgggacaatcaatgccagtacatctgggggaccaaggcagctggctctgacaaattttgttacgagaaattaaacaccgagggcactgagaaagggaattgtggaaaagatggagatcgctggatccagtgtagtaagcatgatgtgttctgcggctttttgctgtgtaccaatctaacacgcgctcctcggattggtcagcttcaaggggaaatcattccaactagtttctaccatcaaggccgagtgatcgattgttccggcgctcacgtggtgctggatgacgatactgacgtggggtacgtggaagatgggactccatgtgggccatcaatgatgtgtctggaccggaagtgcctccaaatacaagctcttaacatgagtagctgtcccctggactccaaagacgaaggccctaaggcttgttttttgaaacgcaccaaatgtaagtcctaccccaagcaccggaagtgccaggaggagaaggtacgctcatacagcgcccggccccacctcaatcagttgcgctggatggacacagcgttacattgttggatattgggaatgacttattctcagcagtgctattggaattactag

SEQ ID NO: 300922 - DNA, 2499 bp, Artificial Sequence
  derived and/or modified sequence
atgaagcccccaggcagcagcagccggcagccccccctggccggctgcagcctggccggggccagctgtggcccccagaggggccctgctggctctgtgcctgccagcgccccagcccggaccccaccctgccgcctgctgctggtgctgctgctgctgccccccctggccgccagcagccggccccgggcctggggcgccgccgcccccagcgccccccactggaatgaaacagctgagaagaacctgggcgtgctggctgatgaggacaacaccctgcagcagaacagcagcagcaacatctcctacagcaatgccatgcagaaggagatcaccctgcccagccgcctcatctactacatcaaccaggacagcgagagcccctaccacgtgctggacaccaaggcccggcaccagcagaagcacaacaaggctgtgcacctggcccaggccagcttccagatcgaggccttcggcagcaagttcatcctggacctgatcctgaacaacggcctgctgagcagtgactatgtggagatccactatgaaaatggcaagccccagtacagcaaaggaggagagcactgctactaccacggcagcatccggggcgtgaaggacagcaaggtggccctgagcacctgcaatggcctgcacggcatgtttgaagatgacacctttgtgtacatgattgagcccctggagctggtgcatgatgagaagagcacaggccggccccacatcatccagaagaccctggccggccagtacagcaagcagatgaagaacctgaccatggagcggggggaccagtggcccttcctgtctgagctgcagtggctgaagaggaggaagagagctgtgaaccccagccggggcatctttgaggagatgaagtacctggagctgatgattgtgaatgaccacaagacctacaagaagcacaggagcagccacgcccacaccaacaactttgccaagtctgtggtgaacctggtggacagcatctacaaggagcagctgaacaccagggtggtgctggtggccgtggagacctggacagagaaggaccagattgacatcaccaccaaccctgtgcagatgctgcacgagttcagcaagtaccggcagaggatcaagcagcacgcagatgctgtgcacctgatcagccgggtgaccttccactacaagaggagcagcctgagctactttggaggagtgtgcagcaggacccggggcgtgggcgtgaatgaatatggcctgcccatggctgtggcccaggtgctgagccagagcctggcccagaacctgggcatccagtgggagcccagcagcaggaagcccaagtgtgactgcacagagagctggggcggctgcatcatggaggagaccggggtgagccacagcaggaagttcagcaagtgcagcatcctggagtacagagacttcctgcagagaggaggaggagcctgcctcttcaaccggcccaccaagctgtttgagcccacagaatgtggaaatggctacgtggaggccggggaggagtgtgactgtggcttccacgtggagtgctacggcctgtgctgcaagaagtgcagcctgagcaatggagcccactgcagtgatggcccctgctgcaacaacaccagctgcctcttccagccccggggctatgaatgtagagatgctgtgaatgaatgtgacatcacagagtactgcaccggggacagcggccagtgcccccccaacctgcacaagcaggacggctacgcctgcaaccagaaccagggccgctgctacaatggagagtgcaagacccgggacaaccagtgccagtacatctggggcaccaaggccgccggcagtgacaagttctgctatgagaagctgaacacagagggcacagagaagggcaactgtgggaaggatggagaccgctggatccagtgcagcaagcatgatgtgttctgtggcttcctgctgtgcaccaacctgacccgggcccccagaattggccagctgcagggcgagatcatccccaccagcttctaccaccagggccgggtcatcgactgcagcggggcccacgtggtgctggatgatgacacagatgtgggctacgtggaggatggcaccccctgtggccccagcatgatgtgcctggacaggaagtgcctgcagatccaggccctgaacatgagcagctgccccctggacagcaagggcaaggtgtgcagcggccacggcgtgtgcagcaatgaggccacctgcatctgtgacttcacctgggccggcacagactgcagcatccgggaccctgtgaggaacctgcacccccccaaggatgagggccccaaggtgaacatggccaccagccggctgattggagctgtggccggcaccatcctggccctgggcgtcatctttggaggcaccggctggggcattgaaaatgtgaagaagagaagatttgaccccacccagcagggccccatctag

SEQ ID NO: 300923 - DNA, 2100 bp, Artificial Sequence
  derived and/or modified sequence
atgcagaaggagatcaccctgcccagccgcctcatctactacatcaaccaggacagcgagagcccctaccacgtgctggacaccaaggcccggcaccagcagaagcacaacaaggctgtgcacctggcccaggccagcttccagatcgaggccttcggcagcaagttcatcctggacctgatcctgaacaacggcctgctgagcagtgactatgtggagatccactatgaaaatggcaagccccagtacagcaaaggaggagagcactgctactaccacggcagcatccggggcgtgaaggacagcaaggtggccctgagcacctgcaatggcctgcacggcatgtttgaagatgacacctttgtgtacatgattgagcccctggagctggtgcatgatgagaagagcacaggccggccccacatcatccagaagaccctggccggccagtacagcaagcagatgaagaacctgaccatggagcggggggaccagtggcccttcctgtctgagctgcagtggctgaagaggaggaagagagctgtgaaccccagccggggcatctttgaggagatgaagtacctggagctgatgattgtgaatgaccacaagacctacaagaagcacaggagcagccacgcccacaccaacaactttgccaagtctgtggtgaacctggtggacagcatctacaaggagcagctgaacaccagggtggtgctggtggccgtggagacctggacagagaaggaccagattgacatcaccaccaaccctgtgcagatgctgcacgagttcagcaagtaccggcagaggatcaagcagcacgcagatgctgtgcacctgatcagccgggtgaccttccactacaagaggagcagcctgagctactttggaggagtgtgcagcaggacccggggcgtgggcgtgaatgaatatggcctgcccatggctgtggcccaggtgctgagccagagcctggcccagaacctgggcatccagtgggagcccagcagcaggaagcccaagtgtgactgcacagagagctggggcggctgcatcatggaggagaccggggtgagccacagcaggaagttcagcaagtgcagcatcctggagtacagagacttcctgcagagaggaggaggagcctgcctcttcaaccggcccaccaagctgtttgagcccacagaatgtggaaatggctacgtggaggccggggaggagtgtgactgtggcttccacgtggagtgctacggcctgtgctgcaagaagtgcagcctgagcaatggagcccactgcagtgatggcccctgctgcaacaacaccagctgcctcttccagccccggggctatgaatgtagagatgctgtgaatgaatgtgacatcacagagtactgcaccggggacagcggccagtgcccccccaacctgcacaagcaggacggctacgcctgcaaccagaaccagggccgctgctacaatggagagtgcaagacccgggacaaccagtgccagtacatctggggcaccaaggccgccggcagtgacaagttctgctatgagaagctgaacacagagggcacagagaagggcaactgtgggaaggatggagaccgctggatccagtgcagcaagcatgatgtgttctgtggcttcctgctgtgcaccaacctgacccgggcccccagaattggccagctgcagggcgagatcatccccaccagcttctaccaccagggccgggtcatcgactgcagcggggcccacgtggtgctggatgatgacacagatgtgggctacgtggaggatggcaccccctgtggccccagcatgatgtgcctggacaggaagtgcctgcagatccaggccctgaacatgagcagctgccccctggacagcaaggatgagggccccaaggcctgcttcctgaagaggaccaagtgcaagagctaccccaagcacaggaagtgccaggaggagaaggtgcgcagctacagcgcccggccccacctgaaccagctgcgctggatggacacagccctgcactgctggatcctgggcatgacctacagccagcagtgctactggaactactag

SEQ ID NO: 300924 - DNA, 2499 bp, Artificial Sequence
  derived and/or modified sequence
atgaagccccccggcagcagcagccggcagccccccctggccggctgcagcttggctggggcctcctgtggcccccaacggggccctgccggcagcgtgccagcctctgcccctgccaggacacctccatgtcgactcctgctggttctgctcctacttcctccgctcgccgctagcagcagaccacgtgcctggggcgcagctgctccaagcgcaccgcattggaacgagaccgccgaaaaaaacttgggggtcctggccgacgaggacaatacattgcagcagaactctagctctaacataagctatagcaacgctatgcagaaggagataaccctgccttccagattgatctactatattaaccaggactctgaaagcccctatcacgttctggacaccaaagccaggcaccaacagaaacacaataaggccgttcacttagcgcaggccagcttccagatcgaagcatttggctccaaattcattctcgatctcatcttgaataatggactgctctcctcagattacgttgagattcactatgagaatgggaagcctcagtactctaaagggggagagcactgctattaccacggaagcatccgtggtgtgaaagactcaaaagtcgcgctctccacatgcaatgggcttcacgggatgtttgaggatgacaccttcgtctatatgattgagcctttggagctggtccatgacgaaaagagtactggtcggccacatatcattcaaaaaacgctggccgggcagtattcaaagcagatgaaaaacctgactatggagagaggcgatcaatggcctttcctgtccgagctgcagtggcttaagcgtaggaaacgcgcagttaatccttcccggggcatctttgaagaaatgaagtacttggagttgatgatagtcaacgatcataaaacttataaaaagcaccgttccagtcacgcccacaccaacaactttgctaaatctgtcgtcaacctggtggatagcatatataaagaacagctgaataccagagtagtcctggtggccgtggagacctggactgagaaggatcaaatcgacattaccactaacccagttcagatgctgcatgagttcagcaagtatcgacagaggatcaagcagcatgctgatgctgtgcatctgatctcgagggtgacttttcattataaacgctcctccctatcgtattttggcggtgtctgttcacggacgcggggggtgggagtgaacgagtacggactgccgatggccgtggcccaagtgctcagtcaatcgctagcacaaaatctgggcatccaatgggagcccagcagccgaaaacctaaatgcgattgcaccgagtcctggggcgggtgcatcatggaagagacaggagtctcccatagtaggaagttctccaagtgcagtatcctggaatacagagacttcctgcagagaggcgggggcgcatgcctgttcaatcgccctacaaagctgttcgagccaacagaatgcgggaacggctacgtggaggctggggaggagtgcgactgcggattccatgtggaatgttatgggttatgctgcaaaaaatgctccctgtctaacggcgcccactgcagcgatggcccgtgctgtaataacacaagctgcttgttccaacctcggggatatgaatgtagagacgccgttaatgagtgcgatattacagagtactgtaccggagattctggccagtgtcctccaaaccttcataagcaggatggctacgcttgcaatcagaaccaaggccggtgctataacggggagtgcaagaccagagacaaccagtgtcaatacatctggggtactaaggcagctggatccgacaaattctgttatgagaaactgaatacagagggcacagaaaaaggaaactgcggaaaagatggggacaggtggattcaatgctctaaacacgacgttttctgtggctttctactgtgcaccaacctgacccgcgccccccgcatcggacagctccaaggggagattatccccacctctttctaccaccagggccgcgtaatagactgttctggagcgcatgtggtgttagacgatgacaccgacgtggggtacgtcgaagacggtaccccttgcggacctagcatgatgtgcctggacagaaagtgtcttcagattcaggcccttaacatgagttcatgcccactggattctaaagggaaggtgtgctccggacacggggtttgctccaatgaggctacctgcatttgtgattttacttgggcgggcacagactgctccattcgggaccccgtcaggaacttgcatccccccaaagacgaaggcccaaaggtgaatatggccacttctcggttaatcggtgccgtggctggaaccatcctggcactaggggtcatcttcggaggaaccggctgggggattgaaaatgtgaaaaaaaggcggtttgaccccacgcagcaagggcccatatag

SEQ ID NO: 300925 - DNA, 2100 bp, Artificial Sequence
  derived and/or modified sequence
atgcagaaggagatcaccctgcccagccggctgatctactacatcaatcaggactccgagtctccctaccatgtgctggatacaaaagctagacatcagcagaagcacaataaagctgtccacctcgctcaggcgtcttttcagatcgaggcgttcggatctaagtttatcctcgacctgattcttaacaatggcctcttaagcagtgactacgtcgaaatacactacgagaatggcaaaccacagtactcaaaggggggtgaacactgttactaccacggttctatacgaggcgtcaaggacagcaaagttgctctgtccacatgcaatgggcttcacgggatgtttgaagatgacactttcgtgtatatgatagagccactggagctcgtgcatgacgaaaaaagcacaggccggccccatattatccagaagaccttggcagggcagtattccaagcaaatgaaaaacctaactatggagaggggcgatcagtggcctttccttagtgaacttcaatggcttaaaagaaggaagagggcggtaaacccatccagaggaatctttgaggagatgaaatatcttgaactgatgatcgtcaacgaccacaaaacttacaaaaaacatcgttcctcccacgcacacactaacaattttgcaaaatcagtggttaacctggtggattctatctacaaggagcagttgaacacgcgcgtagtcctggttgctgtggagacctggactgagaaggatcaaatcgatatcacgacaaatcctgtgcagatgctgcacgagttttccaaatatcggcagcgcattaagcaacacgccgacgcggtgcacctcatatccagagtaacatttcactacaaaaggagctcactctcctacttcggtggcgtgtgcagccgtaccagaggagtgggggtgaacgagtacggcctgcctatggcagtggcccaggtgttatcccagtcccttgcccagaacctgggcatccagtgggaacccagcagtcgaaaacctaaatgtgactgtaccgagagttggggtggttgcatcatggaggaaaccggcgtgagtcattcgcgcaaatttagtaagtgttccatcctagagtaccgagattttctacagcgcggaggaggcgcctgcctttttaaccggcctactaagctattcgaacccacggagtgtggcaacgggtatgtcgaggcaggcgaggaatgtgattgcggctttcatgttgaatgctacggcctctgctgcaagaagtgctcactgagcaacggtgctcactgctctgacgggccttgctgtaataacacctcatgcctcttccaaccacgggggtatgagtgccgggatgccgtgaacgagtgtgatattaccgaatattgtactggtgacagtgggcagtgcccaccaaacctgcataaacaggacgggtatgcttgcaatcagaaccagggtaggtgctacaacggggaatgtaagaccagggacaatcagtgccagtacatctggggcactaaagccgctggctcagacaaattctgttacgaaaagctgaataccgagggcaccgagaagggaaattgtggaaaagacggcgaccggtggatccaatgctcaaagcatgatgtgttctgcgggtttttgctctgtactaacctgacacgggccccacgtattggccagctgcagggagaaatcattccaacgagtttttaccatcaaggccgtgttattgactgttccggggcccacgtggtcctggacgacgacactgatgtgggatacgtagaggatggaacaccatgtggcccctctatgatgtgtcttgacaggaaatgcttgcaaattcaggcgttgaacatgagttcttgtccactggactcgaaggatgagggccccaaggcatgctttttgaagcgtacaaagtgcaaaagctaccctaagcaccgcaaatgccaggaggagaaagtgcgatcttactcagctagaccccaccttaatcagctaagatggatggacacagcccttcactgctggattctcggaatgacttattcacagcagtgctactggaactactag

SEQ ID NO: 300926 - DNA, 2714 bp, Artificial Sequence
  derived and/or modified sequence
atgaagccgcccggcagcagctcgcggcagccgcccctggcgggctgcagccttgccggcgcttcctgcggcccccaacgcggccccgccggctcggtgcctgccagcgccccggcccgcacgccgccctgccgcctgcttctcgtccttctcctgctgcctccgctcgccgcctcgtcccggccccgcgcctggggggctgctgcgcccagcgctccgcattggaatgaaactgcagaaaaaaatttgggagtcctggcagatgaagacaatacattgcaacagaatagcagcagtaatatcagttacagcaatgcaatgcagaaagaaatcacactgccttcaagactcatatattacatcaaccaagactcggaaagcccttatcacgttcttgacacaaaggcaagacaccagcaaaaacataataaggctgtccatctggcccaggcaagcttccagattgaagccttcggctccaaattcattcttgacctcatactgaacaatggtttgttgtcttctgattatgtggagattcactacgaaaatgggaaaccacagtactctaagggtggagagcactgttactaccatggaagcatcagaggcgtcaaagactccaaggtggctctgtcaacctgcaatggacttcatggcatgtttgaagatgataccttcgtgtatatgatagagccactagagctggttcatgatgagaaaagcacaggtcgaccacatataatccagaaaaccttggcaggacagtattctaagcaaatgaagaatctcactatggaaagaggtgaccagtggccctttctctctgaattacagtggttgaaaagaaggaagagagcagtgaatccatcacgtggtatatttgaagaaatgaaatatttggaacttatgattgttaatgatcacaaaacgtataagaagcatcgctcttctcatgcacataccaacaactttgcaaagtccgtggtcaaccttgtggattctatttacaaggagcagctcaacaccagggttgtcctggtggctgtagagacctggactgagaaggatcagattgacatcaccaccaaccctgtgcagatgctccatgagttctcaaaataccggcagcgcattaagcagcatgctgatgctgtgcacctcatctcgcgggtgacatttcactataagagaagcagtctgagttactttggaggtgtctgttctcgcacaagaggagttggtgtgaatgagtatggtcttccaatggcagtggcacaagtattatcgcagagcctggctcaaaaccttggaatccaatgggaaccttctagcagaaagccaaaatgtgactgcacagaatcctggggtggctgcatcatggaggaaacaggggtgtcccattctcgaaaattttcaaagtgcagcattttggagtatagagactttttacagagaggaggtggagcctgccttttcaacaggccaacaaagctatttgagcccacggaatgtggaaatggatacgtggaagctggggaggagtgtgattgtggttttcatgtggaatgctatggattatgctgtaagaaatgttccctctccaacggggctcactgcagcgacgggccctgctgtaacaatacctcatgtctttttcagccacgagggtatgaatgccgggatgctgtgaacgagtgtgatattactgaatattgtactggagactctggtcagtgcccaccaaatcttcataagcaagacggatatgcatgcaatcaaaatcagggccgctgctacaatggcgagtgcaagaccagagacaaccagtgtcagtacatctggggaacaaaggctgcagggtctgacaagttctgctatgaaaagctgaatacagaaggcactgagaagggaaactgcgggaaggatggagaccggtggattcagtgcagcaaacatgatgtgttctgtggattcttactctgtaccaatcttactcgagctccacgtattggtcaacttcagggtgagatcattccaacttccttctaccatcaaggccgggtgattgactgcagtggtgcccatgtagttttagatgatgatacggatgtgggctatgtagaagatggaacgccatgtggcccgtctatgatgtgtttagatcggaagtgcctacaaattcaagccctaaatatgagcagctgtccactcgattccaagggtaaagtctgttcgggccatggggtgtgtagtaatgaagccacctgcatttgtgatttcacctgggcagggacagattgcagtatccgggatccagttaggaaccttcacccccccaaggatgaaggacccaaggtgaatatggccacaagcaggctaataggggccgtggccggcaccattctggccctgggggtgatttttggaggcacagggtggggaatagaaaatgtcaagaagagaaggttcgatcctactcagcaaggccccatctgaatcagctgcgctggatggacaccgccttgcactgttggattctgggtatgacatactcgcagcagtgttactggaactattaagtttgtaaacaaaacctttgggtggtaatgactacggagctaaagttggggtgacaaggatggggtaaaagaaaactgtctcttttggaaataatgtcaaagaacacctttcaccacctgtcagtaaacggg

SEQ ID NO: 300927 - DNA, 2486 bp, Artificial Sequence
  derived and/or modified sequence
acacggagcggcgcccgggagctatgagccatgaagccgcccggcagcagctcgcggcagccgcccctggcgggctgcagccttgccggcgcttcctgcggcccccaacgcggccccgccggctcggtgcctgccagcgccccgcagctccgcattggaatgaaactgcagaaaaaaatttgggagtcctggcagatgaagacaatacattgcaacagaatagcagcagtaatatcagttacagcaatgcaatgcagaaagaaatcacactgccttcaagactcatatattacatcaaccaagactcggaaagcccttatcacgttcttgacacaaaggcaagacaccagcaaaaacataataaggctgtccatctggcccaggcaagcttccagattgaagccttcggctccaaattcattcttgacctcatactgaacaatggtttgttgtcttctgattatgtggagattcactacgaaaatgggaaaccacagtactctaagggtggagagcactgttactaccatggaagcatcagaggcgtcaaagactccaaggtggctctgtcaacctgcaatggacttcatggcatgtttgaagatgataccttcgtgtatatgatagagccactagagctggttcatgatgagaaaagcacaggtcgaccacatataatccagaaaaccttggcaggacagtattctaagcaaatgaagaatctcactatggaaagaggtgaccagtggccctttctctctgaattacagtggttgaaaagaaggaagagagcagtgaatccatcacgtggtatatttgaagaaatgaaatatttggaacttatgattgttaatgatcacaaaacgtataagaagcatcgctcttctcatgcacataccaacaactttgcaaagtccgtggtcaaccttgtggattctatttacaaggagcagctcaacaccagggttgtcctggtggctgtagagacctggactgagaaggatcagattgacatcaccaccaaccctgtgcagatgctccatgagttctcaaaataccggcagcgcattaagcagcatgctgatgctgtgcacctcatctcgcgggtgacatttcactataagagaagcagtctgagttactttggaggtgtctgttctcgcacaagaggagttggtgtgaatgagtatggtcttccaatggcagtggcacaagtattatcgcagagcctggctcaaaaccttggaatccaatgggaaccttctagcagaaagccaaaatgtgactgcacagaatcctggggtggctgcatcatggaggaaacaggggtgtcccattctcgaaaattttcaaagtgcagcattttggagtatagagactttttacagagaggaggtggagcctgccttttcaacaggccaacaaagctatttgagcccacggaatgtggaaatggatacgtggaagctggggaggagtgtgattgtggttttcatgtggaatgctatggattatgctgtaagaaatgttccctctccaacggggctcactgcagcgacgggccctgctgtaacaatacctcatgtctttttcagccacgagggtatgaatgccgggatgctgtgaacgagtgtgatattactgaatattgtactggagactctggtcagtgcccaccaaatcttcataagcaagacggatatgcatgcaatcaaaatcagggccgctgctacaatggcgagtgcaagaccagagacaaccagtgtcagtacatctggggaacaaaggctgcagggtctgacaagttctgctatgaaaagctgaatacagaaggcactgagaagggaaactgcgggaaggatggagaccggtggattcagtgcagcaaacatgatgtgttctgtggattcttactctgtaccaatcttactcgagctccacgtattggtcaacttcagggtgagatcattccaacttccttctaccatcaaggccgggtgattgactgcagtggtgcccatgtagttttagatgatgatacggatgtgggctatgtagaagatggaacgccatgtggcccgtctatgatgtgtttagatcggaagtgcctacaaattcaagccctaaatatgagcagctgtccactcgattccaaggatgaaggacccaaggcctgttttctgaagcggacgaagtgcaaatcatatccaaagcatagaaaatgtcaagaagagaaggttcgatcctactcagcaaggccccatctgaatcagctgcgctggatggacaccgccttgcactgttggattctgggtatgacatactcgcagcagtgttactggaactattaagtttgtaaacaaaacctttgggtggtaatgactacggagctaaagttggggtgacaaggatggggtaaaagaaaactgtctcttttggaaataatgtcaaagaacacctttcaccacctgtcagtaaacggggga

SEQ ID NO: 300928 - DNA, 2499 bp, Artificial Sequence
  derived and/or modified sequence
atgaagcccccaggatcttcgtctaggcagccaccgctggcgggatgttcacttgccggtgcgtcatgtggacctcaaaggggccctgccggatctgtccccgcatctgctccagctcgcacacctccgtgcaggcttctgctcgtcttgctgctgcttcctccactggccgctagttcgcgccctcgcgcttggggggcagctgccccttctgctccccactggaatgaaaccgcagagaagaacctgggggtcctcgccgacgaggataacacactgcagcagaatagctctagtaacatttcctatagtaacgctatgcagaaggaaatcaccttaccttccagacttatttactatattaatcaggacagcgagtcgccctatcatgtgttagatacgaaggctcgacatcagcaaaagcataacaaggctgtccatctcgcccaagcaagcttccagattgaagcatttggctcaaaatttattctggatctgatcctgaacaatggcttgctgagttcggactatgtagaaatccactacgagaatggcaagccccagtactccaaaggcggtgaacactgctattaccacggatcaattagaggagtcaaggattccaaggtggcactgtctacttgtaacggtctgcatgggatgtttgaggacgataccttcgtgtacatgatagagccactggaactagtccacgacgagaaaagcacagggcgtccacatatcattcaaaagacactagccggacagtattctaagcagatgaagaatcttacaatggagcggggtgaccagtggccctttttgagtgaattgcagtggcttaaacggagaaagagagccgtcaacccatctaggggcatattcgaagagatgaagtacctggagctcatgatcgtgaatgatcacaagacctataagaagcacagatcttcccatgcacatacaaacaacttcgcaaagagcgtggtgaacttggtggattcaatctacaaagagcagctaaacacgcgcgtcgttctggtggctgttgagacttggacagaaaaggaccagattgatattactacaaatcctgtgcagatgctacacgaattcagcaaatatagacagcgtatcaagcagcacgctgacgccgtgcacttgatcagccgggtgaccttccattacaaaagaagcagcctgtcttattttgggggtgtgtgtagtcgcacacgtggggtgggagtcaatgaatatggtcttccaatggcagtggcccaagtcttatcccaatctctcgctcagaatctgggcattcagtgggagccatcgagcaggaagcccaagtgcgactgcacagagagctggggcggttgtatcatggaggaaactggggtctcccactcaagaaagttttcaaagtgctccatcttagagtacagggactttctgcaaagagggggtggggcatgtctgttcaaccggcctacgaagctgttcgaaccaaccgaatgcgggaatggatacgtcgaggcaggtgaagaatgtgattgcggattccacgtcgaatgctacggtttgtgctgtaagaagtgtagcctttctaatggagcacattgctctgatggtccatgctgtaataatacctcgtgtctgtttcagcccaggggctatgagtgccgagatgctgtcaacgaatgcgacataaccgaatactgtactggagacagtggacagtgcccaccaaacctgcacaagcaagacggttacgcgtgcaaccagaatcaggggcgttgctataacggtgaatgcaagaccagagacaaccagtgtcagtacatctgggggaccaaggccgcagggtctgacaagttctgttacgagaaacttaacaccgagggcaccgagaagggaaattgtggaaaggatggggatcggtggatccagtgctctaagcacgatgtgttttgtggtttcctgctgtgtacaaaccttaccagggcgcctagaatcggccagttgcagggcgaaattattcccacgtcattctaccaccagggcagggtgatcgattgctctggagcccatgtcgtccttgacgacgacacagacgtgggatacgtcgaagacggaaccccatgtggcccaagcatgatgtgtctagatagaaagtgcctgcagattcaggcgctgaatatgtcctcatgcccactggacagcaaggggaaagtttgcagcgggcacggtgtgtgcagcaacgaggccacatgcatctgtgactttacatgggccggaacagattgctccataagagaccctgttcgcaatctgcatccccctaaagacgaaggcccaaaggtcaacatggcaacctccaggttgataggagccgtagccggtactattcttgctctcggggtgatattcggcggaacgggttggggcatcgagaatgtaaagaagcggagatttgatccaacccagcaggggcctatttag

SEQ ID NO: 300929 - DNA, 2100 bp, Artificial Sequence
  derived and/or modified sequence
atgcagaaggaaatcaccctgccatctcgactcatctattatatcaaccaggattccgagtctccatatcacgttctagacactaaggccaggcatcagcagaaacacaacaaagccgtgcacctagcccaggcttctttccaaattgaagcatttggatctaagttcattcttgacctcatcttaaacaacggtcttcttagctctgactacgtggaaattcattatgagaatggaaagccccagtattcaaaaggcggagagcattgctattaccacggatcaatccggggagtcaaggatagtaaagttgctctctctacatgcaatggccttcatggtatgttcgaagacgatacattcgtgtatatgatcgagcccctagagctagtccacgacgagaaatccaccggccgacctcacataattcaaaaaacgctggcgggacagtatagcaagcagatgaagaacctcacaatggagagaggggatcaatggccctttctttccgagctgcagtggctaaagagacggaagagggccgtcaatccttcccgaggcatctttgaagagatgaagtatctggagctgatgattgtgaatgatcataaaacttacaagaagcatcgttcaagtcacgcacacaccaataactttgcgaagtcggtagttaacctcgtggacagcatttacaaagagcagctaaacacaagggtggtcttggtggccgtagagacctggacagaaaaagatcaaatcgacatcacgactaaccctgtccaaatgctccacgagtttagtaaataccggcaacgcatcaagcagcacgccgacgctgtgcacctgatttccagagtcacatttcattacaagaggtcctcgttgagctactttggaggagtctgctctcgtacccgaggtgtgggggtaaatgagtatggactgcccatggccgtggcacaagtgctcagccagagtctcgcacagaacctgggcatccaatgggagccgtcctctagaaagccaaaatgcgactgcactgagagctggggaggttgtattatggaagaaactggtgtgtctcactccagaaagttttccaaatgtagcattttagaatatcgggactttctgcagcgcggtgggggtgcctgcctctttaatagacccaccaagctgttcgaacctacagagtgcggaaacggctacgtggaggctggtgaagagtgtgactgcggcttccacgtcgaatgctatggcttatgttgtaagaagtgctccctgtctaacggagcccactgttcagatgggccttgttgtaacaatacgtcgtgtctgttccagcccagagggtacgaatgtcgggatgcagttaatgaatgcgatatcactgagtattgtaccggcgattccggtcagtgtcccccaaacctgcataaacaggatggctacgcttgcaatcaaaaccagggcagatgttacaatggggaatgcaagacgcgcgacaatcagtgtcaatatatatggggcaccaaagccgctggctctgataaattctgctatgagaagctgaacaccgaaggcactgaaaagggtaactgcgggaaagatggcgaccgatggatccaatgcagcaaacacgatgttttctgtggttttttattgtgtactaacctgacccgggcaccaagaatcggccagctacagggggaaattatacccacatcattttaccaccagggccgtgtgattgactgttccggcgctcacgttgttctggatgacgacactgatgttggttatgttgaggacggcaccccgtgtggacccagcatgatgtgcctggacagaaaatgcctacagatccaggctctcaatatgtcttcgtgccctttagattcaaaggacgagggccctaaagcctgttttctaaagcgaactaagtgtaaatcttatcctaaacataggaagtgccaggaggaaaaggtcagatcttatagtgcacgccctcacctcaatcagttacggtggatggacacagctctgcattgttggatcttgggcatgacgtattcccagcagtgctattggaactattag

SEQ ID NO: 300930 - DNA, 2499 bp, Artificial Sequence
  derived and/or modified sequence
atgaagccccccggcagcagcagcagacagccccccctggccggctgcagcctggccggcgccagctgcggcccccagagaggccccgccggcagcgtgcccgccagcgcccccgccagaacccccccctgcagactgctgctggtgctgctgctgctgccccccctggccgccagcagcagacccagagcctggggcgccgccgcccccagcgccccccactggaacgagaccgccgagaagaacctgggcgtgctggccgacgaggacaacaccctgcagcagaacagcagcagcaacatcagctacagcaacgccatgcagaaggagatcaccctgcccagcagactgatctactacatcaaccaggacagcgagagcccctaccacgtgctggacaccaaggccagacaccagcagaagcacaacaaggccgtgcacctggcccaggccagcttccagatcgaggccttcggcagcaagttcatcctggacctgatcctgaacaacggcctgctgagcagcgactacgtggagatccactacgagaacggcaagccccagtacagcaagggcggcgagcactgctactaccacggcagcatcagaggcgtgaaggacagcaaggtggccctgagcacctgcaacggcctgcacggcatgttcgaggacgacaccttcgtgtacatgatcgagcccctggagctggtgcacgacgagaagagcaccggcagaccccacatcatccagaagaccctggccggccagtacagcaagcagatgaagaacctgaccatggagagaggcgaccagtggcccttcctgagcgagctgcagtggctgaagagaagaaagagagccgtgaaccccagcagaggcatcttcgaggagatgaagtacctggagctgatgatcgtgaacgaccacaagacctacaagaagcacagaagcagccacgcccacaccaacaacttcgccaagagcgtggtgaacctggtggacagcatctacaaggagcagctgaacaccagagtggtgctggtggccgtggagacctggaccgagaaggaccagatcgacatcaccaccaaccccgtgcagatgctgcacgagttcagcaagtacagacagagaatcaagcagcacgccgacgccgtgcacctgatcagcagagtgaccttccactacaagagaagcagcctgagctacttcggcggcgtgtgcagcagaaccagaggcgtgggcgtgaacgagtacggcctgcccatggccgtggcccaggtgctgagccagagcctggcccagaacctgggcatccagtgggagcccagcagcagaaagcccaagtgcgactgcaccgagagctggggcggctgcatcatggaggagaccggcgtgagccacagcagaaagttcagcaagtgcagcatcctggagtacagagacttcctgcagagaggcggcggcgcctgcctgttcaacagacccaccaagctgttcgagcccaccgagtgcggcaacggctacgtggaggccggcgaggagtgcgactgcggcttccacgtggagtgctacggcctgtgctgcaagaagtgcagcctgagcaacggcgcccactgcagcgacggcccctgctgcaacaacaccagctgcctgttccagcccagaggctacgagtgcagagacgccgtgaacgagtgcgacatcaccgagtactgcaccggcgacagcggccagtgcccccccaacctgcacaagcaggacggctacgcctgcaaccagaaccagggcagatgctacaacggcgagtgcaagaccagagacaaccagtgccagtacatctggggcaccaaggccgccggcagcgacaagttctgctacgagaagctgaacaccgagggcaccgagaagggcaactgcggcaaggacggcgacagatggatccagtgcagcaagcacgacgtgttctgcggcttcctgctgtgcaccaacctgaccagagcccccagaatcggccagctgcagggcgagatcatccccaccagcttctaccaccagggcagagtgatcgactgcagcggcgcccacgtggtgctggacgacgacaccgacgtgggctacgtggaggacggcaccccctgcggccccagcatgatgtgcctggacagaaagtgcctgcagatccaggccctgaacatgagcagctgccccctggacagcaagggcaaggtgtgcagcggccacggcgtgtgcagcaacgaggccacctgcatctgcgacttcacctgggccggcaccgactgcagcatcagagaccccgtgagaaacctgcacccccccaaggacgagggccccaaggtgaacatggccaccagcagactgatcggcgccgtggccggcaccatcctggccctgggcgtgatcttcggcggcaccggctggggcatcgagaacgtgaagaagagaagattcgaccccacccagcagggccccatctag

SEQ ID NO: 300931 - DNA, 2100 bp, Artificial Sequence
  derived and/or modified sequence
atgcagaaggagatcaccctgcccagcagactgatctactacatcaaccaggacagcgagagcccctaccacgtgctggacaccaaggccagacaccagcagaagcacaacaaggccgtgcacctggcccaggccagcttccagatcgaggccttcggcagcaagttcatcctggacctgatcctgaacaacggcctgctgagcagcgactacgtggagatccactacgagaacggcaagccccagtacagcaagggcggcgagcactgctactaccacggcagcatcagaggcgtgaaggacagcaaggtggccctgagcacctgcaacggcctgcacggcatgttcgaggacgacaccttcgtgtacatgatcgagcccctggagctggtgcacgacgagaagagcaccggcagaccccacatcatccagaagaccctggccggccagtacagcaagcagatgaagaacctgaccatggagagaggcgaccagtggcccttcctgagcgagctgcagtggctgaagagaagaaagagagccgtgaaccccagcagaggcatcttcgaggagatgaagtacctggagctgatgatcgtgaacgaccacaagacctacaagaagcacagaagcagccacgcccacaccaacaacttcgccaagagcgtggtgaacctggtggacagcatctacaaggagcagctgaacaccagagtggtgctggtggccgtggagacctggaccgagaaggaccagatcgacatcaccaccaaccccgtgcagatgctgcacgagttcagcaagtacagacagagaatcaagcagcacgccgacgccgtgcacctgatcagcagagtgaccttccactacaagagaagcagcctgagctacttcggcggcgtgtgcagcagaaccagaggcgtgggcgtgaacgagtacggcctgcccatggccgtggcccaggtgctgagccagagcctggcccagaacctgggcatccagtgggagcccagcagcagaaagcccaagtgcgactgcaccgagagctggggcggctgcatcatggaggagaccggcgtgagccacagcagaaagttcagcaagtgcagcatcctggagtacagagacttcctgcagagaggcggcggcgcctgcctgttcaacagacccaccaagctgttcgagcccaccgagtgcggcaacggctacgtggaggccggcgaggagtgcgactgcggcttccacgtggagtgctacggcctgtgctgcaagaagtgcagcctgagcaacggcgcccactgcagcgacggcccctgctgcaacaacaccagctgcctgttccagcccagaggctacgagtgcagagacgccgtgaacgagtgcgacatcaccgagtactgcaccggcgacagcggccagtgcccccccaacctgcacaagcaggacggctacgcctgcaaccagaaccagggcagatgctacaacggcgagtgcaagaccagagacaaccagtgccagtacatctggggcaccaaggccgccggcagcgacaagttctgctacgagaagctgaacaccgagggcaccgagaagggcaactgcggcaaggacggcgacagatggatccagtgcagcaagcacgacgtgttctgcggcttcctgctgtgcaccaacctgaccagagcccccagaatcggccagctgcagggcgagatcatccccaccagcttctaccaccagggcagagtgatcgactgcagcggcgcccacgtggtgctggacgacgacaccgacgtgggctacgtggaggacggcaccccctgcggccccagcatgatgtgcctggacagaaagtgcctgcagatccaggccctgaacatgagcagctgccccctggacagcaaggacgagggccccaaggcctgcttcctgaagagaaccaagtgcaagagctaccccaagcacagaaagtgccaggaggagaaggtgagaagctacagcgccagaccccacctgaaccagctgagatggatggacaccgccctgcactgctggatcctgggcatgacctacagccagcagtgctactggaactactag

SEQ ID NO: 300932 - DNA, 201 bp, Artificial Sequence
  derived and/or modified sequence
atgggcaccagcagcatcttcctgtgcgtgctgttcctgtgcggcgcccttggactcaccatgtctccagctcgcgggcggctgaggtgttatatctgcggctttacaaagccctgtcaccccgtccctacagaatgcagagacgatgaggcctgcgggataagcatcggcaccagcgaccagagtgaaatcaccgagtag

SEQ ID NO: 300933 - DNA, 303 bp, Artificial Sequence
  derived and/or modified sequence
atgggaacctccagcatctttctgtgcgtgctattcttatgcggggcactgggactcaccatgagtccggcacgcggacggctgcgctgttatatctgtggctttaccaagccttgtcatcccgtccctaccgagtgtagggatgatgaggcctgcggaatctcaatcggaacaagtgggaggactttagttcagtggccgttcagccggagacttcctacttccattcacccggcttttcctgtggctccagcttctgcctgcttgtttcacccaaccgaccagagtgagatcaccgagtag

SEQ ID NO: 300934 - protein, 457 aa, Artificial Sequence
  derived and/or modified sequence
MILEVKPQTNASCEYSASHKQDLLLGSTGSISCPSLSCQSDAQSPAVTWYKNGKLLSVERSNRIVVDEVYDYHQGTYVCDYTQSDTVSSWTVRAVVQVRTIVGDTKLKPDILDPVEDTLEVELGKPLTISCKARFGFERVFNPVIKWYIKDSDLEWEVSVPEAKSIKSTLKDEIIERNIILEKVTQRDLRRKFVCFVQNSIGNTTQSVQLKEKRGVVLLYILLGTIGTLVAVLAASALLYRHWIEIVLLYRTYQSKDQTLGDKKDFDAFVSYAKWSSFPSEATSSLSEEHLALSLFPDVLENKYGYSLCLLERDVAPGGVYAEDIVSIIKRSRRGIFILSPNYVNGPSIFELQAAVNLALDDQTLKLILIKFCYFQEPESLPHLVKKALRVLPTVTWRGLKSVPPNSRFWAKMRYHMPVKNSQGFTWNQLRITSRIFQWKGLSRTETTGRSSQPKEW

SEQ ID NO: 300935 - DNA, 1374 bp, Artificial Sequence
  derived and/or modified sequence
atgatcctcgaagtcaaaccccagactaatgcctcgtgcgagtactcagcttcccacaagcaggaccttttgctaggatcgactgggtccattagttgcccttctctctcctgtcagtcagacgcgcaatctcccgctgtgacatggtataagaatgggaagctgttgagtgtggaaagaagcaaccggatagtggtcgacgaggtatacgattaccaccaagggacatatgtgtgtgattacactcaatctgacaccgtcagcagctggacagttcgggctgttgtgcaggtgcggaccattgtcggagacacgaagctgaaaccagatatcctggatcctgtagaagatacattggaagtggagctcgggaaacccttaaccatttcctgcaaggcccgatttggctttgaacgcgtcttcaaccccgtcatcaaatggtatataaaggatagtgacttggaatgggaagtttcagtgccagaagcaaagagcattaaaagcacgctgaaggatgaaattatcgagcgcaatatcatcctggagaaggtgactcagagggacctgagacgaaagttcgtttgtttcgtacagaatagcatcggcaataccactcagtctgtgcagttaaaggagaaacgcggcgttgtcctcctctatatcctgctgggaacaatcggtaccctagtggccgtcttggctgccagtgccttgctgtataggcactggatcgagatagtgcttctttaccggacataccagagcaaagaccaaacccttggagataagaaggacttcgatgccttcgtgtcttacgctaagtggtcgtccttccccagcgaggccacctccagcctgagcgaagagcatctggcccttagcctcttccccgacgtgctggagaataagtacgggtactctctgtgcctgcttgagagggacgttgcgcctgggggggtgtatgccgaggacatcgtcagcatcatcaagaggagccgtcgaggaatcttcattttgagccccaattatgtaaatgggccctccattttcgagttacaagcagccgtgaacctggccttggatgaccagactcttaagctgatactgatcaagttttgttactttcaggagcccgagtcccttcctcatctggtaaaaaaggctttgcgagtgctgcccactgtcacctggaggggactgaagagcgtgcctcctaacagcagattctgggctaaaatgcgctatcatatgcctgtcaagaacagccagggcttcacgtggaaccagctgcgtattacctcccggatatttcagtggaagggactgagcagaactgagaccacaggtcgatcttctcagcctaaagagtggtag

SEQ ID NO: 300936 - DNA, 1374 bp, Artificial Sequence
  derived and/or modified sequence
atgatcctggaggtgaagccccagaccaatgccagctgtgagtacagcgccagccacaagcaggacctgctgctgggcagcacaggcagcatcagctgccccagcctgagctgccagagtgatgcccagagccctgctgtgacctggtacaagaatggcaagctgctgtctgtggagaggagcaaccgcatcgtggtggatgaggtgtatgactaccaccagggcacctacgtgtgtgactacacccagagcgacacagtgtcctcctggacagtgcgggctgtggtgcaggtgaggaccatcgtgggggacaccaagctgaagccagacatcctggaccctgtggaggacaccctggaggtggagctgggcaagcccctgaccatcagctgcaaggccaggtttggatttgagagggtcttcaaccctgtgatcaagtggtacatcaaggacagcgacctggagtgggaggtgtctgtgcctgaggccaagagcatcaagagcaccctgaaggatgagatcattgaaagaaacatcatcctggagaaggtgacccagagggacctgcggaggaagtttgtgtgctttgtgcagaacagcatcggcaacaccacccagagcgtgcagctgaaggagaagaggggcgtggtgctgctgtacatcctgctgggcaccatcggcaccctggtggccgtgctggccgccagcgccctgctgtaccgccactggattgagatcgtgctgctgtaccgcacctaccagagcaaggaccagaccctgggggacaagaaggactttgatgcctttgtgtcctatgccaagtggagcagcttccccagcgaggccaccagcagcctgtctgaggagcacctggccctgagcctcttcccagatgtgctggagaacaagtatggctacagcctgtgcctgctggagagagatgtggcccctggaggagtgtatgcagaagatattgtgtccatcatcaagaggagcagaagaggcatcttcatcctgagccccaactacgtgaatggccccagcatctttgagctgcaggccgctgtgaacctggccctggatgaccagaccctgaagctgatcctgatcaagttctgctacttccaggagcctgagagcctgccccacctggtgaagaaggccctgcgggtgctgcccaccgtgacctggaggggcctgaagtctgtgccccccaacagccgcttctgggccaagatgagataccacatgcctgtgaagaacagccagggcttcacctggaaccagctgcgcatcaccagccgcatcttccagtggaagggcctgagcaggacagagaccaccggccgcagcagccagcccaaggagtggtag

SEQ ID NO: 300937 - DNA, 1374 bp, Artificial Sequence
  derived and/or modified sequence
atgatcctggaggtgaagccccagaccaacgccagctgcgagtactcggcgtcacacaaacaggatctcctactcggcagcaccggcagcatcagctgccccagtctgtcttgtcagagcgacgcacagagcccagccgtcacctggtacaaaaatggcaagctgctaagcgttgagcgtagcaatcgaatcgttgtggatgaagtctacgactaccatcaggggacttatgtgtgcgattacacacagtcagacactgttagttcatggacggtacgggctgttgttcaggttcgtaccattgtgggagacactaaactaaaaccagatatcctcgacccagtagaagataccctggaggtcgaactaggtaaaccgctgaccatctcatgtaaggcccgctttggcttcgagagagtattcaaccctgtgattaaatggtacataaaggacagcgatctggaatgggaagtgagtgtcccagaggccaagagcattaagtccacattgaaggacgaaattattgaaagaaacattatcctggaaaaagtcacccagcgcgacctgagaaggaagtttgtctgctttgtgcagaattctatcggtaacacaacccagagcgttcagctgaaggaaaaaaggggagtggtactcttgtacattttgctgggtacaattggaactctggtggccgtccttgcggcctccgctctgctctataggcattggatcgagattgtgctcctttatcgtacctatcagagcaaagatcagacgcttggagataaaaaagacttcgatgcattcgtatcttatgctaagtggtcaagctttcccagcgaagccactagtagtttaagcgaagagcatctggccttgagcctgttcccagacgtacttgagaacaagtatgggtatagcctgtgccttcttgagagagatgtggcgccaggcggggtttatgctgaagacatcgtgagtattattaaaagatctaggagggggatttttatccttagccctaattacgtaaacgggccaagcatctttgaactccaagcagcagtcaacctagccctcgatgaccaaactcttaaactgattctaataaagttctgctacttccaggagcctgagtccttgcctcaccttgttaaaaaggccctgagagtgctgcccacagtgacctggcggggtctgaagtctgtgcctccaaacagtaggttttgggcgaaaatgcgctaccatatgcccgtcaagaacagccaggggtttacgtggaaccagttgagaattactagcaggatctttcagtggaagggactctcgagaaccgagactaccggtagatcctcccagccgaaggaatggtag

SEQ ID NO: 300938 - DNA, 1374 bp, Artificial Sequence
  derived and/or modified sequence
atgatattagaggtcaaaccccagaccaacgcgtcgtgtgaatactcggccagtcataaacaggacttgctgctgggttccactgggtccatttcttgccctagtctctcttgccagagtgacgcccagagtccagccgtgacctggtacaagaatggtaaattgctctccgttgagagatcaaacaggatcgtcgtggacgaggtctatgattaccatcagggcacttacgtgtgtgattacacccaatccgacacagtttcaagttggacagttcgggctgttgtccaggtgagaactatagtaggggataccaaactgaaaccggacattcttgacccagtggaggatacattagaggtagagctaggtaagcctttaacaatttcatgcaaagcacggttcgggtttgaacgtgtctttaatcctgtgatcaagtggtatataaaagacagtgatttagaatgggaggtgtcggtccccgaggctaagtcaattaaatctactttgaaggatgagatcatcgaacggaatattattctggagaaggtgacacagagggacttaaggcgcaaatttgtttgcttcgtgcagaattccattggaaacacgactcaaagcgtgcagctcaaagagaagaggggggtggtgttactttacattcttctgggcaccatagggaccctggtagccgtcctggccgctagcgccctgctttatcgacattggattgagattgtgttgctgtataggacctaccagtctaaggaccagaccctgggggacaaaaaggatttcgacgcgttcgtgagctatgccaagtggtccagttttccttctgaagccaccagcagtctgtccgaagagcacctcgccttgtctctctttccggatgtgctcgagaacaagtatggttattctctatgtcttttagaacgcgacgtggctcctggcggtgtctacgccgaggacatcgtcagcatcattaaacgtagtaggcgagggatctttatcttgtcccccaattatgtgaacggaccctcaatctttgaactgcaagcagctgtgaatctggccctggacgatcagaccttaaaactcatcctcattaagttctgctacttccaggagcccgaaagccttccccatttggttaagaaggccctgcgagtactgccaacagttacttggagaggactcaagtccgtcccgccaaacagcaggttctgggctaagatgagatatcatatgccagtaaaaaattcacaaggcttcacctggaatcaacttagaatcacctccaggattttccaatggaagggcctatctagaacagagaccaccggcaggtctagccagcccaaagagtggtag

SEQ ID NO: 300939 - DNA, 1374 bp, Artificial Sequence
  derived and/or modified sequence
atgatcctggaggtgaagccccagaccaacgccagctgcgagtacagcgccagccacaagcaggacctgctgctgggcagcaccggcagcatcagctgccccagcctgagctgccagagcgacgcccagagccccgccgtgacctggtacaagaacggcaagctgctgagcgtggagagaagcaacagaatcgtggtggacgaggtgtacgactaccaccagggcacctacgtgtgcgactacacccagagcgacaccgtgagcagctggaccgtgagagccgtggtgcaggtgagaaccatcgtgggcgacaccaagctgaagcccgacatcctggaccccgtggaggacaccctggaggtggagctgggcaagcccctgaccatcagctgcaaggccagattcggcttcgagagagtgttcaaccccgtgatcaagtggtacatcaaggacagcgacctggagtgggaggtgagcgtgcccgaggccaagagcatcaagagcaccctgaaggacgagatcatcgagagaaacatcatcctggagaaggtgacccagagagacctgagaagaaagttcgtgtgcttcgtgcagaacagcatcggcaacaccacccagagcgtgcagctgaaggagaagagaggcgtggtgctgctgtacatcctgctgggcaccatcggcaccctggtggccgtgctggccgccagcgccctgctgtacagacactggatcgagatcgtgctgctgtacagaacctaccagagcaaggaccagaccctgggcgacaagaaggacttcgacgccttcgtgagctacgccaagtggagcagcttccccagcgaggccaccagcagcctgagcgaggagcacctggccctgagcctgttccccgacgtgctggagaacaagtacggctacagcctgtgcctgctggagagagacgtggcccccggcggcgtgtacgccgaggacatcgtgagcatcatcaagagaagcagaagaggcatcttcatcctgagccccaactacgtgaacggccccagcatcttcgagctgcaggccgccgtgaacctggccctggacgaccagaccctgaagctgatcctgatcaagttctgctacttccaggagcccgagagcctgccccacctggtgaagaaggccctgagagtgctgcccaccgtgacctggagaggcctgaagagcgtgccccccaacagcagattctgggccaagatgagataccacatgcccgtgaagaacagccagggcttcacctggaaccagctgagaatcaccagcagaatcttccagtggaagggcctgagcagaaccgagaccaccggcagaagcagccagcccaaggagtggtag

SEQ ID NO: 300940 - DNA, 135 bp, Artificial Sequence
  derived and/or modified sequence
atgttatgcttgggctggattttcctctggctcgtcgcaggagagcggattaagggttttaatatttctggttgttccactaaaaagctgctgtggacctatagcacgcgatctgaggaggagttcgtgctgtag

SEQ ID NO: 300941 - DNA, 587 bp, Artificial Sequence
  derived and/or modified sequence
tctctccctgggtctcagatccctgttgacactgctttctccagcactttcctctctctcccccgtttctcaccaaaaagttttgtgggtaaagtttagttcattatttctgccagagacagctgaaggtgtagccttgaccaactgaaagggaaatcttcatcctctgaaaaaacatatgtgattctcaaaaaacgcatctggaaaattgataaagaagcgattctgtagattctcccagcgctgttgggctctcaattccttctgtgaaggacaacatatggtgatggggaaatcagaagctttgagaccctctacacctggatatgaatcccccttctaatacttaccagaaatgaaggggatactcagggcagagttctgaatctcaaaacactctactctggcaaaggaatgaagttattggagtgatgacaggaacacgggagaacaatgctctgtttgggctggatatttctttggcttgttgcaggagagcgaattaaaggatttaatatttcaggttgttccacaaaaaaactcctttggacatattctacaaggagtgaagaggaatttgtcttatt

SEQ ID NO: 300942 - DNA, 135 bp, Artificial Sequence
  derived and/or modified sequence
atgctgtgcctgggctggatcttcctgtggctggtggccggggagcgcatcaagggcttcaacatcagcggctgcagcaccaagaagctgctgtggacctacagcaccaggtctgaggaggagtttgtgctgtag

SEQ ID NO: 300943 - DNA, 135 bp, Artificial Sequence
  derived and/or modified sequence
atgctgtgcctgggctggatcttcctgtggctggtggccggcgagagaatcaaaggtttcaacatctcaggatgctctacaaaaaaactgctctggacttacagcaccagatcagaggaggaatttgtcttatag

SEQ ID NO: 300944 - DNA, 135 bp, Artificial Sequence
  derived and/or modified sequence
atgctctgtcttggttggattttcctttggctggtcgccggtgaacggataaaggggttcaacatttctggctgttctaccaagaagttactgtggacatactccactcgttccgaagaagaattcgtgttatag

SEQ ID NO: 300945 - DNA, 135 bp, Artificial Sequence
  derived and/or modified sequence
atgctgtgcctgggctggatcttcctgtggctggtggccggcgagagaatcaagggcttcaacatcagcggctgcagcaccaagaagctgctgtggacctacagcaccagaagcgaggaggagttcgtgctgtag

SEQ ID NO: 300946 - protein, 172 aa, Artificial Sequence
  derived and/or modified sequence
MWSLLLCGLSIALPLSVTADGCKDIFMKNEILSASQPFAFNCTFPPITSGEVSVTWYKNSSKIPVSKIIQSRIHQDETWILFLPMEWGDSGVYQCVIKGRDSCHRIHVNLTVFEKHWCDTSIGGLPNLSDEYKQILHLGKDDSLTCHLHFPKSCVLGPIKWYKDCNEIKGER

SEQ ID NO: 300947 - DNA, 519 bp, Artificial Sequence
  derived and/or modified sequence
atgtggtcgctgctgctctgcgggctttcaatagccttaccgctgtcagttactgctgacgggtgtaaggacatcttcatgaagaacgaaattctttccgcctcccagccgtttgcattcaactgcactttcccgccaataacctcaggcgaggtgagcgttacttggtacaagaactccagcaaaatccccgtgtccaagatcattcaatccaggattcaccaagatgaaacgtggattctattcctgcccatggaatggggggattcaggagtgtaccagtgcgtgatcaaggggcgcgatagctgccaccgaattcacgtgaacctaaccgtgttcgagaaacattggtgtgatacatccatcggcggactgcctaatttatccgacgaatacaagcagattctccacctaggcaaggatgactctctgacctgccacctgcactttccgaaaagctgtgtgctcggccccataaagtggtacaaggactgtaacgagataaagggcgagaggtag

SEQ ID NO: 300948 - DNA, 557 bp, Artificial Sequence
  derived and/or modified sequence
ctttctcctttcccgctggcccttgccagcccggtttggggatgtggtccttgctgctctgcgggttgtccatcgcccttccactgtctgtcacagcagatggatgcaaggacatttttatgaaaaatgagatactttcagcaagccagccttttgcttttaattgtacattccctcccataacatctggggaagtcagtgtaacatggtataaaaattctagcaaaatcccagtgtccaaaatcatacagtctagaattcaccaggacgagacttggattttgtttctccccatggaatggggggactcaggagtctaccaatgtgttataaagggtagagacagctgtcatagaatacatgtaaacctaactgtttttgaaaaacattggtgtgacacttccataggtggtttaccaaatttatcagatgagtacaagcaaatattacatcttggaaaagatgatagtctcacatgtcatctgcacttcccgaagagttgtgttttgggtccaataaagtggtataaggactgtaacgagattaaaggggagcgg

SEQ ID NO: 300949 - DNA, 519 bp, Artificial Sequence
  derived and/or modified sequence
atgtggagcctgctgctgtgtggcctgagcatcgccctgcccctgtctgtgacagcagatggctgcaaggacatcttcatgaagaatgagatcctgagcgccagccagccctttgccttcaactgcaccttcccccccatcaccagcggggaggtgtctgtgacctggtacaagaacagcagcaagatccctgtgtccaagatcatccagagccgcatccaccaggatgagacctggatcctcttcctgcccatggagtggggagacagcggcgtgtaccagtgtgtgatcaagggccgggacagctgccaccgcatccacgtgaacctgactgtgtttgagaagcactggtgtgacaccagcatcggcggcctgcccaacctgagtgatgagtacaagcagatcctgcacctgggcaaggatgacagcctgacctgccacctgcacttccccaagagctgtgtgctgggccccatcaagtggtacaaggactgcaatgagatcaagggggagaggtag

SEQ ID NO: 300950 - DNA, 519 bp, Artificial Sequence
  derived and/or modified sequence
atgtggagcctgctgctgtgcggcctgagcatcgccctgcccctgtctgtgacagctgacggttgcaaagacatctttatgaagaatgaaattctctccgcgtcccaaccattcgcattcaattgcacatttccaccaattacaagtggggaggtgagcgtcacctggtacaagaattcatctaagattccggtatctaaaattatccagagccgtatacaccaagatgagacctggatcctcttcttacccatggagtggggggactccggggtgtatcaatgtgttattaagggccgcgactcctgtcataggattcacgtcaacctgaccgtgtttgagaagcattggtgcgatacttcaatagggggcctgcccaatctgagtgatgagtacaaacagattttacacctgggcaaagacgactcattaacctgccacctgcacttccccaagagctgcgtgctgggtccgataaaatggtacaaagattgtaacgaaattaagggcgaacgctag

SEQ ID NO: 300951 - DNA, 519 bp, Artificial Sequence
  derived and/or modified sequence
atgtggagtctgctgctgtgtggactgagcattgcactgccactcagcgtaacagccgacggctgtaaggatatcttcatgaagaacgagatcttatccgcctctcaacccttcgcatttaattgtaccttcccaccgatcacatctggggaggtgtccgtgacttggtataagaatagcagcaaaattcccgtcagtaaaatcatccagagccgaatccatcaagatgagacctggatactattcctgcctatggaatggggagactctggagtgtaccaatgtgtgattaagggcagagatagttgccacagaattcacgtaaatctgaccgtctttgagaagcattggtgcgacacgtcaatcgggggacttcctaacttgagtgacgaatacaaacagatcttgcacctggggaaggacgactctctgacatgtcacctgcattttcccaaatcctgcgttctggggccaataaagtggtataaggactgcaatgaaatcaagggagagaggtag

SEQ ID NO: 300952 - DNA, 519 bp, Artificial Sequence
  derived and/or modified sequence
atgtggagcctgctgctgtgcggcctgagcatcgccctgcccctgagcgtgaccgccgacggctgcaaggacatcttcatgaagaacgagatcctgagcgccagccagcccttcgccttcaactgcaccttcccccccatcaccagcggcgaggtgagcgtgacctggtacaagaacagcagcaagatccccgtgagcaagatcatccagagcagaatccaccaggacgagacctggatcctgttcctgcccatggagtggggcgacagcggcgtgtaccagtgcgtgatcaagggcagagacagctgccacagaatccacgtgaacctgaccgtgttcgagaagcactggtgcgacaccagcatcggcggcctgcccaacctgagcgacgagtacaagcagatcctgcacctgggcaaggacgacagcctgacctgccacctgcacttccccaagagctgcgtgctgggccccatcaagtggtacaaggactgcaacgagatcaagggcgagagatag

SEQ ID NO: 300953 - protein, 457 aa, Artificial Sequence
  derived and/or modified sequence
MTGLVSLSYFPLSTRSCALQSCSPVWGCGPCCSAGCPSPFHCLSQQDCNEIKGERFTVLETRLLVSNVSAEDRGNYACQAILTHSGKQYEVLNGITVSIKRAGYGGSVPKIIYPKNHSIEVQLGTTLIVDCNVTDTKDNTNLRCWRVNNTLVDDYYDESKRIREGVETHVSFREHNLYTVNITFLEVKMEDYGLPFMCHAGVSTAYIILQLPAPDFRAYLIGGLIALVAVAVSVVYIYNIFKIDIVLWYRSAFHSTETIVDGKLYDAYVLYPKPHKESQRHAVDALVLNILPEVLERQCGYKLFIFGRDEFPGQAVANVIDENVKLCRRLIVIVVPESLGFGLLKNLSEEQIAVYSALIQDGMKVILIELEKIEDYTVMPESIQYIKQKHGAIRWHGDFTEQSQCMKTKFWKTVRYHMPPRRCRPFPPVQLLQHTPCYRTAGPELGSRRKKCTLTTG

SEQ ID NO: 300954 - DNA, 1374 bp, Artificial Sequence
  derived and/or modified sequence
atgactgggctggtttctctttcatattttccattatctactcgttcctgtgcactgcagagctgctctccggtgtggggttgcggtccttgctgcagcgcagggtgcccatcccccttccactgcctgagccagcaggactgtaacgaaatcaaaggcgaacgatttacagtgctcgagacccgtctgttggtctcaaacgtctccgccgaggatcgaggaaactacgcgtgccaggccatcttgactcactctggaaagcagtatgaagtgctcaatggaattaccgtgagtatcaaaagggccggatacggcggtagtgtgcctaaaattatttaccctaagaaccactccatagaggtccagcttggaaccacgttaatcgtggactgcaacgtaaccgacactaaagataacacaaatctgcggtgctggcgtgtcaacaacactctcgtcgacgactattatgacgagtcaaagcggatccgggagggagtggagacacatgtgtcctttcgggagcataatctctacacagtgaacatcactttccttgaggtgaaaatggaggattacgggctccccttcatgtgtcacgctggcgtatcaacggcgtatataatcctgcagctgcccgccccagacttcagggcatacctgatcggcgggctcatcgcactggtggcagtggccgtgagcgtggtttacatttataacatcttcaagatagacatcgtactgtggtatcgatcagcttttcacagcacggagacaatcgttgatggcaagctctatgatgcttacgtgctgtatcccaagccacacaaggaaagccagagacatgccgtggacgctctggttctgaatatcctgcccgaagttctggaaagacagtgcggctacaagttatttatttttggcagggatgagttccctggccaggccgtggccaacgtgattgacgaaaacgtgaagctctgccgcagactgatcgtcatcgtggtacccgaaagcttaggtttcggactccttaagaacctgtctgaggagcaaattgccgtgtatagtgcgcttattcaggacggtatgaaggtgattctgatcgagttggaaaaaatcgaagactacaccgtgatgcctgagagtattcagtatataaaacaaaagcacggggcaattcgctggcacggcgacttcactgaacaaagccagtgtatgaagaccaaattctggaagacagtccgctatcacatgccccctaggcggtgtagaccctttccgcctgtgcagctgctccagcatacgccatgctaccgaacggccggcccagaattgggatcccggcgaaaaaaatgcaccctaaccactgggtag

SEQ ID NO: 300955 - DNA, 1480 bp, Artificial Sequence
  derived and/or modified sequence
ggaagtggcatgacagggctcgtgtccctgtcatattttccactctccacgaggtcctgcgcgcttcaatcctgcagcccggtttggggatgtggtccttgctgctctgcgggttgtccatcgcccttccactgtctgtcacagcaggactgtaacgagattaaaggggagcggttcactgttttggaaaccaggcttttggtgagcaatgtctcggcagaggacagagggaactacgcgtgtcaagccatactgacacactcagggaagcagtacgaggttttaaatggcatcactgtgagcattaaaagagctggatatggaggaagtgtccctaaaatcatttatccaaaaaatcattcaattgaagtacagcttggtaccactctgattgtggactgcaatgtaacagacaccaaggataatacaaatctacgatgctggagagtcaataacactttggtggatgattactatgatgaatccaaacgaatcagagaaggggtggaaacccatgtctcttttcgggaacataatttgtacacagtaaacatcaccttcttggaagtgaaaatggaagattatggccttcctttcatgtgccacgctggagtgtccacagcatacattatattacagctcccagctccggattttcgagcttacttgataggagggcttatcgccttggtggctgtggctgtgtctgttgtgtacatatacaacatttttaagatcgacattgttctttggtatcgaagtgccttccattctacagagaccatagtagatgggaagctgtatgacgcctatgtcttataccccaagccccacaaggaaagccagaggcatgccgtggatgccctggtgttgaatatcctgcccgaggtgttggagagacaatgtggatataagttgtttatattcggcagagatgaattccctggacaagccgtggccaatgtcatcgatgaaaacgttaagctgtgcaggaggctgattgtcattgtggtccccgaatcgctgggctttggcctgttgaagaacctgtcagaagaacaaatcgcggtctacagtgccctgatccaggacgggatgaaggttattctcattgagctggagaaaatcgaggactacacagtcatgccagagtcaattcagtacatcaaacagaagcatggtgccatccggtggcatggggacttcacggagcagtcacagtgtatgaagaccaagttttggaagacagtgagataccacatgccgcccagaaggtgtcggccgtttcctccggtccagctgctgcagcacacaccttgctaccgcaccgcaggcccagaactaggctcaagaagaaagaagtgtactctcacgactggctaagacttgctggactgacacctatggctggaagatgacttgttttgctccatgtctcctcattcctacacctattttctgctgcaggatgaggctaggg

SEQ ID NO: 300956 - DNA, 1374 bp, Artificial Sequence
  derived and/or modified sequence
atgacaggcctggtgtccctgagctacttccccctgagcaccaggagctgtgccctgcagagctgcagccctgtgtggggctgcggcccctgctgcagcgctggctgccccagccccttccactgcctgagccagcaggactgcaatgagatcaagggggagcgcttcaccgtgctggagacccggctgctggtgtccaatgtgtctgcagaagatcggggcaactatgcctgccaggccatcctgacccacagcggcaagcagtatgaggtgctgaatggcatcaccgtgtccatcaagagagctggctacggcggctctgtgcccaagatcatctaccccaagaaccacagcattgaggtgcagctgggcaccaccctcatcgtggactgcaatgtgacagacaccaaggacaacaccaacctgcgctgctggagggtgaacaacaccctggtggatgactactatgatgagagcaagaggatccgggagggcgtggagacccacgtgtccttccgggagcacaacctgtacacagtgaacatcaccttcctggaggtgaagatggaggactatggcctgcccttcatgtgccacgccggcgtgtccacagcctacatcatcctgcagctgcctgccccagacttccgggcctacctgattggaggcctgattgccctggtggccgtggccgtgtctgtggtgtacatctacaacatcttcaagattgatattgtgctgtggtacagaagtgccttccacagcacagagaccatcgtggatggcaagctgtatgatgcctacgtgctgtaccccaagccccacaaggagagccagagacatgctgtggatgccctggtgctgaacatcctgcctgaggtgctggagcggcagtgtggctacaagctgttcatcttcggcagagatgagttccctggccaggccgtggccaacgtgattgatgaaaatgtgaagctgtgccggcggctgattgtgattgtggtgcctgagagcctgggcttcggcctgctgaagaacctgtctgaggagcagattgctgtgtacagcgccctgatccaggacggcatgaaggtgatcctgattgagctggagaagattgaggactacacagtgatgcctgagagcatccagtacatcaagcagaagcacggggccatccgctggcacggggacttcacagagcagagccagtgcatgaagaccaagttctggaagacagtgcgctaccacatgccaccccggcgctgccggcccttcccccctgtgcagctgctgcagcacaccccctgctacagaacagctggccctgagctgggcagcaggaggaagaagtgcaccctgaccaccggctag

SEQ ID NO: 300957 - DNA, 1374 bp, Artificial Sequence
  derived and/or modified sequence
atgaccggcctggtgagcctgagctacttccccctgagcacccggagttgtgccttgcaaagctgttcacccgtatggggatgcggtccatgttgcagcgcaggatgtccaagcccattccactgcctatctcagcaggactgcaatgagataaaaggtgagagatttacagtcctcgagacccgactgcttgtcagcaacgtgagcgctgaagatcggggcaactatgcgtgccaagccatccttacccatagcggtaaacagtacgaggtcttaaatgggatcacggtttccattaagagagccggctacggtggatcagtgcctaaaatcatctatcctaaaaatcacagcatcgaagtccagctgggtacaaccttgatagtggattgcaatgtaactgacacaaaggacaataccaacctgcgctgttggagagtaaataacactttagtggatgattattatgacgagtctaaacgtatccgggaaggagtcgagacacacgtctctttcagggaacacaatctgtacaccgtcaatatcacctttctcgaagttaagatggaggattacggtctgcccttcatgtgccatgcgggtgtctccacagcgtacattatcctgcaattaccggcccccgacttcagggcctacctaattgggggattgattgcactggtcgctgtggcagttagcgtggtctacatctacaacatcttcaagatagacattgtgctctggtatcgtagcgcctttcactccacggaaaccatcgtggacggtaagttgtacgatgcttacgtgctctacccaaagccacacaaggaatcccagaggcatgcggtggacgctcttgttctcaatatcctccccgaggttcttgagcgacagtgtgggtacaaactgtttattttcgggcgcgatgaattcccagggcaggccgtagcaaatgtcattgacgagaacgtgaaactgtgtagaagacttatcgtcatcgtggtgccagagagtctaggatttggcctgcttaaaaacctttccgaggagcagatcgcagtgtattccgcacttatccaggatggcatgaaagtgattctgatcgaactggagaaaattgaagactacacagtcatgccagagtccatccagtatattaaacagaaacatggcgctatacggtggcatggcgacttcacagagcagtcccagtgtatgaagactaagttctggaaaaccgtgcgatatcacatgcctcctcgccgctgccgccctttcccacccgttcaactgctccaacatacaccctgctataggacagccggtccggaattgggaagtagacggaaaaagtgcaccctcaccacaggttag

SEQ ID NO: 300958 - DNA, 1374 bp, Artificial Sequence
  derived and/or modified sequence
atgacgggcctggtgtctctttcatacttcccacttagcactagaagctgcgctttgcagtcctgctccccagtctggggatgcggaccctgctgtagtgccggatgccccagtccatttcactgcctgtcgcaacaggattgcaacgagatcaagggagaacggtttacggtcctggagacgcggctgctcgtgagcaacgtgtccgccgaagaccggggaaattacgcctgccaagccatccttacgcatagcggaaaacagtacgaggttctgaatgggatcacagtaagcattaagcgcgcaggctatggtggctcggtacccaaaatcatatatcccaagaaccattccattgaagttcagctgggaaccaccctgatcgtggactgcaatgtgacagataccaaggataataccaatctgcgctgttggcgcgttaacaataccttggtcgacgattattacgacgaatccaagcgtatccgtgagggggtcgagacacacgttagttttcgcgagcacaacctatataccgtaaacataaccttcctggaggtcaagatggaggattatggtctcccctttatgtgtcatgccggagttagcactgcgtacattattttacaactgcctgcccctgactttagggcctacttgattggaggccttattgcattggtggccgtagccgtaagtgttgtttatatatacaatatctttaagatagacatagtcctctggtaccggtccgcgtttcactccactgaaactatagttgacggtaagctttatgacgcttacgtgttatatcccaaaccccataaggaaagccagaggcacgctgtagatgctctggtgttgaacatcctacctgaggtgctggagcggcagtgcgggtacaaactgttcatctttggtcgggacgaattcccaggtcaggccgtggcgaacgtgatcgatgagaacgttaaactttgccggagactgattgttatagtcgtgcccgaatccctgggctttgggttattgaaaaacttatctgaggaacagatcgccgtttactcggctctgatccaggacggaatgaaggtaatcttgatcgagttggagaaaattgaagactacaccgtgatgccggaaagcatacagtacatcaagcagaagcacggcgctatacggtggcacggcgattttacagaacagtcccaatgcatgaagacaaagttctggaaaaccgttaggtaccacatgcctccgagacgctgccgcccattcccccctgtacagcttctccagcacactccgtgctacaggacggctggccctgaactcgggtctcggcgtaagaagtgtaccctgaccaccggctag

SEQ ID NO: 300959 - DNA, 1374 bp, Artificial Sequence
  derived and/or modified sequence
atgaccggcctggtgagcctgagctacttccccctgagcaccagaagctgcgccctgcagagctgcagccccgtgtggggctgcggcccctgctgcagcgccggctgccccagccccttccactgcctgagccagcaggactgcaacgagatcaagggcgagagattcaccgtgctggagaccagactgctggtgagcaacgtgagcgccgaggacagaggcaactacgcctgccaggccatcctgacccacagcggcaagcagtacgaggtgctgaacggcatcaccgtgagcatcaagagagccggctacggcggcagcgtgcccaagatcatctaccccaagaaccacagcatcgaggtgcagctgggcaccaccctgatcgtggactgcaacgtgaccgacaccaaggacaacaccaacctgagatgctggagagtgaacaacaccctggtggacgactactacgacgagagcaagagaatcagagagggcgtggagacccacgtgagcttcagagagcacaacctgtacaccgtgaacatcaccttcctggaggtgaagatggaggactacggcctgcccttcatgtgccacgccggcgtgagcaccgcctacatcatcctgcagctgcccgcccccgacttcagagcctacctgatcggcggcctgatcgccctggtggccgtggccgtgagcgtggtgtacatctacaacatcttcaagatcgacatcgtgctgtggtacagaagcgccttccacagcaccgagaccatcgtggacggcaagctgtacgacgcctacgtgctgtaccccaagccccacaaggagagccagagacacgccgtggacgccctggtgctgaacatcctgcccgaggtgctggagagacagtgcggctacaagctgttcatcttcggcagagacgagttccccggccaggccgtggccaacgtgatcgacgagaacgtgaagctgtgcagaagactgatcgtgatcgtggtgcccgagagcctgggcttcggcctgctgaagaacctgagcgaggagcagatcgccgtgtacagcgccctgatccaggacggcatgaaggtgatcctgatcgagctggagaagatcgaggactacaccgtgatgcccgagagcatccagtacatcaagcagaagcacggcgccatcagatggcacggcgacttcaccgagcagagccagtgcatgaagaccaagttctggaagaccgtgagataccacatgccccccagaagatgcagacccttcccccccgtgcagctgctgcagcacaccccctgctacagaaccgccggccccgagctgggcagcagaagaaagaagtgcaccctgaccaccggctag

SEQ ID NO: 300960 - DNA, 513 bp, Artificial Sequence
  derived and/or modified sequence
atgaactgtcgggaattgcccctaacgctctgggtcctcatcagcgtctcgaccgccgaaagttgcactagtcgtcctcatatcaccgtggtggagggagagccattttacttaaagcactgcagctgctctctcgcgcacgagatcgaaaccaccaccaagtcctggtacaagtcatcaggatcccaggaacatgtggagctgaatcctagaagctccagccgcatcgctttgcacgactgtgtcctggagttctggcctgtggagcttaacgacactggctcctacttcttccagatgaagaactacacacagaaatggaagttgaatgtgattcgccgcaacaaacattcttgctttacggagcggcaggttactagcaagattgtggaggtcaaaaagttttttcagatcacctgtgagaattcatattaccagacgctggtgaattcaacctccctctacaagatcggtccacctatttgtaggaagacttctagcggcttgcactag

SEQ ID NO: 300961 - DNA, 513 bp, Artificial Sequence
  derived and/or modified sequence
atgaattgtagagaattacccttgaccctttgggtgcttatatctgtaagcactgcagaatcttgtacttcacgtccccacattactgtggttgaaggggaacctttctatctgaaacattgctcgtgttcacttgcacatgagattgaaacaaccaccaaaagctggtacaaaagcagtggatcacaggaacatgtggagctgaacccaaggagttcctcgagaattgctttgcatgattgtgttttggagttttggccagttgagttgaatgacacaggatcttactttttccaaatgaaaaattatactcagaaatggaaattaaatgtcatcagaagaaataaacacagctgtttcactgaaagacaagtaactagtaaaattgtggaagttaaaaaattttttcagataacctgtgaaaacagttactatcaaacactggtcaacagcacatcattgtataagataggaccacctatttgcaggaaaacaagctcagggctccactga

SEQ ID NO: 300962 - DNA, 513 bp, Artificial Sequence
  derived and/or modified sequence
atgaactgccgggagctgcccctgaccctgtgggtgctgatctctgtgtccacagctgagagctgcaccagccggccccacatcaccgtggtggagggggagcccttctacctgaagcactgcagctgcagcctggcccatgaaattgagaccaccaccaagtcctggtacaagagcagcggcagccaggagcacgtggagctgaaccccaggagcagcagccgcatcgccctgcatgactgtgtgctggagttctggcctgtggagctgaatgacaccggcagctacttcttccagatgaagaactacacccagaagtggaagctgaatgtcatcagaagaaacaagcacagctgcttcacagagcggcaggtgaccagcaagatcgtggaggtgaagaagttcttccagatcacctgtgaaaattcctactaccagaccctggtgaacagcaccagcctgtacaagattggcccccccatctgcaggaagaccagcagcggcctgcactag

SEQ ID NO: 300963 - DNA, 513 bp, Artificial Sequence
  derived and/or modified sequence
atgaactgccgggagctgcccctgaccctgtgggtgctgatcagcgtgagcactgctgagtcctgcacctcccgtcctcatatcacagtcgtcgagggcgaaccgttttatttaaagcactgctcgtgcagcctcgcccatgagattgagacgacgactaaatcatggtacaagagcagtggatctcaagaacatgtggagctgaacccccggagcagcagccgcatagcccttcacgactgcgtgctggaattctggcccgtcgaactgaacgatacaggcagctatttcttccagatgaagaactacacacagaaatggaagcttaacgtgatccggaggaataagcactcatgcttcacagagagacaagtgaccagtaaaattgtggaagtcaagaaattcttccagatcacttgtgaaaacagttactaccaaaccctggtgaattccacatctctctacaaaataggcccacctatctgtaggaaaacaagctccggcctgcactag

SEQ ID NO: 300964 - DNA, 513 bp, Artificial Sequence
  derived and/or modified sequence
atgaactgcagggaactgccgctgaccctgtgggttttaatcagcgtcagtacagcagaaagctgtaccagccgtcctcacattaccgttgtggagggtgaacctttctatctaaagcactgttcatgcagcctggcccatgaaatcgagactacaaccaaaagctggtataaatcctcaggatcacaggagcatgttgagttgaatccaaggagctcttccagaattgctttgcacgattgtgtccttgagttttggcctgtcgagctgaatgacacaggctcctacttctttcagatgaagaactacactcaaaaatggaagttaaacgtcataagaagaaacaagcatagctgttttacggaacgtcaggtgacctcaaagatagttgaggtcaagaagtttttccagataacctgtgaaaacagttactaccaaacattagtcaattccacaagtctgtataagatcgggccacccatctgcagaaaaacgagctccgggttgcattag

SEQ ID NO: 300965 - DNA, 513 bp, Artificial Sequence
  derived and/or modified sequence
atgaactgcagagagctgcccctgaccctgtgggtgctgatcagcgtgagcaccgccgagagctgcaccagcagaccccacatcaccgtggtggagggcgagcccttctacctgaagcactgcagctgcagcctggcccacgagatcgagaccaccaccaagagctggtacaagagcagcggcagccaggagcacgtggagctgaaccccagaagcagcagcagaatcgccctgcacgactgcgtgctggagttctggcccgtggagctgaacgacaccggcagctacttcttccagatgaagaactacacccagaagtggaagctgaacgtgatcagaagaaacaagcacagctgcttcaccgagagacaggtgaccagcaagatcgtggaggtgaagaagttcttccagatcacctgcgagaacagctactaccagaccctggtgaacagcaccagcctgtacaagatcggcccccccatctgcagaaagaccagcagcggcctgcactag

SEQ ID NO: 300966 - protein, 300 aa, Artificial Sequence
  derived and/or modified sequence
MSAEVIHQVEEALDTDEKEMLLFLCRDVAIDVVPPNVRDLLDILRERGKLSVGDLAELLYRVRRFDLLKRILKMDRKAVETHLLRNPHLVSDYRVLMAEIGEDLDKSDVSSLIFLMKDYMGRGKISKEKSFLDLVVELEKLNLVAPDQLDLLEKCLKNIHRIDLKTKIQKYKQSVQGAGTSYRNVLQAAIQKSLKDPSNNFRLHNGRSKEQRLKEQLGAQQEPVKKSIQESEAFLPQSIPEERYKMKSKPLGICLIIDCIGNETENAHSWIFTLNSMATCMIGTAEFLPRRNIMSGCSTL

SEQ ID NO: 300967 - protein, 118 aa, Artificial Sequence
  derived and/or modified sequence
MSAEVIHQVEEALDTDEKEMLLFLCRDVAIDVVPPNVRDLLDILRERGKLSVGDLAELLYRVRRFDLLKRILKMDRKAVETHLLRNPHLVSDYRVLMAEIGEDLDKSDVSSLIFLMKD

SEQ ID NO: 300968 - protein, 62 aa, Artificial Sequence
  derived and/or modified sequence
MSAEVIHQVEEALDTDEKEMLLFLCRDVAIDVVPPNVRDLLDILRERGKLSVGDLAELLYRV

SEQ ID NO: 300969 - protein, 64 aa, Artificial Sequence
  derived and/or modified sequence
MSAEVIHQVEEALDTDEKEMLLFLCRDVAIDVVPPNVRDLLDILRERGKLSVGDLAELLYRVRR

SEQ ID NO: 300970 - protein, 129 aa, Artificial Sequence
  derived and/or modified sequence
MSAEVIHQVEEALDTDEKEMLLFLCRDVAIDVVPPNVRDLLDILRERGKLSVGDLAELLYRVRRFDLLKRILKMDRKAVETHLLRNPHLVSDYRVLMAEIGEDLDKSDVSSLIFLMKDYMGRGKISKEK

SEQ ID NO: 300971 - DNA, 903 bp, Artificial Sequence
  derived and/or modified sequence
atgagtgcggaggtgatccatcaggtggaagaggcactggacacagacgagaaagagatgctcttgttcctatgtcgggacgtagcaatcgatgtcgtaccgcctaacgtaagggacctgcttgacatactcagagaaagaggcaaactctctgttggtgacctggcagaacttttgtaccgggtccggcggttcgatctcctgaaacggatcctgaagatggaccggaaggccgttgaaacccatctcctgcgcaatccacatcttgtcagcgattacagggtgctcatggctgaaattggagaggatctagataaaagtgatgtgtcttcccttatcttcctgatgaaggattacatgggccgcggaaagatcagcaaggaaaagtcttttctggacctcgttgtggaacttgaaaagcttaacttggtcgcccctgatcaactggaccttctagaaaagtgtttgaaaaacattcatcggatcgatcttaagactaaaatccagaagtacaagcagagtgtccagggagcaggcacctcttacaggaacgtgttgcaggcagccatccagaaaagcctgaaagaccctagcaacaactttagactgcataacgggcgctccaaggagcagcggttgaaagaacagctcggcgcgcagcaagagcctgttaaaaagtctattcaggagtccgaagccttcttaccccagtcgattcccgaggagcgctacaaaatgaaaagcaagcctttgggcatttgtcttattatcgattgtattggaaacgagacggaaaatgcccactcgtggatctttacccttaatagcatggccacatgtatgatcggcacagcggagtttctgccacgaagaaacataatgtccggttgctccactctctag

SEQ ID NO: 300972 - DNA, 903 bp, Artificial Sequence
  derived and/or modified sequence
atgtctgctgaggtgatccaccaggtggaggaggccctggacacagatgagaaggagatgctgctcttcctgtgcagagatgtggccattgatgtggtgccccccaacgtgcgggacctgctggacatcctgcgggagcggggcaagctgtctgtgggggacctggccgagctgctgtacagagtgagaagatttgacctgctgaagaggatcctgaagatggacaggaaggctgtggagacccacctgctgaggaacccccacctggtgtctgactacagagtgctgatggccgagatcggggaggacctggacaagagtgatgtgagcagcctcatcttcctgatgaaggactacatgggccggggcaagatcagcaaggagaagagcttcctggacctggtggtggagctggagaagctgaacctggtggccccagaccagctggacctgctggagaagtgcctgaagaacatccacagaattgacctgaagaccaagatccagaagtacaagcagagcgtgcagggcgccggcaccagctacagaaatgtgctgcaggccgccatccagaagagcctgaaggaccccagcaacaacttccggctgcacaacggccgcagcaaggagcagaggctgaaggagcagctgggcgcccagcaggagcctgtgaagaagagcatccaggagagcgaggccttcctgccccagagcatccctgaggagcgctacaagatgaagagcaagcccctgggcatctgcctgatcatcgactgcattggaaatgaaacagaaaatgcccacagctggatcttcaccctgaacagcatggccacctgcatgattggaacagctgagttcctgcccaggaggaacatcatgagcggctgcagcaccctgtag

SEQ ID NO: 300973 - DNA, 903 bp, Artificial Sequence
  derived and/or modified sequence
atgagcgccgaggtgatccaccaggtggaggaggccctggacaccgacgaaaaggaaatgttactcttcctgtgcagagacgtcgctatcgacgtagtaccacccaatgtccgggacttgctggacatcctgagagaaaggggtaaactgtctgtgggagatttggccgaacttctatacagggtgagacgtttcgacttgctcaaacggatactcaagatggacaggaaagccgttgaaacgcacttgcttagaaacccccacctcgtgagcgactatagagtgctgatggccgagattggggaagatctggacaaatccgacgtcagttccctgatttttctgatgaaggattatatgggtaggggaaagataagcaaggagaaatcctttctagatttggtggtagagctcgaaaaactgaatctcgtggcacccgaccagctggaccttcttgagaagtgtctgaagaacatccaccggatcgacctgaagacgaagattcaaaaatacaaacagagcgtgcagggggccggcacgagctaccggaacgtacttcaggccgccatccagaagagtcttaaagatccttcaaacaatttccgccttcataatggccggtccaaagagcagcggctcaaggagcagcttggtgcacagcaggaacccgtcaaaaaatccatccaagagagtgaagctttcctgccacaaagcatccccgaagagcggtataaaatgaagagcaagcccctggggatctgcctaatcattgactgtatcggtaacgagacagagaatgcacactcctggattttcaccctgaactctatggcaacatgcatgattggtacggccgagttcctgccgaggcggaatatcatgtccggctgctcgacattatag

SEQ ID NO: 300974 - DNA, 903 bp, Artificial Sequence
  derived and/or modified sequence
atgtctgctgaggtgattcaccaggtagaggaggctttagacaccgacgagaaggaaatgttactgtttctgtgtagggatgtggccatagatgtggtaccacctaacgttcgggacttattggatatactacgggaacggggaaaactatcagtaggggatttggccgagctgttgtacagagtccggcgattcgatctcctgaagaggattctgaagatggaccgcaaagcagtggaaacacatctgcttcgcaatccccacctggtgagcgactaccgcgtgctcatggctgagattggtgaagatttggataagtcagatgtgtcttcactgatcttcctgatgaaagattatatgggacggggtaagataagtaaagaaaagagtttcttggacctcgtagtggagctcgaaaaattaaatttagtcgctccagatcagctggatctactggagaaatgtctgaaaaatatccacagaatcgacctgaaaaccaagattcagaagtataaacagtcagtgcagggcgctgggacgtcctataggaatgtcctgcaagccgctattcagaaatccctcaaggatcctagcaataatttcagactgcataatggcaggtcaaaagaacagcggctaaaggaacagctgggtgcccagcaagagccagtaaagaaatcaattcaagagtcggaggcttttttgcctcagtccattccagaagagcgttacaaaatgaaatcgaaaccacttggaatctgtctgataatagattgcattggcaatgaaaccgaaaacgcgcatagctggatttttaccctcaattcaatggccacttgtatgataggtacagctgagttcctgcccagaaggaatattatgagcggctgttctaccctttag

SEQ ID NO: 300975 - DNA, 1689 bp, Artificial Sequence
  derived and/or modified sequence
caagccatagcaggaaacagcgagcttgcagcctcaccgacgagtctcaactaaaagggactcccggagctaggggtggggactcggcctcacacagtgagtgccggctattggacttttgtccagtgacagctgagacaacaaggaccacgggaggaggtgtaggagagaagcgccgcgaacagcgatcgcccagcaccaagtccgcttccaggctttcggtttctttgcctccatcttgggtgcgccttcccggcgtctaggggagcgaaggctgaggtggcagcggcaggagagtccggccgcgacaggacgaactcccccactggaaaggattctgaaagaaatgaagtcagccctcagaaatgaagttgactgcctgctggctttctgttgactggcccggagctgtactgcaagacccttgtgagcttccctagtctaagagtaggatgtctgctgaagtcatccatcaggttgaagaagcacttgatacagatgagaaggagatgctgctctttttgtgccgggatgttgctatagatgtggttccacctaatgtcagggaccttctggatattttacgggaaagaggtaagctgtctgtcggggacttggctgaactgctctacagagtgaggcgatttgacctgctcaaacgtatcttgaagatggacagaaaagctgtggagacccacctgctcaggaaccctcaccttgtttcggactatagagtgctgatggcagagattggtgaggatttggataaatctgatgtgtcctcattaattttcctcatgaaggattacatgggccgaggcaagataagcaaggagaagagtttcttggaccttgtggttgagttggagaaactaaatctggttgccccagatcaactggatttattagaaaaatgcctaaagaacatccacagaatagacctgaagacaaaaatccagaagtacaagcagtctgttcaaggagcagggacaagttacaggaatgttctccaagcagcaatccaaaagagtctcaaggatccttcaaataacttcaggctccataatgggagaagtaaagaacaaagacttaaggaacagcttggcgctcaacaagaaccagtgaagaaatccattcaggaatcagaagcttttttgcctcagagcatacctgaagagagatacaagatgaagagcaagcccctaggaatctgcctgataatcgattgcattggcaatgagacagaaaacgcccactcctggatcttcacattgaactcaatggctacatgtatgattggaacagcagagtttctgccaaggagaaatattatgtctggctgcagcacactctgagaaagaaacttatcctctcctacacataagaaaccaaaaggctgggcgtagtggctcacacctgtaatcccagcactttgggaggccaaggagggcagatcacttcaggtcaggagttcgagaccagcctggccaacatggtaaacgctgtccctagtaaaaatacaaaaattagctgggtgtgggtgtgggtacctgtattcccagttacttgggaggctgaggtgggaggatcttttgaacccaggagttcagggtcatagcatgctgtgattgtgcctacgaatagccactgcataccaacctgggcaatatagcaagatcccatctcttt

SEQ ID NO: 300976 - DNA, 903 bp, Artificial Sequence
  derived and/or modified sequence
atgagcgccgaggtgatccaccaggtggaggaggccctggacaccgacgagaaggagatgctgctgttcctgtgcagagacgtggccatcgacgtggtgccccccaacgtgagagacctgctggacatcctgagagagagaggcaagctgagcgtgggcgacctggccgagctgctgtacagagtgagaagattcgacctgctgaagagaatcctgaagatggacagaaaggccgtggagacccacctgctgagaaacccccacctggtgagcgactacagagtgctgatggccgagatcggcgaggacctggacaagagcgacgtgagcagcctgatcttcctgatgaaggactacatgggcagaggcaagatcagcaaggagaagagcttcctggacctggtggtggagctggagaagctgaacctggtggcccccgaccagctggacctgctggagaagtgcctgaagaacatccacagaatcgacctgaagaccaagatccagaagtacaagcagagcgtgcagggcgccggcaccagctacagaaacgtgctgcaggccgccatccagaagagcctgaaggaccccagcaacaacttcagactgcacaacggcagaagcaaggagcagagactgaaggagcagctgggcgcccagcaggagcccgtgaagaagagcatccaggagagcgaggccttcctgccccagagcatccccgaggagagatacaagatgaagagcaagcccctgggcatctgcctgatcatcgactgcatcggcaacgagaccgagaacgcccacagctggatcttcaccctgaacagcatggccacctgcatgatcggcaccgccgagttcctgcccagaagaaacatcatgagcggctgcagcaccctgtag

SEQ ID NO: 300977 - DNA, 2179 bp, Artificial Sequence
  derived and/or modified sequence
ttaaactgtaaactgagtgcacacatcttaaccctaaatacatacacacatacacacaaccagccacaaaatagtgttatttccttaaatgccaaacactgtctagttctagaagtgaaaaggaccttcttgtcttttcagaagtgtgtgttttgagtatgtaatgagattacctttctgtggctttggagaattaatttcagcgctttattgtcagatcttctctgtaagaaatgtgatagggatttcccattcaatctggaactaagaattcagattgacacttgagctttgtacctcagatagcgtttttcctcatctcctgttatatatcaagcagctgagattggtttttaaaaaagtgaagattgaattgtcttcacacatttattgtgaacttgcagaaaatggaaaggattatgctttaaagacagttggcttggctggatagaaaagatccctctgtcctgtttccctgtcctccttcccacatcgatttaaaaaattagatgcaaatgcaaaatccttaaattatagatttatgataaatttaaattctggtagaatcaaggttttataacatttaaagtgtctgacactaagtgtatataatcttttaagaaacgtcttcttaacagcgcatggtattctgtgactgttcgtgtaccatgaatattcttattgggttctagagttagttactgactcttgaagatgggcatctaatggtcctcctgtggaagtggagagcagctctccactgtttgataacatttaaagccaagggtgaaccactcaagaaacatttggtggttataatatttttttgttgttgttaagtaccatcaataaaactgaaaaatctcttaagtacctgactcctgcagtgatacaactgcagtgataaaacttttagctttttacatcaggggtattaggtattttctcacagaaatagccttttgaggtgaaattcacataacatacaattaaccattgtaaaatgaacaattcagtggcgtgtaagagtatgtttacaatgttgagcaaccatcacctctgtctagttgcaaaatgttttcatcactccaaaagaaactcctttattcatcatagcccaaagttggaagtattttcttgattgggctcttgattacatggatgcatctgagtcattgaattgaagcctaagatgtgcttaatttcactgtgtgtaagtttcacctcagttaacaagagagaacagaacaaaccaaaaatcttaattcttttgaaaaaaagactttctggctgctttattaaagaagccaggggaacaaggttaaaaggaaatcagttagcagtgaccaaggcaagagatgatggtggcttggctgaagatggtgacagtggaggtggtaaggtgatcagattctggatatattttgaaggttgagctaatttggtcagctgatgggcataatggatgtgagggaaagaaagttggaaaggatgatgtgaagatttttaatgggatggaataggtgtttaatgaacagccatttaacaacatcagggtaatttcatcttgtgtatcatcctagagtataaccctgttgtaaagaatgatacacaagacaaacttaccctgatgttgttaaatatatgttagatgaccagttgctttgatttctttgctcaataaacattggattacagctggtttgctgtgtggcatgcctacatggagggaacacactgagccaatgatttcatcatctgggtccctttggtttatatcagtttccaacatgacttgtttgtggggcttgtgggaggggcacatacatcggccccaggattctaacatctcctggtctctgaggttataattttcacttaacattgtcgagttggcattttggttttagtccaatggttcagttctttgaaactgactccagagatggctctgttcattaatagattgttttgttgaccctgtgaggattagtctgtggatcttggaaattcggcaggtgactacaattctagaaggcctcttgtgagatataaggtgttttccttaagtgacatggccctgcgttgcaaagctgagaagtaatatgaaggagcgttttgtaagtttgaatctctataatcaaaaaccagactaatgacacattcgcttttagaactt

SEQ ID NO: 300978 - protein, 104 aa, Artificial Sequence
  derived and/or modified sequence
MGRIPGGCSSKAFIGRAQWLTPVIPALWEAKGLTLLSRLECSDVIMDHCSPQLTGLRMKGFLAQTPPLEFPVHQYQPGDHVLIKSWKRESLNQLRRTSSGTLDE

SEQ ID NO: 300979 - DNA, 874 bp, Artificial Sequence
  derived and/or modified sequence
tgtgaggctgtgagatgggagaatcaatctatttattggtcagaaagtggttgttcagtaccttggatttctgagtgggcaaggctggaccctgagccctgggacctctgaagtgaacactgcagggccatttgttcttccagtgtgaatcagttaatattctcgggaacgagggagaggttgatcctatgaggaaatcaaccacagtgaaaaggcttgggccgcttttgttttcacctgcttttgttgaacaaatttgatttccggagtcagtcattttactgtcaagacatttcttcggcattctgcaacagttttatctacatacaggaaagtgaacaccacgtgggtatacagcttggtggattttcacaaactgcacacacttgtggaaccagcatccagatcaggaagcaacagatgtcctttaaaacatcaagaactgggccggacatggtggctcacgcctgtaatcccagcactttgggaggccaagtttccaacatggctagatccatcagaaactgaagccgtggagaacgctctcggggcctttgccacttcttggagtagaagccgacagagagctgtttggaaacttctccttcacacaccagttgaagactaggctttggaggttttcaaagcagacggtgcttggatgggcagggagaagtaacattctgcaaatcgccgtcagaggtcctgaggacacagacctacctggcttgcattccccttgctgaatggcgtgtgctgcagctgcccactgagggctcttttccctgggattctggacttcagagtaggacagcaggctgggaagatgctgagttccatcaagtgcgtgttggtgggcgactctgctgtgggg

SEQ ID NO: 300980 - DNA, 315 bp, Artificial Sequence
  derived and/or modified sequence
atgggcagaatccccggcggctgcagcagcaaggccttcatcggcagagcccagtggctgacccccgtgatccccgccctgtgggaggccaagggcctgaccctgctgagcagactggagtgcagcgacgtgatcatggaccactgcagcccccagctgaccggcctgagaatgaagggcttcctggcccagaccccccccctggagttccccgtgcaccagtaccagcccggcgaccacgtgctgatcaagagctggaagagagagagcctgaaccagctgagaagaaccagcagcggcaccctggacgagtag

SEQ ID NO: 300981 - DNA, 315 bp, Artificial Sequence
  derived and/or modified sequence
atgggcagaattccaggcggctgttcatctaaggctttcattggccgtgcgcagtggctcactccagtgattccggctctttgggaagccaaaggcttaaccctgctgtcccgcctggagtgtagtgacgtgatcatggaccattgcagtccacagcttaccgggctacggatgaaaggattcctggcacagactcctcctctagaattcccagtccaccagtaccaacccggggatcacgtccttattaaaagctggaagcgagagtcactgaatcaactgcggagaacaagcagcggcactctggatgagtag

SEQ ID NO: 300982 - DNA, 315 bp, Artificial Sequence
  derived and/or modified sequence
atgggccggatccccggcggctgcagcagcaaggccttcatcggccgggcacaatggcttacaccagtgataccggctttgtgggaggctaaggggcttaccctcctaagccgacttgagtgcagcgacgtgattatggatcactgctctccccaattgactggccttaggatgaagggcttcctagcccaaacaccacccctggagttcccagtgcaccagtaccaacccggagaccatgtcctcatcaagtcttggaaacgggaatccttaaaccaactccgaagaacatcttctggtacccttgacgagtag

SEQ ID NO: 300983 - DNA, 315 bp, Artificial Sequence
  derived and/or modified sequence
atggggaggattccaggtggatgctcttccaaggcgttcatcggcagggcccaatggttgacccctgtcattcctgccctgtgggaagccaaagggctgaccctgctatcccgtttagaatgctctgacgtaatcatggaccattgtagtccccagctcacggggctgaggatgaaaggattccttgctcagacccctccgctggagtttcccgtgcatcaataccaaccaggcgaccatgtgctgattaaatcttggaaaagagaatcattgaaccagctgcggagaacctcaagcggtacattagatgaatag

SEQ ID NO: 300984 - protein, 319 aa, Artificial Sequence
  derived and/or modified sequence
MSQQNTSGDCLFDGVNELMKTLQFAVHIPTFVLGLLLNLLAIHGFSTFLKNRWPDYAATSIYMINLAVFDLLLVLSLPFKMVLSQVQSPFPSLCTLVECLYFVSMYGSVFTICFISMDRFLAIRYPLLVSHLRSPRKIFGICCTIWVLVWTGSIPIYSFHGKVEKYMCFHNMSDDTWSAKVFFPLEVFGFLLPMGIMGFCCSRSIHILLGRRDHTQDWVQQKACIYSIAASLAVFVVSFLPVHLGFFLQFLVRNSFIVECRAKQSISFFLQLSMCFSNVNCCLDVFCYYFVIKEFRMNIRAHRPSRVQLVLQDTTISRG

SEQ ID NO: 300985 - protein, 242 aa, Artificial Sequence
  derived and/or modified sequence
MSQQNTSGDCLFDGVNELMKTLQFAVHIPTFVLGLLLNLLAIHGFSTFLKNRWPDYAATSIYMINLAVFDLLLVLSLPFKMVLSQVQSPFPSLCTLVECLYFVSMYGSVFTICFISMDRFLAIRYPLLVSHLRSPRKIFGICCTIWVLVWTGSIPIYSFHGKVEKYMCFHNMSDDTWSAKVFFPLEVFGFLLPMGIMGFCCSRSIHILLGRRDHTQDWVQQKACIYSIAASLAVFVVSFLPV

SEQ ID NO: 300986 - DNA, 1523 bp, Artificial Sequence
  derived and/or modified sequence
agaatgctctgggctttcaaaatggttacttttcggctgggcatggttttaaatggttacttttcctctcctgttgcctgaagcctggggatttttctcctgtcttcacagtgagaaactggtgaccttcctggaggtaaccccaggaaaatgtggggcttccctactacagggaccccaggactttatgacacttaagctagcccaaacactcagcctccagcaattcgtcaggtaccatgtaagtgctcctacaagttgccggctcctgggtggcttctgcttctggaagttgtgattcaatgggcatgaattgctgtgtgatgctggggaggtgtttgtgattcttgacaaagtcatttgaatccatcacttcaagagagtgaaaggagccccgtctgatctgttggtgttgtaggaagaaacatgagtcagcaaaacaccagtggggactgcctgtttgacggtgtcaacgagctgatgaaaaccctacagtttgcagtccacatccccaccttcgtcctgggcctgctcctcaacctgctggccatccatggcttcagcaccttccttaagaacaggtggcccgattatgctgccacctccatctacatgatcaacctggcagtctttgacctgctgctggtgctctccctcccattcaagatggtcctgtcccaggtacagtcccccttcccgtccctgtgcaccctggtggagtgcctttacttcgtcagcatgtacggaagcgtcttcaccatctgcttcatcagcatggaccggttcttggccatccgttacccgctactggtgagccacctccggtcccccaggaagatctttgggatctgctgcaccatctgggtcctggtgtggaccggaagcatccctatctacagtttccatgggaaagtggaaaaatacatgtgcttccacaacatgtctgatgatacctggagcgccaaggtcttcttcccgctggaggtgtttggcttcctccttcccatgggcatcatgggcttctgctgctccaggagcatccacatcctgctgggccgccgagaccacacccaggactgggtgcagcagaaagcctgcatctacagcatcgcagccagcctggctgtcttcgtggtctccttcctcccagtccacctggggttcttcctgcagttcctggtgagaaacagctttatcgtagagtgcagagccaagcagagcatcagcttcttcttgcaattgtccatgtgtttctccaacgtcaactgctgcctggatgttttctgctactactttgtcatcaaagaattccgcatgaacatcagggcccaccggccttccagggtccagctggtcctgcaggacaccacgatctcccggggctaacggaaggacatcctgttcaggggaagaaagccctggccctgaattctggtaacggatatcgcgttccagggttttgatgtggtgggatgatccgcaccatcttcactgatgtgcttccctttgatgcccattgagtg

SEQ ID NO: 300987 - DNA, 3828 bp, Artificial Sequence
  derived and/or modified sequence
caggcctggaggagaaatgacatctctcagccctctcagctgcaccggaccaccaacagttgtgattcaatgggcatgaattgctgtgtgatgctggggaggtgtttgtgattcttgacaaagtcatttgaatccatcacttcaagagagtgaaaggagccccgtctgatctgttggtgttgtaggaagaaacatgagtcagcaaaacaccagtggggactgcctgtttgacggtgtcaacgagctgatgaaaaccctacagtttgcagtccacatccccaccttcgtcctgggcctgctcctcaacctgctggccatccatggcttcagcaccttccttaagaacaggtggcccgattatgctgccacctccatctacatgatcaacctggcagtctttgacctgctgctggtgctctccctcccattcaagatggtcctgtcccaggtacagtcccccttcccgtccctgtgcaccctggtggagtgcctttacttcgtcagcatgtacggaagcgtcttcaccatctgcttcatcagcatggaccggttcttggccatccgttacccgctactggtgagccacctccggtcccccaggaagatctttgggatctgctgcaccatctgggtcctggtgtggaccggaagcatccctatctacagtttccatgggaaagtggaaaaatacatgtgcttccacaacatgtctgatgatacctggagcgccaaggtcttcttcccgctggaggtgtttggcttcctccttcccatgggcatcatgggcttctgctgctccaggagcatccacatcctgctgggccgccgagaccacacccaggactgggtgcagcagaaagcctgcatctacagcatcgcagccagcctggctgtcttcgtggtctccttcctcccagtccacctggggttcttcctgcagttcctggtgagaaacagctttatcgtagagtgcagagccaagcagagcatcagcttcttcttgcaattgtccatgtgtttctccaacgtcaactgctgcctggatgttttctgctactactttgtcatcaaagaattccgcatgaacatcagggcccaccggccttccagggtccagctggtcctgcaggacaccacgatctcccggggctaacggaaggacatcctgttcaggggaagaaagccctggccctgaattctggtaacggatatcgcgttccagggttttgatgtggtgggatgatccgcaccatcttcactgatgtgcttccctttgatgcccattgagtgccagctttgctcattataccccaaagaccttttttccactgcccagacagcttataccacccagtgttcagggatctctgaagaacccacagaccaggtgaattactgatttctaagtccaaaaactatagagcagaagaattgagaaagagaatgagaccatgtcaacaaggctgtttccaactctccccattttcctgttcgactgggaggttctggaaagaaagagagagagagaaaagaggtaaaggagggagccaagagagtcagttattggggagagtgtcttgggcagaggtggggtggtagggatgagtgaagtccctttttagtttgggtgtcccagaacagagcagacttgcattttccagtcccttctggaactgtgttgccaaaagcctcactgagatgacagcaagaaggggtggtgttggggctgggcaagtagcatggatcaccccaagtttccagtgagcctcagaaaggtgaaggaagccagccacacctttccgtgcccgtgagaagactgcaaaatgactgagtggggtgttgatgacatccaagagccatgaggggggagaggaaaggacacttctggggaaggaagaagacaggcccagggctggaagcacacagcccctcccctatcaccatcagggtgtccacagcacggagtgttggtgctggcccagggtgaagagagacagtgagagacggcctgggagcggggagaccccgacctgctttctatcttaaacagactgggaagttgctcattacagctagcttccttgaaaacaatggcaaagaatcaggcctgccttggttccaccataggagggtggaggaggtgctgtcttactcacctgcatcctggctgggcagctggcacccgtggcactgcccatggagccgtccctccctggcagctgggagggagatgaggcagctaggcacaagggtgtggccttgagaaagaaggcaagggggggtccctgctggtcccaggaaactgtaaacaattgagtcacgcctggatggcttctcaacggatctggaggaggagtgcaagtgacagcggaagcctcccaatgactcagctgctccggagagtgaaatgatgagaaggatccattgtggggtggttttgcatgacagagcgagtgggatgaggagtaactgatgagacttcatgtgagcaaggtcttcaggaggaaaagcaactgaggtctacttgtaggatctgggctcagtgggggctgaagggcttgggaggggtggtgacctgaggggaagaagagaagcatttggataaacctggacctgtggggaggaggaggaggaagaggaagaggaaaaggaggggaagctgagccgtggccctaggcttgaagcctgcagggagtgcagggtgggtggggaacctggctgagctgcttcctgcctgagagctttcccagctggcctaagagccatggacggacaggagtcgccttctcaggagcagctcccgctgttgctgtgttcaagtggcaccctgtacacctcctcctaggtggatggagggaagggtgaggaagagagcgtcaatgaaggggtggaagtggatgtggaggagtgaccagaccagaccagaccagaccagagggatcggaggctcaggccccctgagctgggcctctaagaaccacagccacagagtcaggctctgcagacccagaggtaaggctgcctggctgccccaaaccccagacactcctctccttgcctgcaggctgccctctcccatggccaccctagacagagacccacccgtgatactctgagggagccagactttcacatgcaacggggcatttggggctggttcgggtcagtgtctacgggtggtggatttagtgaccaccctcctcccacttctttctctgcacgaggagttgggagcctgcctggtggagttgagtgatgcccgtcatgtgcacttgggtctaccaatgtgcttaaggccagatgggcttcctaagagacaagggtgggtggacctaaccaactatcatccccagcgatgttcaaacataaaatcttatctatgtgcagcatgactctctccaggtgacagaaagggctctagacagctgagaggacctgatcatgtagggagggacggggaggggagccaggacccaggagctgcatggctgtaagaggaaggtccttggagggtatcagcagtctcagtgtgatgtgacaactatggacctgtgggtgtgccctggggacccctgacccatcccaaaacactgtggaaagaagggcctcttctccgtggggacccgtgtctgtgggagcgggcacaggtccatgctgcaggccactacggctgctcggcaggagggccgagagtttggacccacatagctgcaacccaagctggcccataatcagcagtggggcccagcagcacaggaggggcggacggttagctttggaaaaaatgacttgattaatctgattcgccaaataaatagattcatgtga

SEQ ID NO: 300988 - DNA, 919 bp, Artificial Sequence
  derived and/or modified sequence
caggcctggaggagaaatgacatctctcagccctctcagctgcaccggaccaccaacagttgtgattcaatgggcatgaattgctgtgtgatgctggggaggtgtttgtgattcttgacaaagtcatttgaatccatcacttcaagagagtgaaaggagccccgtctgatctgttggtgttgtaggaagaaacatgagtcagcaaaacaccagtggggactgcctgtttgacggtgtcaacgagctgatgaaaaccctacagtttgcagtccacatccccaccttcgtcctgggcctgctcctcaacctgctggccatccatggcttcagcaccttccttaagaacaggtggcccgattatgctgccacctccatctacatgatcaacctggcagtctttgacctgctgctggtgctctccctcccattcaagatggtcctgtcccaggtacagtcccccttcccgtccctgtgcaccctggtggagtgcctttacttcgtcagcatgtacggaagcgtcttcaccatctgcttcatcagcatggaccggttcttggccatccgttacccgctactggtgagccacctccggtcccccaggaagatctttgggatctgctgcaccatctgggtcctggtgtggaccggaagcatccctatctacagtttccatgggaaagtggaaaaatacatgtgcttccacaacatgtctgatgatacctggagcgccaaggtcttcttcccgctggaggtgtttggcttcctccttcccatgggcatcatgggcttctgctgctccaggagcatccacatcctgctgggccgccgagaccacacccaggactgggtgcagcagaaagcctgcatctacagcatcgcagccagcctggctgtcttcgtggtctccttcctcccagtc

SEQ ID NO: 300989 - DNA, 2527 bp, Artificial Sequence
  derived and/or modified sequence
caggcctggaggagaaatgacatctctcagccctctcagctgcaccggaccaccaacagttgtgattcaatgggcatgaattgctgtgtgatgctggggaggtgtttgtgattcttgacaaagtcatttgaatccatcacttcaagagagtgaaaggagccccgtctgatctgttggtgttgtaggaagaaacatgagtcagcaaaacaccagtggggactgcctgtttgacggtgtcaacgagctgatgaaaaccctacagtttgcagtccacatccccaccttcgtcctgggcctgctcctcaacctgctggccatccatggcttcagcaccttccttaagaacaggtggcccgattatgctgccacctccatctacatgatcaacctggcagtctttgacctgctgctggtgctctccctcccattcaagatggtcctgtcccaggtacagtcccccttcccgtccctgtgcaccctggtggagtgcctttacttcgtcagcatgtacggaagcgtcttcaccatctgcttcatcagcatggaccggttcttggccatccgttacccgctactggtgagccacctccggtcccccaggaagatctttgggatctgctgcaccatctgggtcctggtgtggaccggaagcatccctatctacagtttccatgggaaagtggaaaaatacatgtgcttccacaacatgtctgatgatacctggagcgccaaggtcttcttcccgctggaggtgtttggcttcctccttcccatgggcatcatgggcttctgctgctccaggagcatccacatcctgctgggccgccgagaccacacccaggactgggtgcagcagaaagcctgcatctacagcatcgcagccagcctggctgtcttcgtggtctccttcctcccagtccacctggggttcttcctgcagttcctggtgagaaacagctttatcgtagagtgcagagccaagcagagcatcagcttcttcttgcaattgtccatgtgtttctccaacgtcaactgctgcctggatgttttctgctactactttgtcatcaaagaattccgcatgaacatcagggcccaccggccttccagggtccagctggtcctgcaggacaccacgatctcccggggctaacggaaggacatcctgttcaggggaagaaagccctggccctgaattctggtaacggatatcgcgttccagggttttgatgtggtgggatgatccgcaccatcttcactgatgtgcttccctttgatgcccattgagtgccagctttgctcattataccccaaagaccttttttccactgcccagacagcttataccacccagtgttcagggatctctgaagaacccacagaccaggtgaattactgatttctaagtccaaaaactatagagcagaagaattgagaaagagaatgagaccatgtcaacaaggctgtttccaactctccccattttcctgttcgactgggaggttctggaaagaaagagagagagagaaaagaggtggatggagggaagggtgaggaagagagcgtcaatgaaggggtggaagtggatgtggaggagtgaccagaccagaccagaccagaccagagggatcggaggctcaggccccctgagctgggcctctaagaaccacagccacagagtcaggctctgcagacccagaggtaaggctgcctggctgccccaaaccccagacactcctctccttgcctgcaggctgccctctcccatggccaccctagacagagacccacccgtgatactctgagggagccagactttcacatgcaacggggcatttggggctggttcgggtcagtgtctacgggtggtggatttagtgaccaccctcctcccacttctttctctgcacgaggagttgggagcctgcctggtggagttgagtgatgcccgtcatgtgcacttgggtctaccaatgtgcttaaggccagatgggcttcctaagagacaagggtgggtggacctaaccaactatcatccccagcgatgttcaaacataaaatcttatctatgtgcagcatgactctctccaggtgacagaaagggctctagacagctgagaggacctgatcatgtagggagggacggggaggggagccaggacccaggagctgcatggctgtaagaggaaggtccttggagggtatcagcagtctcagtgtgatgtgacaactatggacctgtgggtgtgccctggggacccctgacccatcccaaaacactgtggaaagaagggcctcttctccgtggggacccgtgtctgtgggagcgggcacaggtccatgctgcaggccactacggctgctcggcaggagggccgagagtttggacccacatagctgcaacccaagctggcccataatcagcagtggggcccagcagcacaggaggggcggacggttagctttggaaaaaatgacttgattaatctgattcgccaaataaatagattcatgtgatgccttgtga

SEQ ID NO: 300990 - DNA, 960 bp, Artificial Sequence
  derived and/or modified sequence
atgagtcagcagaacacgagcggcgactgcctgttcgacggggtcaacgagttaatgaagacactgcaatttgctgtgcatataccaacatttgtgctgggtctgttgctgaatttactcgccatccacggattcagcactttcctgaagaacagatggccggactatgcggccacttcaatttacatgatcaacctggctgtgtttgacttactcctggtactctcactcccctttaagatggttctctcccaggtacagagtccatttccatcgttgtgtacactggtggaatgtctgtacttcgtctccatgtacggtagcgtgttcactatttgcttcatatccatggacaggttcctggcgatccgatacccattattagtctcacatttgcgctcacctcgaaagatctttggcatttgctgtaccatctgggtcctcgtgtggacaggctccatccctatttattcctttcatgggaaggtggagaaatatatgtgctttcacaacatgtctgatgacacatggagtgcaaaggtatttttccctctggaggtgttcggattcctgcttccaatggggataatgggcttctgctgttcaaggtccatccatatcctgctcggaaggcgcgaccacacacaagattgggtgcaacaaaaagcctgcatctactcaatcgccgccagcctggctgtcttcgtggtgagttttctccccgtgcatctgggatttttcctgcagtttctggtgagaaattcctttatcgtggagtgcagggcgaaacagagcattagcttctttttgcagctgtccatgtgcttttctaatgtgaattgctgcttggatgttttctgctactattttgttatcaaagagtttaggatgaacattcgggctcaccgccccagccgagtacagctggttctgcaggacaccacaattagtagaggctag

SEQ ID NO: 300991 - DNA, 960 bp, Artificial Sequence
  derived and/or modified sequence
atgtcacagcagaatacatccggtgattgtttgttcgatggggtcaatgagctgatgaagacccttcagtttgcagtgcacataccaacgtttgtgttgggcctgctcttgaatctactggccatccacggtttttccaccttcctgaagaatcgctggccagattatgcagcaaccagcatctatatgatcaacctagctgtattcgatttactgctggtactgagtctaccttttaagatggttctttcacaggtccagtctcccttccctagcctctgcactctcgtcgagtgcctgtatttcgtgtctatgtacgggtccgtttttaccatttgtttcatctccatggatagattccttgcgatcagataccctctgctagtatcacatctgcgttcacctcggaagatattcggtatttgctgcactatttgggtcctggtgtggacaggcagcatccccatctatagcttccacggcaaggttgaaaagtatatgtgcttccacaacatgagtgacgacacatggagcgccaaggtgttcttccccctcgaagtattcggctttctgctgcctatgggtattatgggcttttgttgtagccgctctatccacatcttgcttggccgtcgggaccatacccaggactgggtccagcagaaagcttgcatttattcaatcgcagcaagtcttgccgtgtttgttgtgagctttcttccggtgcacctcggcttttttctccaattcctggtgcggaactcatttatcgtggagtgtcgcgcaaagcagtccataagtttttttttacaattatccatgtgcttcagcaatgtcaactgctgcttggacgtcttctgctattacttcgtaatcaaggagttccgtatgaacatccgcgcccaccgccccagccgcgtacagttagtccttcaggataccacaatctctcgaggctag

SEQ ID NO: 300992 - DNA, 729 bp, Artificial Sequence
  derived and/or modified sequence
atgtcccagcagaatacatcaggggactgccttttcgatggcgtcaacgaattaatgaagactctgcagtttgccgtacatatccccacctttgtgttgggccttctcctcaatttgcttgctatccacggtttttcaactttccttaaaaatcgatggcccgactatgcagctaccagcatctatatgatcaacctcgccgtttttgaccttcttctcgtgttgtctctacctttcaagatggtgttatctcaagtgcagagcccctttccatcactgtgcacgctggtggagtgtttgtactttgtgtctatgtacggcagcgtgtttacaatctgctttatctctatggacagattcctggctatcagatatcccctcctcgtctctcatctgaggagccctcgtaagattttcggtatctgctgtaccatctgggtcctggtgtggactgggagcatcccaatctacagctttcacggcaaagtcgaaaaatacatgtgctttcacaatatgagtgatgacacgtggagtgccaaggtctttttcccgctggaggtgtttggatttctattacccatgggaatcatgggtttctgttgcagtaggtccattcatattctcctcggccgccgggaccatacgcaggactgggtgcagcagaaagcctgcatctacagcattgctgcctcattggctgtcttcgtcgtgtcttttttgcctgtgtag

SEQ ID NO: 300993 - DNA, 960 bp, Artificial Sequence
  derived and/or modified sequence
atgtctcagcagaataccagcggagattgcctgttcgacggcgtgaacgaactgatgaagactctgcagtttgccgtccatatcccaacttttgtcctcggccttctactcaatctgttggcaatccacggcttctctaccttcctgaagaaccgctggcccgactatgccgctacctccatatatatgattaatttagccgtgttcgatttactcctagtcctgagcttgccgttcaagatggtactgagtcaggtgcaaagccctttcccttctctatgcactttagtggaatgtctgtacttcgtcagtatgtacggttctgttttcacaatttgtttcatctccatggatagattcctggcaatacgataccccctgctggtctcacacctgaggtctcctcgtaaaatcttcggcatctgttgcaccatctgggtgctagtctggactggatcaatccccatctactcatttcacggaaaagtcgagaagtacatgtgcttccacaatatgagcgacgacacatggtccgccaaagtcttcttccccttggaggtgtttgggtttctgctgccgatggggatcatgggcttctgttgttccaggagtatccacattctactgggacggcgcgatcatacacaggactgggtgcagcaaaaagcatgcatctactcaatagctgcctcactggctgtcttcgtggtctcttttctgccagtgcatctggggttttttttgcagttcctggtgaggaacagtttcatagtcgagtgtagagccaagcaatccatttcctttttcctccagctgagtatgtgcttctccaacgttaattgttgcctcgacgtgttttgttattactttgtgatcaaggaattccggatgaacataagagcacaccgcccatctagagtgcagcttgtgctgcaggacacaactatttcccgagggtag

SEQ ID NO: 300994 - DNA, 960 bp, Artificial Sequence
  derived and/or modified sequence
atgagccagcagaacaccagcggggactgcctgtttgatggagtgaatgagctgatgaagaccctgcagtttgctgtgcacatccccacctttgtgctgggcctgctgctgaacctgctggccatccacggcttcagcaccttcctgaagaaccgctggccagactatgctgccaccagcatctacatgatcaacctggccgtgtttgacctgctgctggtgctgagcctgcccttcaagatggtgctgagccaggtgcagagccccttccccagcctgtgcaccctggtggagtgcctgtactttgtgtccatgtatggcagcgtcttcaccatctgcttcatctccatggaccgcttcctggccatccgctaccccctgctggtgagccacctgcggagccccaggaagatcttcggcatctgctgcaccatctgggtgctggtgtggacaggcagcatccccatctacagcttccacggcaaggtggagaagtacatgtgcttccacaacatgtctgatgacacctggagcgccaaggtgttcttccccctggaggtgtttggcttcctgctgcccatgggcatcatgggcttctgctgcagccgcagcatccacatcctgctgggcagaagagaccacacccaggactgggtgcagcagaaggcctgcatctacagcattgctgccagcctggccgtgtttgtggtgtccttcctgcctgtgcacctgggcttcttcctgcagttcctggtgagaaattccttcatcgtggagtgccgggccaagcagagcatctccttcttcctgcagctgtccatgtgcttcagcaatgtgaactgctgcctggatgtgttctgctactacttcgtcatcaaggagttcaggatgaacatccgggcccaccggcccagccgggtgcagctggtgctgcaggacaccaccatcagccggggctag

SEQ ID NO: 300995 - DNA, 729 bp, Artificial Sequence
  derived and/or modified sequence
atgagccagcagaacaccagcggggactgcctgtttgatggagtgaatgagctgatgaagaccctgcagtttgctgtgcacatccccacctttgtgctgggcctgctgctgaacctgctggccatccacggcttcagcaccttcctgaagaaccgctggccagactatgctgccaccagcatctacatgatcaacctggccgtgtttgacctgctgctggtgctgagcctgcccttcaagatggtgctgagccaggtgcagagccccttccccagcctgtgcaccctggtggagtgcctgtactttgtgtccatgtatggcagcgtcttcaccatctgcttcatctccatggaccgcttcctggccatccgctaccccctgctggtgagccacctgcggagccccaggaagatcttcggcatctgctgcaccatctgggtgctggtgtggacaggcagcatccccatctacagcttccacggcaaggtggagaagtacatgtgcttccacaacatgtctgatgacacctggagcgccaaggtgttcttccccctggaggtgtttggcttcctgctgcccatgggcatcatgggcttctgctgcagccgcagcatccacatcctgctgggcagaagagaccacacccaggactgggtgcagcagaaggcctgcatctacagcattgctgccagcctggccgtgtttgtggtgtccttcctgcctgtgtag

SEQ ID NO: 300996 - DNA, 960 bp, Artificial Sequence
  derived and/or modified sequence
atgagccagcagaacaccagcggcgactgcctgttcgacggcgtgaatgaactgatgaagaccctccagttcgctgtgcacatccccacattcgtcctgggcctgctgctgaatcttctggccatccacgggttcagtacattccttaaaaacaggtggcccgactatgcagctacatctatttatatgatcaacctggcggtctttgatctcctcctggtcctgtctctgccgtttaagatggtcctgtcccaggttcagtcacctttcccaagcctctgcacgctcgtggagtgcctgtattttgtgagtatgtatggctctgtattcacaatctgctttatatccatggaccgatttctggctattagataccctttactagtgtcccacctgcgctcaccaaggaagattttcggtatttgctgtaccatctgggttctggtatggactggctcaatccctatatactcctttcatggaaaagtggaaaaatacatgtgcttccacaacatgagcgatgatacatggagcgctaaagtctttttcccattggaagtcttcgggttcctgcttcctatgggcattatggggttctgctgcagcaggtcgattcacatcctgctgggccgtagagaccacacccaggactgggtgcagcagaaggcttgtatttactcaatcgccgcatccctggctgttttcgtcgtgagtttcctcccagtacacttgggattcttccttcaattcctcgttcgcaatagctttatcgtcgaatgtagggctaaacaaagcattagtttctttttgcagctgtctatgtgctttagcaacgttaactgttgcctggatgtattctgttattattttgtgattaaagaattcaggatgaacatcagagcgcacaggcccagccgagtccagctggtgttacaggacacgacgatatcacgtggatag

SEQ ID NO: 300997 - DNA, 960 bp, Artificial Sequence
  derived and/or modified sequence
atgagccagcagaacaccagcggcgactgcctgttcgacggcgtgaacgagctaatgaagaccctgcagttcgccgtccatatccctacatttgttctgggtttactcttaaacttgctagcgattcacggattttcaacattcctcaagaaccggtggcctgactacgccgccacaagcatctacatgattaatctggcagtattcgacctgcttttggtcctgtctcttccgtttaaaatggtgttatcacaagtgcagtcccctttcccttctttatgtacgctggttgagtgcttatactttgtgagcatgtatggcagcgtatttacaatttgctttattagcatggatcgtttcctggcaatccgctatcctcttttagtgtcccacttgcggtctccccgtaaaattttcggtatttgttgcaccatctgggttctggtgtggacagggtcgatcccaatttattcttttcacgggaaggtagaaaagtatatgtgttttcacaacatgtctgatgatacctggagcgccaaggtgtttttccctttggaagtgttcggcttcctgcttcctatggggattatgggcttttgctgctccaggtctatacacatcctcctgggtcgccgggatcatacgcaggactgggtgcaacaaaaggcctgcatctacagtattgccgcgtctttggcagtgttcgtcgtgagcttcctacccgtgcatctcggcttttttctgcagttcctcgtgaggaacagtttcatcgtggagtgccgggccaagcaaagcattagcttttttctgcagttgtcaatgtgcttctctaatgtgaattgctgcctcgatgtgttctgctactatttcgtaatcaaggaattcaggatgaatatccgggcacatcgccccagtagagttcaactcgtcctccaagacaccaccattagccgcgggtag

SEQ ID NO: 300998 - DNA, 729 bp, Artificial Sequence
  derived and/or modified sequence
atgagccagcagaacaccagcggcgactgcctgttcgacggcgtgaacgagttgatgaagacactgcagttcgccgtccatatcccaacattcgttttggggctactgttgaacctgcttgctattcacggctttagcacatttttaaagaatagatggccggattacgccgctacgtctatctatatgatcaatctcgctgtgttcgatctgcttctggttttgagcctcccttttaagatggtactttcacaggtacagagtcccttccccagcctgtgcacccttgtagaatgtttatatttcgtctccatgtatggatccgtgtttactatatgttttataagcatggaccgtttcctggcgatacgttaccctcttcttgtgagccaccttcgcagcccccgcaaaattttcggtatttgttgtactatttgggtactggtgtggaccggaagcatcccaatatacagtttccacggaaaagtagagaagtatatgtgcttccacaatatgagcgacgacacctggtccgccaaggtgttctttcctctggaggtgttcggattccttctgcctatgggcattatgggattctgctgcagtcgatccattcatatccttcttgggcgccgcgatcacacccaagactgggtgcagcagaaggcgtgcatctatagtatcgctgccagcttggccgtattcgttgtaagtttcctccccgtatag

SEQ ID NO: 300999 - DNA, 960 bp, Artificial Sequence
  derived and/or modified sequence
atgagccagcagaacaccagcggcgactgcctgttcgacggcgtgaacgagctaatgaagacgctgcagtttgccgtgcatataccaactttcgtgctgggccttctgcttaatctgctggcaatacacggcttctcaaccttccttaagaatagatggcccgattacgccgcaacgtcaatatacatgattaatctggcagtctttgatcttctcctggtgctcagcctgccattcaaaatggttctctcccaggtacaatcaccttttccttctctgtgtacccttgtggaatgtctttactttgtatcaatgtacgggagtgtgttcacgatctgcttcatcagcatggaccgatttctcgccattcgttatccattgctggtttcccatttaaggtctccacgaaaaattttcgggatctgctgcacaatctgggttttggtctggacgggatccatccccatctacagcttccatgggaaagtggagaaatacatgtgtttccataacatgagcgacgatacttggtctgccaaggtgttctttccactggaagtgttcggattcttactaccaatgggaataatgggattttgctgttccaggtccattcacattctcctgggtcgaagggaccacacacaggactgggtacagcagaaggcctgtatatactctatcgccgctagcctcgcagtctttgtcgtgtcctttctgcctgtccacttaggctttttcctccaatttcttgtgcgaaattccttcatcgtggagtgtcgagcaaaacaaagcatttcattcttcctgcaacttagcatgtgtttctcaaatgtcaattgctgcctggatgttttttgctattactttgtgatcaaggaattccgtatgaacatccgcgctcatcgcccatcacgagtgcagctggtgctccaagacaccaccatctcgcggggctag

SEQ ID NO: 301000 - DNA, 960 bp, Artificial Sequence
  derived and/or modified sequence
atgtcccagcagaacacatccggcgactgcctctttgacggtgtcaacgaattaatgaaaactctacagtttgccgtacacatccccactttcgttcttggcctgctgctgaatctcctcgccattcacggcttcagcacttttcttaagaatagatggccagattacgccgctaccagcatttatatgatcaatctcgctgtatttgacctgctgctggtattaagccttcccttcaaaatggtcctctcccaagtgcagagcccctttccttctctgtgtactctcgtggaatgtttatatttcgtctccatgtacgggtcagtattcactatctgttttatttccatggacaggtttctcgccatcaggtatccactgttggtcagtcatttaaggtctcctaggaaaatcttcgggatctgctgcactatatgggtacttgtgtggacgggatcgatacccatatactcctttcacggaaaagtggagaagtacatgtgctttcataacatgtcggacgacacttggtccgctaaggtcttcttcccactggaggtgtttggctttctgctgccaatgggaatcatgggcttttgttgcagccgttccatccatatactcctaggacgtagagatcacacacaagactgggtccagcagaaggcttgtatttatagcatcgctgccagccttgccgttttcgtggtgagcttcttgccagtccatctcggattcttcctgcagttcctcgttagaaattctttcatagtggaatgccgggcaaaacaaagtatcagcttcttcttgcaactttcaatgtgttttagcaatgtgaactgctgcctggacgtattttgttactacttcgtgatcaaggaattcaggatgaatatccgcgcacacagacctagtcgtgtccagttagtactccaggacacgacaatctcgcgcggttag

SEQ ID NO: 301001 - DNA, 960 bp, Artificial Sequence
  derived and/or modified sequence
atgagccagcaaaacacttccggggactgcctgttcgacggggtgaacgagctgatgaaaactctgcagttcgcggtccatatccccacctttgtcttgggtctgttactgaacttactggcaattcacgggttctcaacatttctgaaaaatcgatggcctgactacgccgcaacctctatctatatgattaacctggctgtgtttgatcttttgctggtactctccctgccatttaagatggtgttgagtcaagtccaaagcccttttcccagcctctgtaccctggttgaatgtctctatttcgtaagtatgtatggttccgtgttcacaatctgcttcatcagcatggaccgcttcctggcaattaggtaccctctgctagtctctcacttgaggtctcctagaaagatttttggcatctgctgcaccatctgggtcctggtgtggactggctctattcctatctatagttttcatggaaaggtggaaaagtacatgtgttttcacaacatgagcgacgatacctggagcgctaaagttttttttcctcttgaggtctttggctttctgttacccatgggaataatgggcttttgctgttcaaggagtattcacattcttcttggcaggagagatcacacgcaggattgggtgcagcagaaggcctgtatctattccatagcagctagcttggccgtgtttgtggtgtcattccttcccgtgcacctcggatttttcttacaattcctggtacgaaattcctttatcgtggagtgccgagctaagcagagtatctcttttttcctgcaactgtccatgtgctttagtaacgttaactgttgtctggacgtgttttgttattacttcgttattaaagagttccggatgaatatccgcgcacatcgacccagcagagtgcagctggtcctgcaggacaccacgatcagtcggggttag

SEQ ID NO: 301002 - DNA, 729 bp, Artificial Sequence
  derived and/or modified sequence
atgtcccagcagaacaccagtggggattgcttattcgatggggtgaacgaactcatgaagacattgcaatttgcagtacatatccccacatttgtgctcggcttactgctcaacctgctggcaatccacggcttctctacttttctgaagaacaggtggcccgactacgccgcaacctcaatctatatgatcaacttagccgtcttcgaccttctcctcgtcctgagccttccttttaagatggtattgtcacaggtgcagagcccctttccctcgctctgcaccctcgtagagtgcctatacttcgtgtccatgtacggcagtgtctttacgatctgctttatcagtatggacaggtttttggctatacggtatcccctgctggtcagccacctgcgttcccccagaaagatttttggcatctgctgtaccatttgggtcctcgtctggaccggaagcatccctatttattctttccacggaaaggtcgaaaagtacatgtgctttcacaatatgtctgacgatacatggtcagccaaggtcttctttcctttggaggtcttcggtttcttgttgcccatgggaattatgggcttctgttgctcacggtcaatacacattctgttaggtcgcagggatcacacccaggactgggtgcaacagaaagcatgtatttatagcatcgctgcctcgttggccgtgttcgtcgtgtcatttctgcctgtatag

SEQ ID NO: 301003 - DNA, 960 bp, Artificial Sequence
  derived and/or modified sequence
atgtcccagcaaaacacatccggggattgtctgtttgacggtgttaacgaactaatgaagaccttgcagtttgcagttcacattcctaccttcgtgctgggcctgctgttaaatctattagccattcatggcttctccacctttctcaaaaacagatggccggactatgcggctacatcgatctatatgatcaacctggctgtgttcgaccttttgcttgtgctgtcactaccttttaaaatggtgttgtcccaggtgcagtcccctttccccagtctgtgtacattggtggaatgcctgtactttgtttccatgtatggctctgtgtttaccatctgttttatctcgatggacagatttctcgcaatcagatacccccttttggtgtcccacctacgatctccgcgaaagattttcggaatttgctgtactatctgggtgttggtgtggaccggttccatccccatttacagctttcacggaaaggtagaaaaatacatgtgcttccacaatatgagtgacgatacgtggtccgctaaagtgttttttcctctcgaagtgtttgggtttcttctcccgatgggcattatgggtttctgttgtagccgctctatccatatcttgctgggacgcagggaccacacacaagactgggtgcaacagaaagcatgtatctatagcattgccgcaagtctcgccgtcttcgttgtgagttttctcccagtacacctggggttctttctccagtttttagttcgcaactcctttattgtggagtgccgtgcaaagcaatccatctcattcttcttgcagttaagcatgtgtttctcaaacgtgaattgctgccttgacgtgttctgctattacttcgtgataaaagaatttcggatgaatattcgagcacatcggccaagccgggtgcaactggtgttacaagacaccactatctctcgaggctag

SEQ ID NO: 301004 - DNA, 960 bp, Artificial Sequence
  derived and/or modified sequence
atgagccagcagaacaccagcggcgactgcctgttcgacggcgtgaacgagctgatgaagaccctgcagttcgccgtgcacatccccaccttcgtgctgggcctgctgctgaacctgctggccatccacggcttcagcaccttcctgaagaacagatggcccgactacgccgccaccagcatctacatgatcaacctggccgtgttcgacctgctgctggtgctgagcctgcccttcaagatggtgctgagccaggtgcagagccccttccccagcctgtgcaccctggtggagtgcctgtacttcgtgagcatgtacggcagcgtgttcaccatctgcttcatcagcatggacagattcctggccatcagataccccctgctggtgagccacctgagaagccccagaaagatcttcggcatctgctgcaccatctgggtgctggtgtggaccggcagcatccccatctacagcttccacggcaaggtggagaagtacatgtgcttccacaacatgagcgacgacacctggagcgccaaggtgttcttccccctggaggtgttcggcttcctgctgcccatgggcatcatgggcttctgctgcagcagaagcatccacatcctgctgggcagaagagaccacacccaggactgggtgcagcagaaggcctgcatctacagcatcgccgccagcctggccgtgttcgtggtgagcttcctgcccgtgcacctgggcttcttcctgcagttcctggtgagaaacagcttcatcgtggagtgcagagccaagcagagcatcagcttcttcctgcagctgagcatgtgcttcagcaacgtgaactgctgcctggacgtgttctgctactacttcgtgatcaaggagttcagaatgaacatcagagcccacagacccagcagagtgcagctggtgctgcaggacaccaccatcagcagaggctag

SEQ ID NO: 301005 - DNA, 729 bp, Artificial Sequence
  derived and/or modified sequence
atgagccagcagaacaccagcggcgactgcctgttcgacggcgtgaacgagctgatgaagaccctgcagttcgccgtgcacatccccaccttcgtgctgggcctgctgctgaacctgctggccatccacggcttcagcaccttcctgaagaacagatggcccgactacgccgccaccagcatctacatgatcaacctggccgtgttcgacctgctgctggtgctgagcctgcccttcaagatggtgctgagccaggtgcagagccccttccccagcctgtgcaccctggtggagtgcctgtacttcgtgagcatgtacggcagcgtgttcaccatctgcttcatcagcatggacagattcctggccatcagataccccctgctggtgagccacctgagaagccccagaaagatcttcggcatctgctgcaccatctgggtgctggtgtggaccggcagcatccccatctacagcttccacggcaaggtggagaagtacatgtgcttccacaacatgagcgacgacacctggagcgccaaggtgttcttccccctggaggtgttcggcttcctgctgcccatgggcatcatgggcttctgctgcagcagaagcatccacatcctgctgggcagaagagaccacacccaggactgggtgcagcagaaggcctgcatctacagcatcgccgccagcctggccgtgttcgtggtgagcttcctgcccgtgtag

SEQ ID NO: 301006 - DNA, 2265 bp, Artificial Sequence
  derived and/or modified sequence
atggggattaaggtccagagacccagatgctttttcgacatcgcgatcaacaatcagcctgcgggtagggttgtgtttgaactgttcagcgacgtttgtccaaaaacgtgcgaaaactttaggtgcctctgtactggcgaaaaaggaacaggcaagtccacacagaaacctctgcactacaaatcttgtctgttccaccgagtggtgaaggatttcatggtccaaggcggcgacttttccgaaggcaacggaaggggaggcgagtctatctatggcggattcttcgaggacgagagtttcgccgtcaagcataacaaagaatttctccttagtatggctaatcggggtaaggacacaaacggaagtcagttctttattaccaccaaaccaacgcctcatctggacggtcatcatgttgtcttcggccaggtgatatcgggtcaggaagtggtgagagaaatcgaaaatcaaaagactgacgctgcatctaagcctttcgctgaagtcagaattctgtcctgtggagaactgattccaaaatccaaagtaaaaaaggaggagaaaaaacgccacaaatcaagttcgagctcttcctcaagctcatccgattctgacagcagctctgactcccagtctagctccgatagtagcgattccgaaagcgccacagaagagaagagtaagaagcggaagaagaagcacaggaagaattccagaaagcacaagaaggagaagaaaaagcgcaagaagtccaaaaaatctgcatccagcgagtcagaagctgaaaatctggaggcccaaccacagtctacagttagacccgaggaaattcctcctatccctgaaaaccgcttcttaatgaggaagtcccctcccaaggcagatgagaaggagaggaagaatagagaaagggaaagagaaagggagtgtaatccgcccaactcccagcccgcatcataccagcgaagattactggtgacacggagcggccgcaagataaagggtagaggacctaggagatacagaactccgtctagaagtcggagtagagatcgcttcaggcggtctgagacccctcctcactggcgacaggaaatgcagcgagctcagagaatgcgcgtctcatcgggtgagaggtggattaagggagacaagtcagagcttaacgagataaaggagaatcaaaggtctcctgtccgcgttaaggaacgcaaaattaccgaccacagaaatgttagtgaaagccctaaccgcaagaacgagaaggagaagaaagtgaaagaccataaatcgaacagcaaggaaagagatatccggaggaactctgagaaggatgataaatacaagaataaagtcaagaaacgcgccaagtctaagagtaggtctaagagtaaggagaaaagcaagtccaaggagagagattcaaaacacaaccggaatgaagaaaagcggatgcgcagccgcagcaaaggacgcgatcatgagaacgtgaaagagaaagaaaaacagtctgacagtaaaggcaaggaccaggagagaagccgcagcaaggagaaatctaaacaactggagtcgaaatcgaacgagcatgaccactcgaagtcgaaagagaaagacagaagagctcagagtaggtcaagagagtgcgacataacgaaaggtaaacacagttacaactcccgcaccagagagcgcagtaggagtcgagataggagccgacgagttaggagtagaacccacgatagggatagaagtaggtccaaggaatatcaccgataccgagaacaagaatacagacgaaggggaaggtctaggagccgcgagcggagaacccccccaggccgtagtaggagtaaagatcgacggaggcgccggagggattccagaagctcagagcgggaggagtcccagtcccggaacaaagacaagtatagaaaccaggaatccaagtcttctcaccgcaaagaaaattcagagtcagagaagcggatgtactccaagagccgggaccacaactcttctaacaacagcagggagaagaaggccgatcgggaccagtcccccttctctaagattaaacagagctcacaagataacgaacttaagtcctccatgttgaagaacaaagaggatgagaaaattaggagttccgtggagaaagagaaccagaaaagcaaaggtcaggaaaatgaccatgtgcacgaaaaaaacaaaaagttcgaccatgaaagctcacctggcactgatgaggacaaaagcggatag

SEQ ID NO: 301007 - DNA, 2265 bp, Artificial Sequence
  derived and/or modified sequence
atggggatcaaagttcagagaccacgctgtttcttcgatatcgcaatcaacaatcaacccgccggcagggtggtgtttgaactgtttagtgacgtctgcccaaagacctgtgaaaattttcgctgcctctgtaccggggaaaagggtaccggaaagtcaactcaaaaacctctgcattacaagtcctgccttttccacagggtggtcaaagattttatggtgcagggaggcgatttcagcgaaggtaacggccgcggcggtgaatcgatttacgggggtttctttgaggacgagagtttcgcagtgaaacacaataaagaattcctgctttctatggccaaccgcgggaaagacactaatggttctcagttctttattaccactaaacctacgccccatttggacggacaccacgttgtgttcggacaggtgatttctggtcaagaggtggttcgtgagatcgaaaatcagaagaccgacgccgcttcgaagccttttgcagaggtgaggatactaagctgtggggaattgatcccaaaatctaaggtaaaaaaggaggagaagaagcgtcacaagagttcaagctccagcagtagttcatcaagtgattccgactcctctagtgactcacagagctcctcagacagtagtgattcagagagtgctacagaggagaaaagtaagaaacgaaaaaagaagcacagaaaaaattccagaaaacacaagaaggaaaagaagaagagaaagaagtccaaaaagtcggccagctccgagtctgaggccgagaacctcgaagcccagccccagagcactgtcaggcccgaagaaatcccacctattcctgagaatcggtttctcatgcgcaaatctccacctaaggccgacgagaaagaaagaaaaaatagggagagagaaagggaacgcgagtgcaaccctccaaactcacagcccgcctcgtatcagaggcggttgcttgtgacccgctcaggacgaaaaatcaaggggcgggggcctcggcgctaccggactccttctagatcaaggtcacgagatcggtttagacggagcgaaacccctccacattggcggcaagaaatgcagcgggctcagaggatgcgtgtaagcagcggagagagatggataaagggagataaaagtgagcttaacgagataaaggaaaaccagcgttcccctgtgagggtcaaggagagaaagattacggatcataggaacgttagtgagtcccccaaccggaagaatgaaaaggagaagaaggtgaaagaccataagtccaattcgaaagaacgcgatattcggagaaacagcgagaaggatgacaagtacaagaataaggtaaaaaagcgcgctaagagcaaatcccggtccaaatccaaagagaagtctaaatcaaaagagagggattccaagcataaccgaaatgaagagaaacggatgcgttcccgaagcaaaggcagggaccacgagaacgtgaaagagaaggagaaacagagtgatagcaagggcaaggatcaggaaaggtcaagaagcaaggagaagtcgaaacagcttgagagcaaaagcaacgagcacgaccattctaaaagcaaagagaaggataggagggcacagtcacggtccagagagtgtgacattaccaaaggaaaacattcatataactcacgcactagggaaagaagccgtagccgtgaccggagcaggcgtgtgaggtccagaacccatgaccgcgatagatctcgttcaaaagagtatcaccggtacagggagcaggagtatcggcggagggggagatctaggtcacgggaaagaaggactcctcctggtaggtcccgctcaaaagataggaggcgcagaaggagggattctaggtcttccgagagagaagaatctcaatctcggaacaaagacaagtatcgaaatcaggagtctaaaagctctcatcgcaaggagaactccgagtcagagaagcgcatgtattcaaagtcccgcgaccataactctagtaacaactcaagggaaaaaaaagccgatagagatcagtcccctttcagcaagattaaacagtccagccaggataacgagctgaagtcttctatgcttaagaacaaggaggacgagaagattcggtcatcggtcgaaaaggaaaaccagaaatctaagggccaggaaaacgaccacgtgcacgagaagaacaaaaagttcgatcatgaaagctctcctggcacagatgaagacaagtctggctag

SEQ ID NO: 301008 - DNA, 2265 bp, Artificial Sequence
  derived and/or modified sequence
atgggcatcaaggtgcagaggccccgctgcttctttgacatcgccatcaacaaccagcctgctggccgggtggtgtttgagctgttcagtgatgtgtgccccaagacctgtgagaacttccgctgcctgtgcacaggagagaagggcaccgggaagagcacccagaagcccctgcactacaagagctgcctcttccaccgggtggtgaaggacttcatggtgcagggcggggacttcagcgagggcaatggccggggcggggagagcatctatggaggcttctttgaagatgagagctttgctgtgaagcacaacaaggagttcctgctgtccatggccaacagaggcaaggacaccaacggcagccagttcttcatcaccaccaagcccaccccccacctggatggccaccacgtggtgtttggccaggtgatcagcggccaggaggtggtgcgggagattgagaaccagaagacagatgctgccagcaagccctttgctgaggtgcgcatcctgagctgtggggagctgatccccaagagcaaggtgaagaaggaggagaagaagaggcacaagagcagcagcagcagcagcagcagcagcagtgacagcgacagcagcagtgacagccagagcagcagtgacagcagtgacagcgagagcgccacagaggagaagagcaagaagaggaagaagaagcacaggaagaacagcaggaagcacaagaaggagaagaagaagaggaagaagagcaagaagagcgccagcagcgagagcgaggccgagaacctggaggcccagccccagagcacagtgcggcctgaggagatcccccccatccctgagaaccgcttcctgatgaggaagagcccccccaaggcagatgagaaggagaggaagaaccgggagcgggagcgggagcgggagtgcaacccccccaacagccagcctgccagctaccagaggcggctgctggtgaccaggagcggcaggaagatcaagggccggggcccccggcgctaccgcacccccagccgcagccgcagccgggaccgcttccgccgctctgagaccccaccccactggaggcaggagatgcagagggcccagaggatgagggtgagcagcggggagcgctggatcaagggggacaagtctgagctgaatgagatcaaggagaaccagaggagccctgtgcgggtgaaggagaggaagatcacagaccacagaaatgtgtctgagagccccaacaggaagaatgagaaggagaagaaggtgaaggaccacaagagcaacagcaaggagcgggacatcagaagaaacagcgagaaggatgacaagtacaagaacaaggtgaagaagagggccaagagcaagagccgcagcaagagcaaggagaagagcaagagcaaggagcgggacagcaagcacaacagaaatgaggagaagaggatgaggagccgcagcaagggccgggaccatgaaaatgtgaaggagaaggagaagcagagcgacagcaagggcaaggaccaggagaggagccgcagcaaggagaagagcaagcagctggagagcaagagcaatgaacatgaccacagcaagagcaaggagaaggaccggcgggcccagagccgcagccgggagtgtgacatcaccaagggcaagcacagctacaacagcaggacccgggagaggagccgcagccgggacaggagcagaagagtgcgcagcaggacccatgaccgggacaggagccgcagcaaggagtaccaccgctaccgggagcaggagtacagaagaagaggccgcagccgcagccgggagaggaggaccccacctggccgcagccgcagcaaggacagaagaagaagaagaagagacagccgcagcagcgagcgggaggagagccagagcaggaacaaggacaagtacagaaaccaggagagcaagagcagccacaggaaggagaacagcgagagcgagaagaggatgtacagcaagagccgggaccacaacagcagcaacaacagccgggagaagaaggctgaccgggaccagagccccttcagcaagatcaagcagagcagccaggacaatgagctgaagagctccatgctgaagaacaaggaggatgagaagatccgcagctctgtggagaaggagaaccagaagagcaagggccaggagaatgaccacgtgcatgagaagaacaagaagtttgaccacgagagcagccctggaacagatgaggacaagtctggatag

SEQ ID NO: 301009 - DNA, 2265 bp, Artificial Sequence
  derived and/or modified sequence
atgggcatcaaggtgcagcggccccggtgcttcttcgacatcgccatcaacaaccagccagctgggcgcgtggtttttgagctgttcagcgatgtgtgccctaaaacctgtgagaactttcgatgcctgtgtaccggagagaaagggactgggaagagcactcagaaacctcttcactacaagagttgccttttccacagggtcgtaaaggacttcatggtgcagggcggagacttctctgaagggaacggcaggggcggtgaatccatctacggtgggttttttgaagacgagtccttcgctgtgaaacataacaaggaattcttgctgagtatggctaatagaggcaaggatactaacggatcacagttttttatcacaactaagcctactcctcacctagacggccatcatgtggtctttggacaggtcatttccggccaagaggttgtccgcgagatcgaaaaccaaaagactgatgccgcctcgaaaccttttgcagaagttcggatactgagttgtggcgaactgatccctaaaagcaaagtcaaaaaagaggagaagaaacgacacaagagctcctcgagttccagcagctctagttctgacagcgacagtagttcagacagccagtcttcaagtgattctagcgatagcgagagcgccacagaggaaaagtctaagaaacgcaaaaaaaagcataggaagaattctagaaaacacaagaaggagaagaagaaaaggaagaagtcaaagaaaagcgcatctagcgagagtgaagccgaaaacctcgaggctcagcctcagtcaacagtcagaccagaagagatccctccaatccccgagaatcggttcttgatgcgtaaatctccccctaaggcggacgagaaggaaaggaaaaaccgagaaagagagcgagaacgcgaatgtaatccccccaattcgcagcctgcttcctatcagagaaggctgctagtgaccagatctggtagaaaaatcaaagggagaggaccaagaaggtatcgtacccctagtcggagccgaagtcgcgaccgattcagaaggtcagaaacccctccgcactggcggcaagaaatgcagcgcgcccagcggatgcgcgttagcagcggagaacgctggatcaagggcgacaagtcagaactcaacgaaatcaaggaaaatcaacgatctcctgtgcgcgtgaaagagcgcaagatcaccgaccacaggaacgtgtctgaaagcccaaacaggaagaacgagaaagagaaaaaagtgaaagatcacaaatccaatagtaaggagcgcgatatcaggcgaaatagtgaaaaggacgacaagtataaaaataaagtgaagaagagggcgaaatctaaaagtcgcagtaagagcaaagaaaagtctaagagcaaggaacgggactccaagcacaataggaatgaggagaagcgtatgaggagccggagtaaaggaagggatcatgagaatgtaaaagaaaaggaaaagcagtctgactcaaaaggcaaggaccaggaaaggagccggtctaaggagaaaagcaaacagcttgaaagcaaaagcaatgaacacgaccatagcaagtccaaagagaaggatcgccgggcgcagagccggagtagggagtgcgatattacaaaaggcaaacatagttacaacagtcgaaccagagaaagaagtaggtccagagaccgctcaaggagggtaagaagccgcacacacgacagggacaggagccggtctaaggagtaccaccgctatcgggaacaggagtacaggaggcgagggaggagccggtctcgagagaggaggaccccaccggggcgttcccgaagcaaggaccgtaggagacggagaagagatagcagatcatctgagcgagaggagagccagtctcgtaataaagataagtatcgcaatcaggagagtaagagcagccacaggaaagagaattctgagtccgaaaagcggatgtacagcaaatcgagagatcacaactcatcaaataatagtcgcgagaaaaaggccgatagagaccagagccccttctccaaaatcaagcagagtagccaagataatgagctcaaaagcagcatgctgaagaacaaggaggacgaaaagatacgctcaagcgtggaaaaggagaaccagaaatccaaagggcaggagaatgaccatgtgcatgagaagaacaagaaatttgatcacgagtcctccccggggaccgacgaagataaaagtggctag

SEQ ID NO: 301010 - DNA, 2265 bp, Artificial Sequence
  derived and/or modified sequence
atgggcatcaaggtgcagcggccccggtgcttcttcgacatcgccatcaacaatcaacccgctggccgcgtggtgttcgaattatttagcgacgtttgccctaagacctgcgagaacttcaggtgcctgtgtacgggcgaaaaggggacagggaagtctacccaaaaaccactccactataagtcgtgtcttttccacagagtggttaaggacttcatggtacagggtggagacttttctgagggcaacggccgcggaggtgagtccatatacggcggtttctttgaggacgaatcatttgccgtgaagcataacaaggagttcctcttgtctatggctaatagaggaaaagataccaacgggtcccagtttttcatcaccacaaagccaacccctcacttggatggacaccacgtggtctttggtcaggtcatctcgggacaggaagtggtgagggagatcgaaaatcagaagaccgacgccgccagtaaaccgtttgcagaggtgcgcatcttgtcttgcggagaactgatcccaaaaagcaaagtcaagaaggaggaaaagaaacgccacaagtcaagctcctcttcctccagcagcagttccgactcagatagctctagcgatagccagtcaagtagtgacagcagcgactcggaaagtgccaccgaagaaaagagcaagaagagaaagaagaagcaccggaaaaactccagaaaacataagaaggagaagaagaaaaggaaaaaaagcaaaaaatctgcgagtagtgagtccgaagcggagaatctggaagcacagcctcagagcaccgtgcgtcccgaagaaataccaccgatacccgagaacaggttccttatgcggaagtccccacctaaggcagacgagaaagagcggaaaaacagagagcgggaacgggagagagagtgcaacccccctaactctcagcctgcatcgtaccaaaggaggttgctcgtcactcgaagtggcaggaagatcaaagggcggggcccgcggcgctatagaactcctagtcgctcccgctcccgggatcgattcagacgttcggaaactcccccgcattggcggcaggagatgcagagagcccaacgtatgcgggtgagctccggcgagaggtggattaagggggacaagtccgaactgaacgagatcaaagaaaaccagcggagtccagtacgcgtgaaagagcggaagatcactgatcatcggaatgtctctgagagccccaaccgcaagaacgaaaaagagaagaaagttaaggaccacaagtctaactccaaggagcgtgatataagaaggaatagtgaaaaggatgacaaatataagaataaggtgaagaaaagagcaaaaagtaaatctagaagtaaatccaaggaaaaatcaaagtccaaagaacgtgacagtaaacataataggaatgaagaaaaaagaatgcgcagcagatcaaagggaagggaccacgaaaatgtaaaggagaaggaaaagcagagcgattctaagggcaaagaccaggaaagatccagatctaaagaaaaatcaaaacagctcgagtcaaaaagcaacgaacatgaccactctaagagcaaagagaaagaccggagagcacaaagcaggtcgagagagtgcgatattaccaagggaaagcactcatataatagccggacccgggagcgatctagatcccgggaccggtcacgcagagtgcgctcccgtacgcacgaccgcgatagaagcaggagtaaggagtatcatagatacagagaacaagagtaccgcaggcgaggccggtcacggtccagagagcgtaggacccctccaggtaggagtagatcaaaagacaggagacgccggcgaagagatagtcgctcttccgaaagggaagagtcccagagtagaaataaagataagtacagaaatcaagagtctaagagctcacaccgcaaagaaaactccgagagcgagaagcgcatgtatagtaaaagcagagatcacaatagcagtaacaatagccgtgagaagaaagctgacagagaccaatctccatttagtaagataaagcagagctcacaagacaacgaactgaagagcagtatgttaaaaaataaggaggacgagaagattagaagttctgtagaaaaggagaaccagaagagcaagggccaggaaaacgaccatgtgcacgaaaagaacaaaaaattcgaccacgagagcagtccgggtacagacgaggataaatccggctag
